United States Patent Application Publication US 2016/0002648 A1 - sequence listing, part 2

SEQ ID NO: 2704 - protein, 2512 aa, Sorghum bicolor
MKTVNVTSNYRKDESDSHVLCLSGNLTRCPENSVDTCLNLHYRTHKHDDQMHHVYQLNLSDVDLHVNPSVIGQIRMFLRKLDSGPSVSSDVESTMIGQSSMKSGATNGILPKFSLSNLCGADGTVFAGVSVDQFPFLVDVEAQESLYSKNEQYHDTSGLNGYHASDLVSNTQGKTQRSNCSSASSNHAKNASRTVLDLSLISVRVHFPESCGTLATITIPESISTLTYFDASSWDLLLSANNLTLASPWTPPNIHELLWGTSSHRNSGVLNVRVKKDLPALSTEVCVGIQNVCCVLSSKLLAMFVGFFLLDDWSPIAEQEFLVAGNNLECLGESHDCVTYKFEISDCVVIFPVEEQDFFCLKLEVPHFFCEFIATGSSVEFAKRIPKELFSSECIVSRRVDIICIHARNASISLLIVSDQTDFMLKLDENVPKRIHSLIEKLDAGIWIQVPCKDIPYSQQTTLPTSIMSKISRCNLIAEDLYFINGMETVIGLVDQLISIGNESKMYKGNALQFLDHRSFYEGNPDPSECTNLTISIKDLMILLGQSKNKGLALEKIATANMEFDVSAVLGEKPERMNFDVVSLMLQSPGGYTLISIVSDGPLSPVFVKFTKHHAGQDEILLNVPLFEVWLYLQDWNTIINHSQSYVKTEVNSMPVEHAAALSQFPETASSPLIASEFGLPDDFNLVVTCETIAGVLHIPIWGKEENHTSNHMGVTPFPTEVGTHHEADDIQYCEPKGCKFVTLTFESKHFVVMSGDSCMNFKCDLERLKVMLEMIQENKGTSVPFVHISKVKSSGYVHQTERNLEHLSVDLQAEYMDVSFSHQIFNFWHNMELKFPAASSASSFYSVAFKAGLRKGSLLLNDGRWSSHGPVIETLLKNLTVQFSQMKDRTEVSAFVDLLVNYNNIDKVMWEPFVEPSRFQLSMLRKCGDSGLDISPSTDVCLSSSKQLNLNISEPLIEAILRLSQMITDSLDPSNGSGLREDPGILRLSHDDVRTRRYAPYILSNDTSLPFRFKVYRGAVNSDDIDSFSVIDENSVPAGYAVPIYVEETLDEFFFQHREARSSDHLIEKRMSAVSHYMISIEFDGTSGPSKAMSMDLVGIYFFEVNFSSSRKPILGEESLGAFSSNGKGNDGLIVPVVLDVSLQNYSKHIRVYSTVILYNATSMPLELRFDIPFGLTSKVIGPIPPNKEIPLPVHLSEAGQIRWHPVGRTYLWSETRSLSSLLSRESRVGFMKSSVCYPSHPSNDPFRCCVSVEEYNVPSSVSIQKGELCSERLNAQVSGSSTPNTFKQNLTRTHFIRHVKLNTPLLIKNYLPVCISLAIDNGGSARVVSLKEVGSASIFFVDPSNDLGITIDIQDYRSLNIKFPRAESFSTAAKSNGFKFSITESITFYSNLSNSPLNVMLEKSMDARSGARELYLSVPFLLYNCTDLLLTVTESSSERSGSTLVIPPSFELDGHARHLLEKGGLSLVDPSVQCFTGKMPQLDLMDGRCSSSEISCTSNSESAKKDFDNGVKAYMFAPDGHTPATELSVKLNASPPNNGTETTRRNWSIPFLLVPASGSTNVTIPQSSTSGAFLVAVASIPVSTELFGRTRAITFRPRGIKVLEVLARAQRCLISLPLCHSVSNVLSQANYVRLLKGHRELLVSVRFDGPGWQWSGSFFPDHLGDAQLKMRNSASGLSYMVRVEVQNADLDIYNKRFSGKNNVNTGTVLILLSDDKTGFVPYRIDNFSMEKLRIYQQRCESIETIVYPYTSCQYAWDEPCYPHRLTVEIPGERSLGTFNLDILNDDVHVSLPSTSEKAERQFCISIHAEGAIKVLSVLDSNYHNTETKEKNFLGSKEPKVADHKLELDMNFAEVIKIQLPFIGISLISSSPQELLFASAKEMTVVAMQSLDQQRFTVQIQSMQIDNQFPDSPHPVMLSFEGSHKGKSMNFFKSKDTKLKSANDILSNTTEPVLQFTAAKWRTRDVSFVSYQYINISVAPVRLELEERLVLSMIEFFRSVSSRINIGRFEKSLELSILGGATDMLREYEKISKNITDKLLVQDSELLPSVVPVGAPWQQIHLLARKQKKVYIELFQLTPVKLTFSFTSTPWLNRTEGGSDPSIGFNNTTAIQRGLMALLDVEGVPVYLGEITAENLMASWQSVQDILVRHYSRQILHELYKVLGSAGVIGNPMGFARNVGFGLKDFISASRKGKLQSPVELLNGIAQGSKTLIGSTVYAVSSATSHFSKTAYKGLVAFTYDEQAASKMEERERQLGLHGEGVLNGFLEGLTGLLQSPIRGAEKHGLPGVISGLAMGTAGLVARPMASILEATGRTAQSIRNRSNPHESNYLRVRFPRPVARDHPLFPYSWEEAIGVSLLAQAESGRLKEETFVMCKTLKGAGKFLVLTEKLLLLVSSPYLVDLGSPQFVGVPPDPQWSIDTEMHLKSVVHLDRSQEVVNIVGSNGQTSPRDKRSGTRNRVMSSAFVPLFHLSIELPNDEDAEGTVQVLQALIEKGKARRWDKNILHRSNIS

SEQ ID NO: 2705 - DNA, 441 bp, Sorghum bicolor
atgcatagccagttggtctgcggcggctgcaagcgtcttctccagtaccgcaggggagccaccggcgtctgctgcccaacctgcaacactttcacagccgccaacccatcaggaccggagatgtctgaactcgtctgtggcggctgcttcaccatgctggtgcactcccgcagcgccaccaacatacgctgccctcactgtagtaggctcaactccacaagatcaggaaaccaaatgggtcacctgtcatgcgggcaatgccggacaactctggcatacccaccgggagcgacgacagtcgggtgcccaacatgccgcaacattaatccagtcagggatgctcggccccagacggttctggtggagaatcctaagacactggatgaaaagggcaaactggtgagcaatgtcgccgttggtgtcacctcatggaaaagatga

SEQ ID NO: 2706 - protein, 146 aa, Sorghum bicolor
MHSQLVCGGCKRLLQYRRGATGVCCPTCNTFTAANPSGPEMSELVCGGCFTMLVHSRSATNIRCPHCSRLNSTRSGNQMGHLSCGQCRTTLAYPPGATTVGCPTCRNINPVRDARPQTVLVENPKTLDEKGKLVSNVAVGVTSWKR

SEQ ID NO: 2707 - DNA, 789 bp, Sorghum bicolor
atggccgtggggatcggacatgagcgcgtagtagagcacagggacatgacgccagcaggcacgagcacgaacacgaacacgaacacgacgacgtcgccgtgggcgagacggacgcgggagcaaaggacggcggcgagcacgcggagcttggacattcggccgggaatgggacgcctgttcgagaaaaccctccaatctttgggcgagatatgggacgacgacgacgacgacgacgacggtaacaagaagactactggctcgtcgtcgtcgtcgtctgcaccaccagcaaaagcagctcagtttcgtcaagacaagcttgccgacatgctgctaaggaaagcgaccaaagaagaggaatggtttaaagaaaaccacggcagggttcttgttcgagacgcagctgtgcttgctggtgcactattaaacacaggcacgagactgcagaagcgaggacagccaaggacgaagctgctggagttcatcttcaatgtgtgggtggacaagctgctgtatgccgccgtcagatgcagcgcggagagccatgccaagcagctcagccgcggcggcgacctcaccaccatactgtggcttattctccaacatgctggcctatttcacatcggagaaattaaactcaaggacatggagcctaaagagaagaagcccgaggagaagaagaatgcccgaggacatggtgcctttgttgcccccaacagctcaaatgccttactggccgcctggctggtctggggagacaccaccgctgataccaacgacatatatacctga

SEQ ID NO: 2708 - protein, 262 aa, Sorghum bicolor
MAVGIGHERVVEHRDMTPAGTSTNTNTNTTTSPWARRTREQRTAASTRSLDIRPGMGRLFEKTLQSLGEIWDDDDDDDDGNKKTTGSSSSSSAPPAKAAQFRQDKLADMLLRKATKEEEWFKENHGRVLVRDAAVLAGALLNTGTRLQKRGQPRTKLLEFIFNVWVDKLLYAAVRCSAESHAKQLSRGGDLTTILWLILQHAGLFHIGEIKLKDMEPKEKKPEEKKNARGHGAFVAPNSSNALLAAWLVWGDTTADTNDIYT

SEQ ID NO: 2709 - DNA, 558 bp, Sorghum bicolor
atgtctctccccccggacggcggcggtggcaccggcgacgactggttcctcgactgcggcatcctcgacgacctcccggccgcggcctgcggggccttcccgtgggacgcgtccccgtcgtcttccaaccccagtgtggaagtgggcagctatgtgaacacaaatgatgtcttcaaggagcccaatgatgtcttcaaggagcctggcagcaataaacgtttaaggtcaggatccaatgatgtgccaacatctaaagcttctagggaaaaaatgaggaggaacaaactgaatgataggtttcttgaattggggtctacattagaaccagggaagccagtaaaagctgacaaagctgctatcctaagtgatgctactcgcatggttattcagcttcgttcagaagcacagcagctcaaggaaactaatggtagccttgaagaaaagattaaagaactaaaggttattcagctattttttgttaactcacatataatacattgtccttttatggtgagagcatgcctgtgttattcaggaatccataacatttcccagtag

SEQ ID NO: 2710 - protein, 185 aa, Sorghum bicolor
MSLPPDGGGGTGDDWFLDCGILDDLPAAACGAFPWDASPSSSNPSVEVGSYVNTNDVFKEPNDVFKEPGSNKRLRSGSNDVPTSKASREKMRRNKLNDRFLELGSTLEPGKPVKADKAAILSDATRMVIQLRSEAQQLKETNGSLEEKIKELKVIQLFFVNSHIIHCPFMVRACLCYSGIHNISQ

SEQ ID NO: 2711 - DNA, 2379 bp, Sorghum bicolor
atggcagagttattagtgcacgtgtggaatgtgtgggaaattcagacaatggtgctccttagcttcatgctacagctctttctgttggctactggaagcctccgtcgccgccacaccacagcagtgctcagggctttgatatggttgggctatgtgggagcagacttggtggctgtttacgcccttggcctcttctctcagtatgaggacaaatacaagctagggagggagtcgtttggggacatactgccatttctctgggtgccttttctccttgtgcacctgggtggccaagattcgatcactgccttttctatcgaggacaacaatctatggctgaggcacttgttgaatctagcaacccaggggtttgtagctttgtatatcttctggaaatccttccacagaatcaatgccagtgtattgattcctgcaatgtttgtgtttgtttctgggatcatcaagtatggcgagagggtctgggcactaatgagtgcgagccgaaatggccttggcaagtcagttaagttcagctcatcagcagaactgtatcgtcgtagcaaggaatcatatgctcgtcagacggtgcttcttgctcgaggtttatttgtggggcgaactgtgctccaggttggggacgatgctgaagaacaacttgaatacgattttaacgagatttgtgaagacagaggagagaagctgaagatggtagtgatggagcttggcatgatgttcgatctcctctacaccaaggctaatgtgctgcagagatggaccggtgtcgtgttccggtgtgcttcccagactttgatggtggttgccttcctttccttcctgataagcttaaagggtgcccacaagcacaacagtgtgaatgtcgcgattacctacacattgttcactggggccatgtttatggaagcctgttctattgctgtggtgatggcatcaccttggacaagagcacacttgaacgaatacagtagctttcttcattgcctttgcaacattgctacgtcccttttcaaggctgttcagtgtaacaaggggcaccagaccatgagttgcatttccatggggcagttcaattatatggattactgcatcgctatgaaatacaaacccagactaatttcaatggccatcagtgctattggtctggacaagcaatggagaaacttatggtacgtccaccacatcgtcgatgatgccagctttagatcaggggaggaggggattatcagcggtgttatggaaattcttggcagaccaaacaatgactggtttggacagaggtgtcttggcaggagattgaattatacactgagcctgccctttgagcatgccctttatcgtctgcatatatacacagacttccatataaacaaatactttgcccagtacactcctgcaccagatgatgtaactatgcggcttaaggaacaatgcgagacgctatcaaactacatgatgtacctgatggtggtgcatccttccatgttgccagtcagcacggctgcagaagatcttgaacctgaacttctcaaatgggtaattaggaacaataatcaacactcccaacaggcggcaaccaagctagactttcttggccattacacaagctcagttctcagcaacgagccagactctgtctcccccttcgaagcagagccatgcgggccacttcatctggagcaatcacttatggagatgaaggagatgtggttgaggctgctggtgtatgctgctggtaaatgccgtggagagcaacatgcacggcagcttagcgaaggaggcgagctcatcacctttgtctggttactcatggtgcaccatggtcttggggacgtggcacggcaggagcttagtcttttaacatctaatgatccttgtgtaccccagcctgggtccacagtgtcagttgaaaatagtagctggagactacggcaagaacacccatgttacgccttccaattcttccctgctggtggtcagcaacaggaagagactgcagtggtatcgcgcgagaaagaacagatgatacagctcgcccgaatggtgcaggacattgtgccacaagtgttgagagctggacagtctgtggctgcagatacacagttcattggttatctcatccagcaattgctgtcagccctaacacagcacgatggggctacggctacggcggcaccagatggggcatcagagcaagatgaagccgggacatccggcgaggcagcaggacaagatgacgacgcggtgacaacgtctgagatccacgagcaagaacctgtgatgaatgcagtggaaaacgaaggctcgcgacacgcgtgtagcgctagtttctcttactcagctcatggatttcataatgcataa

SEQ ID NO: 2712 - protein, 792 aa, Sorghum bicolor
MAELLVHVWNVWEIQTMVLLSFMLQLFLLATGSLRRRHTTAVLRALIWLGYVGADLVAVYALGLFSQYEDKYKLGRESFGDILPFLWVPFLLVHLGGQDSITAFSIEDNNLWLRHLLNLATQGFVALYIFWKSFHRINASVLIPAMFVFVSGIIKYGERVWALMSASRNGLGKSVKFSSSAELYRRSKESYARQTVLLARGLFVGRTVLQVGDDAEEQLEYDFNEICEDRGEKLKMVVMELGMMFDLLYTKANVLQRWTGVVFRCASQTLMVVAFLSFLISLKGAHKHNSVNVAITYTLFTGAMFMEACSIAVVMASPWTRAHLNEYSSFLHCLCNIATSLFKAVQCNKGHQTMSCISMGQFNYMDYCIAMKYKPRLISMAISAIGLDKQWRNLWYVHHIVDDASFRSGEEGIISGVMEILGRPNNDWFGQRCLGRRLNYTLSLPFEHALYRLHIYTDFHINKYFAQYTPAPDDVTMRLKEQCETLSNYMMYLMVVHPSMLPVSTAAEDLEPELLKWVIRNNNQHSQQAATKLDFLGHYTSSVLSNEPDSVSPFEAEPCGPLHLEQSLMEMKEMWLRLLVYAAGKCRGEQHARQLSEGGELITFVWLLMVHHGLGDVARQELSLLTSNDPCVPQPGSTVSVENSSWRLRQEHPCYAFQFFPAGGQQQEETAVVSREKEQMIQLARMVQDIVPQVLRAGQSVAADTQFIGYLIQQLLSALTQHDGATATAAPDGASEQDEAGTSGEAAGQDDDAVTTSEIHEQEPVMNAVENEGSRHACSASFSYSAHGFHNA

SEQ ID NO: 2713 - DNA, 1482 bp, Sorghum bicolor
atggcttccgcggcggctcagtgcttcagctactcctcgtcaccggccacgtgggctatgcggcagcgcggcggcggcggtgccggtgccggtgccggcgtgcttcggctctcgtcccggcggaccttctcggtctccgcggcggccgggttcgacaaccagaaccgcgagtatgtgatcgtcggcggagggaacgccgcggggtacgccgccaggacgttcgtcgagcacggcatggctgatggccgcctctgcatcgtctccaaggagccagttccaccatacgaacggccagccttgaccaaaggctatctttttcctccggacaagaaaccggcccgcctacctggtttccatacatgtgttggatctggtggacagcgacagactgctgaatggtacaaggagaatggtatagaggtgctgtatgaggatccagttgtagcatttgatggcaaaacacaaaccttaaaaacttcatcagggaaaattctgaaatatggctcacttattatttctactggatgtgaagcttcaagattacctgagaaaattggaggcacattacctggagttcactacatacgggatgttgctgatgctgattctctagtatcctcattgggaagtgcaaagaaggtggtggttattggtgggggctatattggcatggaggtagctgcagcagcttgtggctggaatcttgacacaactattatattcccagaggaccacattatgccaagattatttacaccctcccttgctaagaagtatgaggaactgtatcagcaaaatggtgtcaaattcataaagggggctcttatcgacaaacttgaagctggctctgatggaagggtgtcttctgcagtacttaaggatggatctgtagttgaagctgatacagtaattgttggtataggagcaaaaccagttgtcagcccctttgaagctgttggagtcagcgctgaagttggtggaatagaggttgattccctgttcagaactagtgtacctggcatctttgcaattggagatgtagcagcctttcccctgaagatgtacgatagagttgctcgagtggaacatgtggatcatgctcggaaatctgcacaccactgtgtagaaactctcctaacatcccagacaaaagcgtatgactaccttccatatttctattcaagagtttttgagtatgaaggaagtgcgaggaaaatttggtggcagttttatggtgataacgttggcgaagcagttgaagtagggagctttgatccaaagattgcaactttctggattgactctgatagtcgactgaagggtgttttccttgagagtggaacctcagaggaattctcgcttcttccgcagctcgctaaatctcagcctgttgtcgacaagtctaagctccaggccgcaacttctgttgaaaatgcattagagattgcaagaagctcactccagtccagcgcttcggtttag

SEQ ID NO: 2714 - protein, 493 aa, Sorghum bicolor
MASAAAQCFSYSSSPATWAMRQRGGGGAGAGAGVLRLSSRRTFSVSAAAGFDNQNREYVIVGGGNAAGYAARTFVEHGMADGRLCIVSKEPVPPYERPALTKGYLFPPDKKPARLPGFHTCVGSGGQRQTAEWYKENGIEVLYEDPVVAFDGKTQTLKTSSGKILKYGSLIISTGCEASRLPEKIGGTLPGVHYIRDVADADSLVSSLGSAKKVVVIGGGYIGMEVAAAACGWNLDTTIIFPEDHIMPRLFTPSLAKKYEELYQQNGVKFIKGALIDKLEAGSDGRVSSAVLKDGSVVEADTVIVGIGAKPVVSPFEAVGVSAEVGGIEVDSLFRTSVPGIFAIGDVAAFPLKMYDRVARVEHVDHARKSAHHCVETLLTSQTKAYDYLPYFYSRVFEYEGSARKIWWQFYGDNVGEAVEVGSFDPKIATFWIDSDSRLKGVFLESGTSEEFSLLPQLAKSQPVVDKSKLQAATSVENALEIARSSLQSSASV

SEQ ID NO: 2715 - DNA, 3714 bp, Sorghum bicolor
atggccatgaactactatgaagatcactcgatgtcatcatctcatgctgatgacacggatgaaaggaaaagcacagtttcagtctcccccgaggctagcgccgacgaggagccattttcattctttgagctgctttgctacgccgatacagtagattggctcctcatggccctgggaaccattgggtctgtcatccatggcatggcattcccagttggatatctccttcttggaaaggcgcttgatgccttcggaaccaacataaatgatccggagggcatggttcatgctttgtacaaggtggtcccctttgtgtggtacatggcagcagccactcttccagctggaatggttgagatctcctgctggatatactcgagtgagagacagttagcacgcatgcggctcgcgtttctgagatcagtccttaatcaagaggttggggccttcgacactgacttgactactgcaaccatcatcacaggagtaaccaactacatgagtgtcatacaagatgcaataggagagaagctgggtcatttcatcgcaagcttctccactttctttgctggcatcataattgcgtttatcagctgctggcaagttgcaatgctttccttcctggtcattccccttatcctcatcattggagcagcatacacaaaaaagttgaatgtattatctctgtcacgcaatgctattgtttcagaggcaatatcagttgtagagcagactttgtcacatatcaagaccgtcttctccttcgttggagagagctgggccatgaagtcctttgtccaatgcatggaaaaccaatttaatctaagcaagaaggaagctttgataaagggaataggactcggaatgttccaagcagtgaccttttgttcatgggcactgatggtttggattggggcagttgcaataaccaaaaacaaggcaacaggaggtggcacgatagctgccattatgagcatcctctttggtgcaatatcaattacctatgccgcaccagaccttcagaccttcaatcaggcaaaagctgcaggaaaagaggtcttcaaggtgataaagagaaagccatccataagttatggaaaaagtggattagtactagacaagattcatggagagatcaaattccgtagggttcactttgcatatccttcccgccacgataagccgattctccaaggattctcattgtccatccccgcaggcaaagtcatcgctctggtaggaagcagtggctgtgggaagagcactgtcatttcactacttcagaggttttatgatccaacttcaggtgacatattcattgatggccacagtatcaagaaacttgatctgaaatcgctgcgcagaaatatagcttcagtctctcaggaaccatcactgttttctggtaacataaaggacaacttgaagattggtaaaatggatgcaagtgacgaagagataactgaagcagcaacaacagctaatgttcattcattcatatccaagctaccaaatgagtacttaaccgaggtaggagaaaggggtgtgcagttatcgggaggccagaaacaaagaatagctatcgcaagggcaatgctgaaggatccaccaatcctacttctcgacgaagcaacaagtgcccttgattcagaatcagagaaactagttcaagatgcacttgagagagcaatgcacggaaggactgttatcttgatagcccacaggatgtccacaattgtaaatgctgacactattgttgtcgtcgaaaatggaagagtagcacaaactgggacacatcatgagttacttgacaaaagcacattctactccaatgaacaaattagcgaagcacaaatcacgcagtcctcgacaaatcggggaccaaagaaaaagctagaaagactggagtcaaaacaaccaagcagtgagaatgtaaaggacccacaccctttctttagactttggtatggattgcgtaaagaggacattatgaagattctatttggctcctcagcagcagccatctctggaatctcaaagcctttatttggttatttcatcatgacaattggtgtggcatattatgatccggatgcaaaaaagaaagtcaccaagtattctttgatattcttcacagcaggaatggttacaatggtgagtaacatcttgcagcactatatttatggtatcattggagaaagggcaatgaaaaacctaagggaggcactcttttcagctgttctccaaaatgagcttggttggtttgagaaaccaaataatggcataggatttcttacctcacgcattgtcagtgacacgtcaacagtcaagaccatcatatcagacagaatggcagttattgtgcaatgcatctcttcaattctgatagcaacaatagtaagcatgaaggtcaattggagaatggctttagtttcatgggcagtcatgccatgccatttcattggtggccttattcaagccaagtcagcaaaaggattttatggtgactctgctattgctcaccgggaacttgtctccctagcttcagaggctgctagcaacatccggactgtggcatcctttgtttatgaagatgaaataatcaagaaagcagaattgtcactgcaagagcccttgaagatcaccaagattgagagcatgaagtatggggtcatccaagggatctcgctctgcctctggaatattgcacatgcagtggcgctatggtacaccacagttttggttcagaggaagcaagcctcatttgaggacagcataagatcataccagatattttcactcacagtgccttccatcacagagctatggaccctaattcctatggtcatgtcagccatttcaatactgaatcctgtatttgacacacttgacagagagacacagattgtgccggataaaccagaaaacccaggcaaagggtggctcatcggtagaactgagtttcaggatgtgagcttcaattatccatcaagaccagaggtgaccattctggatggcttcaatctagttattgaacctggccaaagagtagcattggttggccccagtggtgcaggaaagtcctctgtactggctttaatactgagattctacgatccttccagaggtagagtgctaattgacaacaagaacataaaggactacaatctccgatggctcaggaagcagattgggctagttcaacaagaaccaatcctgttcaacacatccatcagagataacattagctatggaagtgaaagcccttcagagaccgaaatcatccaggctgcaatggaggcaaacattcacgaattcatcagtggtctaccagaagggtatggcactgttgttggagacaaagggagtcagctttcaggagggcagaaacagaggattgctattgcaagaacaatactaaagaggcctgccattctgcttcttgatgaggcaaccagcgcacttgacggtgaatctgagagggtggttatgagctctttaggggccaaagtgtggaaggacgaaaatgagcaagccagtatgattacaagtatcacagttgcacacagattgtccacggtcataaatgcagatacgatagttgtgatggaaaaaggaaaggttgttgaacttggtaatcaccaagcattgatctccgctgaagatggagtttactcaagattattccacttgcaaagtaacatgaaagattga

SEQ ID NO: 2716 - protein, 1237 aa, Sorghum bicolor
MAMNYYEDHSMSSSHADDTDERKSTVSVSPEASADEEPFSFFELLCYADTVDWLLMALGTIGSVIHGMAFPVGYLLLGKALDAFGTNINDPEGMVHALYKVVPFVWYMAAATLPAGMVEISCWIYSSERQLARMRLAFLRSVLNQEVGAFDTDLTTATIITGVTNYMSVIQDAIGEKLGHFIASFSTFFAGIIIAFISCWQVAMLSFLVIPLILIIGAAYTKKLNVLSLSRNAIVSEAISVVEQTLSHIKTVFSFVGESWAMKSFVQCMENQFNLSKKEALIKGIGLGMFQAVTFCSWALMVWIGAVAITKNKATGGGTIAAIMSILFGAISITYAAPDLQTFNQAKAAGKEVFKVIKRKPSISYGKSGLVLDKIHGEIKFRRVHFAYPSRHDKPILQGFSLSIPAGKVIALVGSSGCGKSTVISLLQRFYDPTSGDIFIDGHSIKKLDLKSLRRNIASVSQEPSLFSGNIKDNLKIGKMDASDEEITEAATTANVHSFISKLPNEYLTEVGERGVQLSGGQKQRIAIARAMLKDPPILLLDEATSALDSESEKLVQDALERAMHGRTVILIAHRMSTIVNADTIVVVENGRVAQTGTHHELLDKSTFYSNEQISEAQITQSSTNRGPKKKLERLESKQPSSENVKDPHPFFRLWYGLRKEDIMKILFGSSAAAISGISKPLFGYFIMTIGVAYYDPDAKKKVTKYSLIFFTAGMVTMVSNILQHYIYGIIGERAMKNLREALFSAVLQNELGWFEKPNNGIGFLTSRIVSDTSTVKTIISDRMAVIVQCISSILIATIVSMKVNWRMALVSWAVMPCHFIGGLIQAKSAKGFYGDSAIAHRELVSLASEAASNIRTVASFVYEDEIIKKAELSLQEPLKITKIESMKYGVIQGISLCLWNIAHAVALWYTTVLVQRKQASFEDSIRSYQIFSLTVPSITELWTLIPMVMSAISILNPVFDTLDRETQIVPDKPENPGKGWLIGRTEFQDVSFNYPSRPEVTILDGFNLVIEPGQRVALVGPSGAGKSSVLALILRFYDPSRGRVLIDNKNIKDYNLRWLRKQIGLVQQEPILFNTSIRDNISYGSESPSETEIIQAAMEANIHEFISGLPEGYGTVVGDKGSQLSGGQKQRIAIARTILKRPAILLLDEATSALDGESERVVMSSLGAKVWKDENEQASMITSITVAHRLSTVINADTIVVMEKGKVVELGNHQALISAEDGVYSRLFHLQSNMKD

SEQ ID NO: 2717 - DNA, 1764 bp, Sorghum bicolor
atggcggcggcggcgatgacggtcgccgtggtgctcgcggccgtcgtggccgcggcggcgacggcggaggtgcgctgggaggtggcgtacctcaccgtggagcccctcggccccgcgcagaaggtgattgggataaacaaccagttcccgggtcctctcttgaacgtgacgacgaaccagaacgtgagggtgaacgtccagaacaaccttgacgagcccctcctcatcacctgggacggaatccagatgaggatgaactcgtggcaggacggcgtgatgggcaccaactgccccatacctccgggatggaactggacctacgagttccagctcaaggaccagatcggcagtttcttctacttcccgtcgctcggcctccagcgagctgccggcgggtttggccctatcactgtcaacaatcgtgcaaccgtgcccctccccttcgaccaccctcatggcgatatcaccctgttcattggggattggtacaccaagagccacgttgaactaaggaacatgctagatgacggtcaggatctaggggcaccagatggcattctgattaatggaagggcaccttacagatatgacagtgcactggttccggatggccttcagtatgaaactgttggagttgagccaggcaaaacatatcgcttccgtgtccacaatgttggcatctcaactagcctcaacttcaggatccagaatcacaacatgcgtctggtagagactgaaggaacctataccaatcagcagaactacaccaacctagacatccatgtgggacagtcttactctttcttggtaaccatggatcagaatgcaagcaccgactactacattgtggcgagcccaaggtttagcaatcctagatggcatgaagtagctggtgtagccattcttcagtactcaaactccaagggcagggcttctggcagcctccctgatgctccaaatgatcactatgacaagtactactccatgaaccaggcaaggtccatcagaatgaacacaagcgctggtgctgctcgtccaaacccacagggatcattccactatggatcgatcaacatcactcagacctttgttctcaagaacgagcaacccttgagcatcaatggaaagcgtcggaggactatcaacagggtgtcatactctcctccagagacaccactgaggcttgctgacctccataacctaactggagtctacacagctgacttccctgcaatgcccagcaatgctccagcaaggatagcttcatctgtgctgaacgcatcctacaagggtttcctagagatcgttttccagaacaatgacactgatgtccagacctaccatcttgatggctactcattctttgttgttgggatgaattatggcgagtggacaccagacaggaggaatgaatacaacaagtgggatgccatctctcgttgcaccactcaggccttccccgggggctggactgcggtcctagtctcacttgacaatgttggtatctggaatctgcgtgctgaaaagctggataactggtacagagggcaggaggtctatgtgaaggttgctgatccactgggctacaacatcactgaaatggtcatcccggataatgccctgtactgtggtctactgaaggagaggcaaaagccacaggttcatgagtcaaacagcaagtcgtcggcgcaaggagatgctggatggagctacaaactcctcgcaaccatgatgctggtcgtcgcagctgtgatcttcagttga

SEQ ID NO: 2718 - protein, 587 aa, Sorghum bicolor
MAAAAMTVAVVLAAVVAAAATAEVRWEVAYLTVEPLGPAQKVIGINNQFPGPLLNVTTNQNVRVNVQNNLDEPLLITWDGIQMRMNSWQDGVMGTNCPIPPGWNWTYEFQLKDQIGSFFYFPSLGLQRAAGGFGPITVNNRATVPLPFDHPHGDITLFIGDWYTKSHVELRNMLDDGQDLGAPDGILINGRAPYRYDSALVPDGLQYETVGVEPGKTYRFRVHNVGISTSLNFRIQNHNMRLVETEGTYTNQQNYTNLDIHVGQSYSFLVTMDQNASTDYYIVASPRFSNPRWHEVAGVAILQYSNSKGRASGSLPDAPNDHYDKYYSMNQARSIRMNTSAGAARPNPQGSFHYGSINITQTFVLKNEQPLSINGKRRRTINRVSYSPPETPLRLADLHNLTGVYTADFPAMPSNAPARIASSVLNASYKGFLEIVFQNNDTDVQTYHLDGYSFFVVGMNYGEWTPDRRNEYNKWDAISRCTTQAFPGGWTAVLVSLDNVGIWNLRAEKLDNWYRGQEVYVKVADPLGYNITEMVIPDNALYCGLLKERQKPQVHESNSKSSAQGDAGWSYKLLATMMLVVAAVIFS

SEQ ID NO: 2719 - DNA, 1185 bp, Sorghum bicolor
atggcgctctccatctccacgcccacctcctcctccctcgtcccggcctcccgtcaggtggtcaggttgacttcgcggtcggcaaagcctgcgactttcagcctccggaggccgcctctcgccgcggcggccgccgctggcaacgcacccacgtccccggtcagcgaggtcgtcactgagctcgacgcggtggccggcttcagcgagatcgtgccggacaccgtcgtgttcgatgatttcgagaggttcgcacccacggcagccacggtgagctcgtcgctgctgcttggaatcgctgggctcccagacaccaagttcaagagtgcgatagatactgcgctggcagatggtgagtgtaacgcattggagaagcctgaggacaggatgtcctgttacctcaccaaggctctggcaaacgttggcgctgaactagctcatcaagtccctggacgcgtttcgactgaaatagatgctcggttggcttatgacacccagggcattatccacagggtgcatgaactgttgaatctatacaaccagcatgatgtctcaactgaccgcctgttattcaaaattcctgctacatggcaaggcatagaggcctcaaggttgcttgaatctgaaggagttcaaacacatctaacatttgtttacagtttcgcacaagcagcagcggcagcacaagctggtgcatctgttgtacagatatttgtggggcggttgcgggattgggcaaggaatcactctggtgatccagagatagatgaggctctgaagaagggagaagatgcagggcttgctttggcgaagaaagtatatgcctatattcacagaaatgggtacaaaacaaagttgatggttgctgccatacggaacaagcaggacgtatttagccttctggggattgattacatcatcgcaccactgaagatattgcagtctctggaagaatctgtcaccgatcctgatgtgaagtacggttatgtcccaaagttgacccctgctattggcaagacgtacaacttcactgaagaggagcttgtgaagtgggaccagttgagcctatcagctgcgatggggccagctgctgaagaactgcttgcttcaggactagagggatatgtgaaccaagcacgccgcgttgaggagctcttcgggaagatctggccacctcccaatgtttaa

SEQ ID NO: 2720 - protein, 394 aa, Sorghum bicolor
MALSISTPTSSSLVPASRQVVRLTSRSAKPATFSLRRPPLAAAAAAGNAPTSPVSEVVTELDAVAGFSEIVPDTVVFDDFERFAPTAATVSSSLLLGIAGLPDTKFKSAIDTALADGECNALEKPEDRMSCYLTKALANVGAELAHQVPGRVSTEIDARLAYDTQGIIHRVHELLNLYNQHDVSTDRLLFKIPATWQGIEASRLLESEGVQTHLTFVYSFAQAAAAAQAGASVVQIFVGRLRDWARNHSGDPEIDEALKKGEDAGLALAKKVYAYIHRNGYKTKLMVAAIRNKQDVFSLLGIDYIIAPLKILQSLEESVTDPDVKYGYVPKLTPAIGKTYNFTEEELVKWDQLSLSAAMGPAAEELLASGLEGYVNQARRVEELFGKIWPPPNV

SEQ ID NO: 2721 - DNA, 1953 bp, Sorghum bicolor
atggcggctgcgggcatgctgctctttttcgagctagtgtgcggttctctccggcgacgaagcaacaactcgtttgtccaccgggggctatgggtggcctacaccctccttccccttctcatcacctacaccctcggcctgatgcagtccgctcatgccaaagtgctcatgtatcccgtgtgggcgctgtccctgatgatcgccggaggcgccacctccatcaccgcccatgacctcgacgacaacaagcagtggaagcgagctctgttcgtcattctccagtatgacatgtacttctgcataatactgtttcagctggtgtaccccaaccccaaccagcagataagcgtcgcccacgcagcgacccccgtcctggacagcataaagcttctgctatggcaccccatcgccgtccccgtcttgctcctcttcaccactgtctgcattgcccatacctttggagcaatcgctggctggagggccaactactcctaccctagcaaaatggttgccgactacatgaagcgtcatgccgctgcagcggcagcggcatccagatcaagatcaccatcatcgtcgtcgtcgtcaggccgaggctacttggatcctgtcagcatgaagtacttggtcagctggccggcctacaaggtatcccgcactacagcaccaagtggccataggagctcctccactgtctccagaatgatgagatgccaagcgcaagcggtggcagaagaggacgacgaagggctcatcactgtggagaagatcggggactggtgctgcaggaacgaagacaagttcaggtcatggggcgtcagcacgtcccggatcaaaggcgcctgccttgcatattccctgtctcacctgctgatgcgccgcttcttcgggatggattgcgcggaggcaagccttccggagacgcgccacttcgtgcttcgagggctgctgtcagagagcaacactgacgagtacatcaaggcattcagggtgatcgaggtagagctagcattcctgtacgacttcttctacaccaagtacgcattgatctttgggatggaagggttcttctttctcatggtcctagtgaagatagtatgcgcatccaccattggagtacttatgctctacagaccatttgcccaaggttttccccagtgctggtacggtgacattgtcatcagccctagcctgactagtgtcaacatcacagtcgcaatcatcgcaatattccttacagtagaagcactgcagttcgtactgtacatgggatcggattgggccatggtatcactcgcctgctgccatatcaccgaaggaaggccccatggatatatcccactatcatttcgcaagctgtttgggtttcttttcagtaggcagaggctaccgttattcgggtattggcagaataaactaggccagtactctgtcatacaaggctccagattcttcagctctagcaaccaatttgctttcgaatgtagtggcctgaccacgttcatcctttccaaagccattgcttacctgggtcaatgtgtgctgcttccggggaactctgtagataccaaatttgtgttcgaccaagctatgtaccaagccagagaagcactgggaaccaagaagcgtgatagagctggattgcggaatgccgccgccactgtcatcagcaaccaagatgaaggcagtagcaatagcatcttcaccaaaggtctcaagcttggagctgagcttgcgagcatacaagatgattgcctgcgatggagagtggtggccgagttctgggtagaaaccatcctctacattgcaccgtcagagaacgccaaggcgcacatggagtgcctaccgcaaggtggggagtttctcacgcacctctgggctctcctcactcacgccggtatcctcagtcgacagtcgccaccggccggagccggagcaaacccaagaggatga

SEQ ID NO: 2722 - protein, 650 aa, Sorghum bicolor
MAAAGMLLFFELVCGSLRRRSNNSFVHRGLWVAYTLLPLLITYTLGLMQSAHAKVLMYPVWALSLMIAGGATSITAHDLDDNKQWKRALFVILQYDMYFCIILFQLVYPNPNQQISVAHAATPVLDSIKLLLWHPIAVPVLLLFTTVCIAHTFGAIAGWRANYSYPSKMVADYMKRHAAAAAAASRSRSPSSSSSSGRGYLDPVSMKYLVSWPAYKVSRTTAPSGHRSSSTVSRMMRCQAQAVAEEDDEGLITVEKIGDWCCRNEDKFRSWGVSTSRIKGACLAYSLSHLLMRRFFGMDCAEASLPETRHFVLRGLLSESNTDEYIKAFRVIEVELAFLYDFFYTKYALIFGMEGFFFLMVLVKIVCASTIGVLMLYRPFAQGFPQCWYGDIVISPSLTSVNITVAIIAIFLTVEALQFVLYMGSDWAMVSLACCHITEGRPHGYIPLSFRKLFGFLFSRQRLPLFGYWQNKLGQYSVIQGSRFFSSSNQFAFECSGLTTFILSKAIAYLGQCVLLPGNSVDTKFVFDQAMYQAREALGTKKRDRAGLRNAAATVISNQDEGSSNSIFTKGLKLGAELASIQDDCLRWRVVAEFWVETILYIAPSENAKAHMECLPQGGEFLTHLWALLTHAGILSRQSPPAGAGANPRG

SEQ ID NO: 2723 - DNA, 276 bp, Sorghum bicolor
atgggtctgcaggaggaatttgaggagtacgctgaaaaggcaaagaccttgcctgagagcacgagcaatgagaacaagctgatcctctacggactgtacaagcaagccactgttggaaatgtgaataccgaccgtcctggcatattctaccagaaggacagggccaaatgggatgcatggaaggctgttgaaggtaaaccgaaggaagaggcaatgaatgattacatcaccaaggtgaagcagctccaggaggaggctgcggctgccacttcttaa

SEQ ID NO: 2724 - protein, 91 aa, Sorghum bicolor
MGLQEEFEEYAEKAKTLPESTSNENKLILYGLYKQATVGNVNTDRPGIFYQKDRAKWDAWKAVEGKPKEEAMNDYITKVKQLQEEAAAATS

SEQ ID NO: 2725 - DNA, 1197 bp, Sorghum bicolor
atgacgactgggaaggtaacattggaggcggtgagaaaggcgcagcgcgccgagggacctgctacggtgttggccattgggacggcgacaccggcaaactgcgtgtatcaggctgactacccggactactacttccgggtcaccaagagcgaacaccttaccgacctcaaggaaaaattcaagaggatatgccacaagtcgatgattaggaagcgttacatgcatttgactgaggacatcctagaggagaaccccaacatgagctcgtactgggcaccatccctagacgcacgccaggatatcctgatacaggagatacccaagctgggcgcggaagctgcagagaaggcgctcaaagagtggggccagccacgttcccggatcacgcacctcgtcttctgcaccacctccggcgtggacatgcctggcgccgactaccagctcatcaagctactcggtctctgcccctctgtgaaccgagcgatgatgtaccaccagggttgcttcgccggcggaatggtgctccgtcttgccaaggaccttgccgagaacaaccgtggtgcccgggtgctcatcgtgtgctccgagatcaccgtggtcacgttccgggggccctcggagtctcaccttgactcgcttgtcggccaagctctcttcggtgacggcgcagctgcggtgatcgtcggcgcagaccccagcgagcctgctgagcggccattgttccatctagtatcagcgagccagaccattctcccagactcagagggtgccatcgagggccacctccgtgaggtggggctcaccttccatctccaggacagggttccacagctcatctccatgaacattgagcgcttgctggaagacgctttcgcaccgcttggcatctccgattggaactccatcttttgggtggcgcaccctggcggtccagccatactgaacatggtggaggctaaggttggccttgacaaggccagaatgtgtgccacccgccacatcctggcagagtatggcaacatgtcaagcgtttgtgtcctcttcatccttgatgagatgcgaaacaggtctgccaaggacggacacaccacaactggggagggtatggagtggggtgtcctcttcggcttcggccccggcctcaccgtcgagaccatcgttcttcacagcgttcccatcaccacagtggctgcatga

SEQ ID NO: 2726 - protein, 398 aa, Sorghum bicolor
MTTGKVTLEAVRKAQRAEGPATVLAIGTATPANCVYQADYPDYYFRVTKSEHLTDLKEKFKRICHKSMIRKRYMHLTEDILEENPNMSSYWAPSLDARQDILIQEIPKLGAEAAEKALKEWGQPRSRITHLVFCTTSGVDMPGADYQLIKLLGLCPSVNRAMMYHQGCFAGGMVLRLAKDLAENNRGARVLIVCSEITVVTFRGPSESHLDSLVGQALFGDGAAAVIVGADPSEPAERPLFHLVSASQTILPDSEGAIEGHLREVGLTFHLQDRVPQLISMNIERLLEDAFAPLGISDWNSIFWVAHPGGPAILNMVEAKVGLDKARMCATRHILAEYGNMSSVCVLFILDEMRNRSAKDGHTTTGEGMEWGVLFGFGPGLTVETIVLHSVPITTVAA

SEQ ID NO: 2727 - DNA, 1035 bp, Sorghum bicolor
atggctgcggcggaggcttcgcggcggcgacggtgggcgttgtgggcgctgctgctgctgcggctgctgcacccggccgcgctcgtgctcgccaacaccgaaggaactttggttccgcaacttggccagctcaaaaacttgcagtacctgcgtcttaacaacaacagccttactggttcaattccaaaatcattaactgctatcactgcactccaagttctttttgcgaacaaccctaatttatgtggtcctggcactacaaaaccttgtcctggtgctcctcccttttctccacctcctccatacaaccctacaacccctgcgcaatcaccaggaagtagctcttccagtactggagcaattgctggtggagtggctgctggcgcagccttgctgtttgctattcctgcaattggttttgcctattggcgacgcaggaaacctcaagagcatttcttcgatgtacctgatgaagacttcgaagctgtggtgggggattttggtttggccaaactaatggattacaaggatacccatgtaactactgctgttcgtggaacgattgggcacattgcacctgaatacctttcaacaggaaaatcctctgagaaaactgatgtatttggctatggaattacgcttttagagcttattacaggacaacgtgcctttgatctagctcgccttgctaatgatgatgatgtcatgcttcttgactgggtcaaaggattgctcaaggagaagaaactggagagtctggtcgatttagatctagagcacacctacatcgatgttgaggtggaatctctaatccaggtcgcgctcctctgcactcagagcaacccctcggagcgtcctaagatgtcagaggttgtgaggatgctcgaaggcgatggtctcgccgagaggtgggaggagtggcagaaggtagaagtagtacggcaagaggtcgagctaggccctcatcgaacttcagaatggattctcgactcgaccgacaacctccacgctgaacagctgtcagggccgaggtga

SEQ ID NO: 2728 - protein, 344 aa, Sorghum bicolor
MAAAEASRRRRWALWALLLLRLLHPAALVLANTEGTLVPQLGQLKNLQYLRLNNNSLTGSIPKSLTAITALQVLFANNPNLCGPGTTKPCPGAPPFSPPPPYNPTTPAQSPGSSSSSTGAIAGGVAAGAALLFAIPAIGFAYWRRRKPQEHFFDVPDEDFEAVVGDFGLAKLMDYKDTHVTTAVRGTIGHIAPEYLSTGKSSEKTDVFGYGITLLELITGQRAFDLARLANDDDVMLLDWVKGLLKEKKLESLVDLDLEHTYIDVEVESLIQVALLCTQSNPSERPKMSEVVRMLEGDGLAERWEEWQKVEVVRQEVELGPHRTSEWILDSTDNLHAEQLSGPR

SEQ ID NO: 2729 - DNA, 1809 bp, Sorghum bicolor
atggagtcggcggcgattgggtcgcagtccccgctctccttcccctccagcctctgcaaagcaaaagtgtcctctggtttaccaatatacaatgtgaagatcaagagcaatcacaggcttgaggtggtttgccgtgggatgttagctacaagaaagtttatgcaaaggaaaaagaaagaagaagttttcaaggatgctgctgatgaggccgagcagatgaattggaggagaatgatgagagagatagaggaggcaggatcagctgtacccattctgaagactcagcggagcgggaaagggccacttccaagagatgttatccttgggactctcgtgcggttcaaacaactgaaaaaatggaatattgtcagtgagattcttgaatggctcagaacacagcattggtgggacttcagtgagatggacttcttgatgcttgtgacagcttatggaaagttgggggattttagcagggcagaaagggtcctaaagtacatgaacaagaaaggttaccagcctagcgtcatatcacaaactggtctgatggaggcatatggaagagggaagcagtaccgtaaggctgaagcagtattccgtaggatgcaaacatcaggccctgaaccatcacctgtgacatatcaaatcatcttgaaatctttagttgagggtgacaaatataaggaagctgaagctatatttgaggacctccttaatgaaaaaagaacttcttttaagccagaccagaagatgtttcatatgatgatttatatgtacaagaaagctggtgactatgcccaggcacggaagctatttgcacagatgtcggagagaaaaattccactatctacagtcacttttaatagtttgatgtcatttgagacagactacaaggaagtttcaagtatttatgatcagatgcaaagagctggaatgaaaccagatgttgtgagctattccctgctcatcaaagcttatgggaaagccagaagggaagaagaagcattggcggtttttgaagagatgcttgatgctggagtcaggccgacacgcaaatcatataacattttgcttgatgcatttgcaatatctggattggtagacgaggctaatacagttttcaaggcaatgagaagacacagggttgagcctgatctttgctcttatacaactatggtcttagcttatgtaaatgcatctgacatgaatggagcagagaaattctttcgtaggattaaagatgatggtctgaagcccaatgttgtggtttatggtactctgatgaaaggctattcaaagttaaataatgttgagaaagttatgcgggtgtatgagagaatgcggatccagggtgttgaacccaaccagactatatatactactatcatggatgcacatggcaggaactcagattttggaaatgctgtcatttggttcaaagaaatggaagctcgtggatacccaccagaccagaaagcaaaaaatatcctactttcacttgccaacacaccagaagaacaacaagaagcgaatgaattggtaggtaatggtgcaattcagctggaagtgaaacctgataatgaagaggtggatgatgatgggcatgaagttatacatactgatgctggaagtcaccgtttgcttgacgacacacaaacaagaaaccacgtaaatggtaggatcagagctggtaattatacttttgatgaggatgataacgatgatgacgacgatgattatgaggaagaggatgatgaagagttcaattttgtttctttcaaagataagagagaactaaattttgcaagttga

SEQ ID NO: 2730 - protein, 602 aa, Sorghum bicolor
MESAAIGSQSPLSFPSSLCKAKVSSGLPIYNVKIKSNHRLEVVCRGMLATRKFMQRKKKEEVFKDAADEAEQMNWRRMMREIEEAGSAVPILKTQRSGKGPLPRDVILGTLVRFKQLKKWNIVSEILEWLRTQHWWDFSEMDFLMLVTAYGKLGDFSRAERVLKYMNKKGYQPSVISQTGLMEAYGRGKQYRKAEAVFRRMQTSGPEPSPVTYQIILKSLVEGDKYKEAEAIFEDLLNEKRTSFKPDQKMFHMMIYMYKKAGDYAQARKLFAQMSERKIPLSTVTFNSLMSFETDYKEVSSIYDQMQRAGMKPDVVSYSLLIKAYGKARREEEALAVFEEMLDAGVRPTRKSYNILLDAFAISGLVDEANTVFKAMRRHRVEPDLCSYTTMVLAYVNASDMNGAEKFFRRIKDDGLKPNVVVYGTLMKGYSKLNNVEKVMRVYERMRIQGVEPNQTIYTTIMDAHGRNSDFGNAVIWFKEMEARGYPPDQKAKNILLSLANTPEEQQEANELVGNGAIQLEVKPDNEEVDDDGHEVIHTDAGSHRLLDDTQTRNHVNGRIRAGNYTFDEDDNDDDDDDYEEEDDEEFNFVSFKDKRELNFAS

SEQ ID NO: 2731 - DNA, 1467 bp, Sorghum bicolor
atgacctccgccgtcctcgccggccggaatgaggtccaccacgcgcacccgcaccaccaccgccactggggcggcgcccgcgtccccctcatgcccaagccgtcctccaaccctaaccctaggcgccaccaccgcccgggcccaaaccctatccccacaggctcgccgccgccgcgggccgtcccggcggtcgcggccgagcccctgccgtcgtcatcggggcacgtgaagttcaggccgtcggaaatgacccccgccgaggccagccttctccgcgcgcggctcaccggcgagctcggccgcgtccgcgctttcctctcccgcatcgactcgtggcaggacgggcagcgccggcgccggcgcccggagcccgagcacgagcacgcgccggagccccccgtcgggcgccgctcgtccccgccgccggcgctggtggaggcgatgcggaagcggtgcgcggacatcctgatgcggctgcggagatcgaagaagagcgtgtggttcaactcccccgtcgacgtggagggcctcaagctgcacgactaccgcgccatcatacggagccccatggatctcggcaccgtcaagcagaacctcaccgccggccggtacccttcccacgaggcgttcgctggcgacgtccggctcaccttcaacaacgcgctgcggtacaacccgcccgaccaccacgtgcacaggtacgccggcaacctcctcgcctcgttcgaggggatgtacaaggaggccgtctcgtggttcgagcagcagcgccagcaactcgagccaccaatgcagcttgatctgccgccaccgccaccaccacagatgccagtttctgtgccagtgcaagcgccccagaggatggggggtgggaggaggcccaagcccaaggcgagggagccaaacaagagggagatggatgaggaggagaagcagaagctgagggtggagattgagaacctgcctgaggagaagatgctgaatgtgctgcagattgtgcagaagaggaacagtgatccagcattgacgggggaggaggtggagcttgattttgatgagctggatatcgagaccctgtgggagcttgatcgatttgtggtcaattggaggaaggcgctaaagaagagccagcggaattctatgatgaatggtgatgctgctgccatgaatggagacgccattgatgtgacaattgttccggatgatgatgacatggtcgaggttgctgtcaatccgtctgtggtggttgaaattggagagtcggagactgacattccaaagaagagggaaatggaagcggaggacgagtatgttgatataggtgacgagatgccaacggtgaattaccagtcggtggagattgagccagattccccggcagctagcagctcaagcggatcaggaagtggctcatcttcatccagtggtacggtggagcaaatgagtatttgtcaccacaaatgctga

SEQ ID NO: 2732 - protein, 488 aa, Sorghum bicolor
MTSAVLAGRNEVHHAHPHHHRHWGGARVPLMPKPSSNPNPRRHHRPGPNPIPTGSPPPRAVPAVAAEPLPSSSGHVKFRPSEMTPAEASLLRARLTGELGRVRAFLSRIDSWQDGQRRRRRPEPEHEHAPEPPVGRRSSPPPALVEAMRKRCADILMRLRRSKKSVWFNSPVDVEGLKLHDYRAIIRSPMDLGTVKQNLTAGRYPSHEAFAGDVRLTFNNALRYNPPDHHVHRYAGNLLASFEGMYKEAVSWFEQQRQQLEPPMQLDLPPPPPPQMPVSVPVQAPQRMGGGRRPKPKAREPNKREMDEEEKQKLRVEIENLPEEKMLNVLQIVQKRNSDPALTGEEVELDFDELDIETLWELDRFVVNWRKALKKSQRNSMMNGDAAAMNGDAIDVTIVPDDDDMVEVAVNPSVVVEIGESETDIPKKREMEAEDEYVDIGDEMPTVNYQSVEIEPDSPAASSSSGSGSGSSSSSGTVEQMSICHHKC

SEQ ID NO: 2733 - DNA, 399 bp, Sorghum bicolor
atggcggcctccatgatctcgtcgtcagctctggtggcgccgccgtccagggcgcagggcctgccgtccctcggccgccgcgcctcctccttcgccgtcgtctgcggcaccggcaagaagatcaagaccgacaagcccttcgggattggaggtggcctgaccgtcgataaggatgcctccgggaggaaggtcaagggcaagggcgtgtaccagttcgtcgacaagtacggcgctaacgtcgacggatacagcccaatctacaacgagaatgagtggtctcccagcggcaacgtctacgtcggtggaacgactgggcttctgatctgggccatcaccctcgctgggctcctcggcggcggcgccctcctcgtctacaacaccagcgccctctccggctaa

SEQ ID NO: 2734 - protein, 132 aa, Sorghum bicolor
MAASMISSSALVAPPSRAQGLPSLGRRASSFAVVCGTGKKIKTDKPFGIGGGLTVDKDASGRKVKGKGVYQFVDKYGANVDGYSPIYNENEWSPSGNVYVGGTTGLLIWAITLAGLLGGGALLVYNTSALSG

SEQ ID NO: 2735 - DNA, 171 bp, Sorghum bicolor
gctgggctctccggcgtggggaggcgcgcacgggactacgtgtgcgggctgctgcacaagatccggaggatggagaagaaggcccatgacagtgcggcacaggcccagaagaagcccacgcctgttccgcttagctggatcttcgataggcccgtcagtgttgtgattccg

SEQ ID NO: 2736 - protein, 57 aa, Sorghum bicolor
AGLSGVGRRARDYVCGLLHKIRRMEKKAHDSAAQAQKKPTPVPLSWIFDRPVSVVIP

SEQ ID NO: 2737 - DNA, 1113 bp, Sorghum bicolor
atggcgccgcagtctcggttgctgccgccggcgttgcagatgcttcgccgctgccggtgccgtgcctcgcgctcccacttctctaccgcgcccactctcgtctcgccaccatccaaggccgtggtctacgacgagcacggcccacctgagcaggtgctgaggacggtggacgtgccaccggtggaggtcggcgaccgcgacgtctgcgtcaggatgctggctgcccccatcaacccctcggacatcaaccgcgtcgagggcgtctaccccgtcaggcccccgctccccgccgccatcggaggctacgagggcgtcggccaggtccacgccgtcggccccgccgtcaccgccccgctctcccccggcgactgggtcataccgtccccgccatcgttcgggacctggcagacgtacattgtcaaggatgagaacgtctggcacaaggtccgcagcgatgtacccatggagtatgctgccaccatcaccgtcaacccctcgaccgcgtttaggatgctccaagactttgtaaaactcaatcctggtgattccattgtccagaatggtgctaccagcatcgttggccagtgtgttattcagcttgctaaagtacatggaatccacactatcaacattataagggacaggcctgggtcagaggaagcaaaaaacaaactcaaacaacttggtgcagatgaggtgttcacagaatctcagctagacatgaagaatgtcaagagcttgctgggtgccatgccggagcctgcattaggatttaactgtgttggaggaaatgctgcttctctaatactcaagcttttgaagcaaggaggcaccatggtgacttatggtggaatgtccaagagacctgtcactgtccctacttcatatttcatttttaaggatctttcgctacgagggttctggctccagaagtggctgaactcagataaaacagaagactgcagaagaatgatagactacctcttgggccttgtgcatgaaggcaaactcaaatacgagatggagtcgatttctttcggtgagttcagcttggctctggagaaggccctgggcaaacatggaagccatccaaagcaagttatcaggttctga

SEQ ID NO: 2738 - protein, 370 aa, Sorghum bicolor
MAPQSRLLPPALQMLRRCRCRASRSHFSTAPTLVSPPSKAVVYDEHGPPEQVLRTVDVPPVEVGDRDVCVRMLAAPINPSDINRVEGVYPVRPPLPAAIGGYEGVGQVHAVGPAVTAPLSPGDWVIPSPPSFGTWQTYIVKDENVWHKVRSDVPMEYAATITVNPSTAFRMLQDFVKLNPGDSIVQNGATSIVGQCVIQLAKVHGIHTINIIRDRPGSEEAKNKLKQLGADEVFTESQLDMKNVKSLLGAMPEPALGFNCVGGNAASLILKLLKQGGTMVTYGGMSKRPVTVPTSYFIFKDLSLRGFWLQKWLNSDKTEDCRRMIDYLLGLVHEGKLKYEMESISFGEFSLALEKALGKHGSHPKQVIRF

SEQ ID NO: 2739 - DNA, 2289 bp, Sorghum bicolor
atgtggaggctcaagattgccaagggtggaccgtggctcaagagtggcaacagtcacattggaagagaaacatgggagtttgatcaagattttggatcaaaagaagagagggaagctgttgactctgcacgggaagaattcaagaagaacaggttccaaatgagacacagctccgatattttggcccgcatgcagttagcaaaggagaacggtttcagtcttgatctacagaagacaaaagatgaatctcctttagttataaactccagcacagtgtcggagatactgagaaaggcacttaattacttctcagccatacaagcacacgatgggcactggccaggagattttccaggtccattgtttaccacagcaaccatgattatagttctatacgtcacagagtcattaagtagtacactatcgtcagaacactgcaaggagatttgtcgttacctgtacaaccgtcagaacatggacggaggatgggggctacatgcagaaggtgaaagctccatgcttagcacagctctcaactatactactctaaggctacttggtgagaatatagatgatggaccagatatgtctatgcttaaagcaagaaaatggatacatgatcatggtggtgcaacaatgataccaatcttggggaaagtgtggctctcggtgcttggagtttttgaatggtcaggtgtaaatcccatccccccagaattgtttcttcttccatcatgggttcctattcaaccaggacgattgtggagtcacttcagaatggcattcattcccatgtgctatttatatggcaagaaatttgtcggccccattacgagattggttatgtcactaagggaagagctacatattcatccctataaaaagattgactggaagcaagctcgtaaattatgtgcaaaggaagatgtgtataatccacatacatggctacaggagtgtctatctgactgcctttacagttttggtgaaccttttctcacacgttggccaatttcctacatgagaaagaaagccctaaaacaagtggctgaattcttgaaatacgaagatgagaattctcaatacatctgcattggtgccgcacagaaggcattgtccatgttgtgctgttggatcgaaaaatccaactcagatgcattcaagcgccatttggctagagttgctgatttcctatggattggtgaagatggcatgaaagtgcgggtctgtgctggtcaactatgggatgttgcttttgcagtccaagcaatattagcatgtaatattgcagaagaatatagaagcaccctcaagaaagcgcatgatttcataaaagcctcccagatcatggacaatccttctggtgacttcagcagaaagtaccgtcacatatctaaaggagggtggggcttccaggttgcagatcaggggtggcaggtttcagattgcacagcagaagctcttaaggttttgttaatgctgtccaaattttcatcagacattggtagtgatcagatggaaacatgccgcttatataatgcagtgaatgtattattatccttacagaacccaaacggtggctatggaacttgggagctagctcgcacatatccatggatggagattttcaacatgacagaaatatatgcagacatcatggtggagcatcagtacgtcgagtgtacctcatcagtcatgcaagcattagcattgtttcaggagaagtacccttggcatcgaaaagatgagatagatcaatgcattaggggagctactgaattcattgagaagttacagaatgatgatggctcatggtttggatcttggggtatttgtttcacatatggcacatggtttgctattgagggtctatcagctgttggacagagttatggtaacagcacttgtatccggaaggcctgtaagtttctcttaacaaagcagctaaacaatggtggatggggtgagagttatctttcatcaagaaccaaggcatacacaaatctggataggcagaagtcacacatagtgaacactgcatgggcaatgttggcgctcatgaaagctggacaggtggaaagagatcctactccactgcacaaagctgcaagacttatcatgagtatgcagctcggcaatggtgacttcccacaggaggaaatgattggaagtttcttgaaaaatggtcccttgtgctacatggcttatcgtaacatatttcctatatgggcgcttggagagtatcagaaattagtcctccagtgtgacctccaacggccaaccttctag

SEQ ID NO: 2740 - protein, 762 aa, Sorghum bicolor
MWRLKIAKGGPWLKSGNSHIGRETWEFDQDFGSKEEREAVDSAREEFKKNRFQMRHSSDILARMQLAKENGFSLDLQKTKDESPLVINSSTVSEILRKALNYFSAIQAHDGHWPGDFPGPLFTTATMIIVLYVTESLSSTLSSEHCKEICRYLYNRQNMDGGWGLHAEGESSMLSTALNYTTLRLLGENIDDGPDMSMLKARKWIHDHGGATMIPILGKVWLSVLGVFEWSGVNPIPPELFLLPSWVPIQPGRLWSHFRMAFIPMCYLYGKKFVGPITRLVMSLREELHIHPYKKIDWKQARKLCAKEDVYNPHTWLQECLSDCLYSFGEPFLTRWPISYMRKKALKQVAEFLKYEDENSQYICIGAAQKALSMLCCWIEKSNSDAFKRHLARVADFLWIGEDGMKVRVCAGQLWDVAFAVQAILACNIAEEYRSTLKKAHDFIKASQIMDNPSGDFSRKYRHISKGGWGFQVADQGWQVSDCTAEALKVLLMLSKFSSDIGSDQMETCRLYNAVNVLLSLQNPNGGYGTWELARTYPWMEIFNMTEIYADIMVEHQYVECTSSVMQALALFQEKYPWHRKDEIDQCIRGATEFIEKLQNDDGSWFGSWGICFTYGTWFAIEGLSAVGQSYGNSTCIRKACKFLLTKQLNNGGWGESYLSSRTKAYTNLDRQKSHIVNTAWAMLALMKAGQVERDPTPLHKAARLIMSMQLGNGDFPQEEMIGSFLKNGPLCYMAYRNIFPIWALGEYQKLVLQCDLQRPTF

SEQ ID NO: 2741 - DNA, 675 bp, Sorghum bicolor
atggaggccgccaccgtgcccagatccgccgcgggctgccgcgcggcgcccctgctcccggccgcccgggccgccgcgcgccacctggccctgccccggcgcgcgttctgcgcgtccgtcgcggcggcaccggcgccgcgcagcctcctcgccgctcgccgcgctgcggatggcgacagtgtggagacggcgccggaggcggtccccatcgagaaaaggttccctcccttcccgagcgtcatggacatcaaccagatccgcgagatcctcccccacaggttcccattccttttggttgatagagtaattgaatacaaggctggagaatatgcggtggggatcaagaatgttaccataaatgataacttcttcccaggacattttcctgaacgccccataatgcctggtgtcctcatggtcgaggctatggcccaggttgggggtctggtgatgctgcaacctgaagttggtggatctcgagacaacttcttttttgccgggattgacaaagttaggttcaggaagccagtgattgctggggatacattgatcatgaggatgacactgacaaagtatcagaagaggtttggactcgcaaagatggaaggaaaagcttatgttggtggtgacctagtttgtgaaggggagttcctgctggtcagcgcaactgagtag

SEQ ID NO: 2742 - protein, 224 aa, Sorghum bicolor
MEAATVPRSAAGCRAAPLLPAARAAARHLALPRRAFCASVAAAPAPRSLLAARRAADGDSVETAPEAVPIEKRFPPFPSVMDINQIREILPHRFPFLLVDRVIEYKAGEYAVGIKNVTINDNFFPGHFPERPIMPGVLMVEAMAQVGGLVMLQPEVGGSRDNFFFAGIDKVRFRKPVIAGDTLIMRMTLTKYQKRFGLAKMEGKAYVGGDLVCEGEFLLVSATE

SEQ ID NO: 2743 - DNA, 177 bp, Sorghum bicolor
aaagtcaatatcatttattccatcaaacaactaccccgaagatattgtaatgtaattctctattacaacagtaacagggctggattcacagccctggcaggcgatgaaagtcaccacatggactcaacgacatgcttaacaacaggtaaaggattgcctcaactgccggttgtataa

SEQ ID NO: 2744 - protein, 58 aa, Sorghum bicolor
KVNIIYSIKQLPRRYCNVILYYNSNRAGFTALAGDESHHMDSTTCLTTGKGLPQLPVV

SEQ ID NO: 2745 - DNA, 1530 bp, Sorghum bicolor
atgagatcagtcgttcggtcgcttcgacagcgtcatcgtttcacccagcatcatgcagagaggcagtcaccagccaccagattgatcaggcagcagaatgctttaatcatgtgcagttcgacaactcgttcactgagcatgttatgccgtaatagtgaaactagcagatttgcaagccctgccgtggagttgatgaagtccatgttctccactatagcggctgattcgatcaaagatattagaggaggtggtccgatggtggaatatgataggagaatagcatcaggagagctagtagatggtgatagctttcaggttgatacaattcaacaattacaaaggctctataaggagttgattgagaatgaagaagattgcaagctggacagatataagtcatctgagaaatcaggacggagtcgatggctatggtcccgcctcattactcagccttctacctatgctccagttaaggggctttacctctatggtggtgtcggtacagggaaaacgatgcttatggacctgttctatgaacagctgccatctaactggagaaaaaaacgtattcactttcatgatttcatgttgaacgtacatagtcatcttcagatgcataaaggtgtttcagatccccttgatgttgtagcagctgagatttcagatgaggccatcatattatgtcttgatgagtttatggtaactgatgttgctgatgctatgattctgaaccggctgtttagacaattgttcagcaaaggcgttattcttgtttcgacttctaaccgcgctccagataagctttatgaaggtggcttacagcgggaccttttcttgccattcattgataccttgaaagaaaggtgcatcgcgcaccccattggatctgcagtggactatcgccaaatgggttctgctgagcaaggtttctatttcgtcggaaaacattacaatacacttctgaaacagaggctccagtctttaattggagatgacgaacccagcccacaaactgttgaagtaattatgggaaggaaattaccggttccccttggagcaaatggttgtgcgtattttccttttgaagacctttgtgataaacctttaggcgcagcagattattttggactttttaaaaaatttcacaccctggcacttgatggtgttccaaagtttgggtctagtaacagaacatcagcttatcggttcgtcacactgattgatgttatgtacgagaacaaagcaaggttgttatgtacagctgaggctggaccaatagatctgtttgagaatatcgtgactgttgctgaagcacagaaggtttcaccaagatcttcgcgctcacagaaaagtgacaatcctgacctgtgtgtggacaatgagctaggatttgccaaggatcgtacgattagcaggttgacagagatcaacagtagagaatatttggaggacttcgaaatgagattgcggcaacagcagcagctgtccttgcaaggtctggataatggtggccatgttgttctagcataa

SEQ ID NO: 2746 - protein, 509 aa, Sorghum bicolor
MRSVVRSLRQRHRFTQHHAERQSPATRLIRQQNALIMCSSTTRSLSMLCRNSETSRFASPAVELMKSMFSTIAADSIKDIRGGGPMVEYDRRIASGELVDGDSFQVDTIQQLQRLYKELIENEEDCKLDRYKSSEKSGRSRWLWSRLITQPSTYAPVKGLYLYGGVGTGKTMLMDLFYEQLPSNWRKKRIHFHDFMLNVHSHLQMHKGVSDPLDVVAAEISDEAIILCLDEFMVTDVADAMILNRLFRQLFSKGVILVSTSNRAPDKLYEGGLQRDLFLPFIDTLKERCIAHPIGSAVDYRQMGSAEQGFYFVGKHYNTLLKQRLQSLIGDDEPSPQTVEVIMGRKLPVPLGANGCAYFPFEDLCDKPLGAADYFGLFKKFHTLALDGVPKFGSSNRTSAYRFVTLIDVMYENKARLLCTAEAGPIDLFENIVTVAEAQKVSPRSSRSQKSDNPDLCVDNELGFAKDRTISRLTEINSREYLEDFEMRLRQQQQLSLQGLDNGGHVVLA

SEQ ID NO: 2747 - DNA, 849 bp, Sorghum bicolor
atgtggaaattcagcaggaccagcagaaatggcgccaacttattgcttgaacccttactgcacgggatgtgtactgacctacatgtaacatacgagagaaactttccctgtgttagtgaccctgatgctgagtctgcctcttgtgaacccatgatgattggttatggtggtagtcaggatgctcctgctaaaatacagctcaccccaacgtctcagggaaataaagatacactgcctgaagatgatttgaccctaaaatctccaagaaattcagatgcacagcgtgaacctcaacacacccccaagtcaccaggagttcctgagttccctctgttctccacagtagatatgccatgtccaataagggaagatgattctcctttcaaaacagtccgtcaaactccacagtctgggtttggaggaactggtgtccctgaagtaccttctgtcggaatacctggacaaagtactcctgactctgatcgtatggtgtccttgtttccagtcagtgatgattatgatgatcagccagagattccagggctcataagtactcccggtgggatatctagtgcaggtactggaaccaacggattaggaagcatgtctgctaggacaagggctgttgcactgttcttcagagaccgtgtgccatcaaccccgcctgaagagcaacctggcaaattcagtttgagtagaatcttggaaaggaaaataagaaagcaagcttcatggatgttctttgagacaatggttctgacgagttgtggctacatcgatgtccaacaaggagaaccgtatggtgatattgaaatctcaattagacccttgctcgcagcagctaaataa

SEQ ID NO: 2748 - protein, 282 aa, Sorghum bicolor
MWKFSRTSRNGANLLLEPLLHGMCTDLHVTYERNFPCVSDPDAESASCEPMMIGYGGSQDAPAKIQLTPTSQGNKDTLPEDDLTLKSPRNSDAQREPQHTPKSPGVPEFPLFSTVDMPCPIREDDSPFKTVRQTPQSGFGGTGVPEVPSVGIPGQSTPDSDRMVSLFPVSDDYDDQPEIPGLISTPGGISSAGTGTNGLGSMSARTRAVALFFRDRVPSTPPEEQPGKFSLSRILERKIRKQASWMFFETMVLTSCGYIDVQQGEPYGDIEISIRPLLAAAK

SEQ ID NO: 2749 - DNA, 2064 bp, Sorghum bicolor
atgttctactcgcacacgatcctcgcgcggaagagcccgctgggcaccgtgtggatcgccgcgcacctcgagcgcaagatcaagaagccgcagattgacggcatcgacatccccacctacgcagaaagtataatgttccctgaagttccaattgctctaagattatcagggcatcttcttctaggtctagttcgcatttattcatggaaggtgcaatacctgtttcaagattgcaatcgaatgctaacttcaataagaactgcattcgcttctgtccaagtcgatcttccaattgatgcagaccgtgctccatttgagtccattacactaccaccaacactaaatcttgacgacttaaacttggacgatgcaatttctctgatggatacaccagataatcatcagaagactcgtgatcagattaccttggctgaaggagaatatgtgatgatagaacttgatgaggatgccagagtagagcaatcaggtcctgatccatcattgcacatggggcctacagcaattttggatgagacgtcccctccatttcatgatggttttggagctaatatcaatcctaatgaaggagctcccgtagatcctcccataggcaattcaccagtaaattccaacatagcaaatcagacagatggagcactagatccacccgaaaaaatgcgtgaagctccacatgagtctcctcacctgaagttaacagagtcaatccttcgaaatgatgaccccatggatttggaccctgattcttcaccttttgtgcaaaacaaggctatcacccctccagttatggacgaaacaacttctgctggtcgacaagtacatgggagatccatttccaatttacagacaccaagcacatttgatgcttttgtagatgatgggcctctaaattttgacattccactacctgaatttgggcttcagccatctccacctccagtacaagaaaatgaggataatagaaggccaaaagcacaagttaacactagaaagaggaagagagggatgaaatttgattacaaaattgtgctctccaatgactgtatgagcaagcaaattcatggtgctgaactagatgagttgatctgcaagaggagaaaactaccccaaacaagccttgatacgtggagattcagcaggactaacaggaagggcagcttcttgcttgaacctctgctgcacgggatgtgcagtaatcttcaagaaacctatgagagaaacttcccgtgtatcaatggccttgatgctgagcgtaccaatgtggctggtgtagcaaatgattgtcaggatgcaccacctgaacggcagctaagcccaaatgttcctcgaactgcggaactgccttaccatgagcccgccccagtgtctccgggcaatgcagcggcacagcctgaacctttgccaactctgaagtcatcaggagctgcaggtgcagcaccagatgatgatatgttgcctgagttgccccgattctcaccaatagatgtgccatctccaataagagaaaatgacactccttacaaaactcccggtggaactccaccatcttggcttggtggaactgctgtttctgaaataccatcaacggatgagaggcttggaggaactgcagtttctgaaataccatcaactgatgggaagtattcattacctggacaaagtacccgtgactctgaaaatctgtccttcctctttccaatcaatgaagatgatgatcaaccagagatccctggtctcatgagtacacctggaggggtatctagtgcaggtaccagaaccaccggattagcaagcatgtctactaggacaagggctgttgcactgttcttcaaggatcatgtgccttcaccctcatcagatgagcagcctggaaaattcagtttgaacaaaattttggaagggaaaacaagaaaacaagctgcaaggatgttctttgagacaacggttctgaagagttacgactacattgatgtccaacaagcggaagagccatttggagatattgaaatttcagttaaaccctcactctccgctgccaaactttga

SEQ ID NO: 2750 - protein, 687 aa, Sorghum bicolor
MFYSHTILARKSPLGTVWIAAHLERKIKKPQIDGIDIPTYAESIMFPEVPIALRLSGHLLLGLVRIYSWKVQYLFQDCNRMLTSIRTAFASVQVDLPIDADRAPFESITLPPTLNLDDLNLDDAISLMDTPDNHQKTRDQITLAEGEYVMIELDEDARVEQSGPDPSLHMGPTAILDETSPPFHDGFGANINPNEGAPVDPPIGNSPVNSNIANQTDGALDPPEKMREAPHESPHLKLTESILRNDDPMDLDPDSSPFVQNKAITPPVMDETTSAGRQVHGRSISNLQTPSTFDAFVDDGPLNFDIPLPEFGLQPSPPPVQENEDNRRPKAQVNTRKRKRGMKFDYKIVLSNDCMSKQIHGAELDELICKRRKLPQTSLDTWRFSRTNRKGSFLLEPLLHGMCSNLQETYERNFPCINGLDAERTNVAGVANDCQDAPPERQLSPNVPRTAELPYHEPAPVSPGNAAAQPEPLPTLKSSGAAGAAPDDDMLPELPRFSPIDVPSPIRENDTPYKTPGGTPPSWLGGTAVSEIPSTDERLGGTAVSEIPSTDGKYSLPGQSTRDSENLSFLFPINEDDDQPEIPGLMSTPGGVSSAGTRTTGLASMSTRTRAVALFFKDHVPSPSSDEQPGKFSLNKILEGKTRKQAARMFFETTVLKSYDYIDVQQAEEPFGDIEISVKPSLSAAKL

SEQ ID NO: 2751 - DNA, 14487 bp, Sorghum bicolor
atggagttcccccctgatgcctctgatgccatgttgttatcctcggtagcaagatgtgctgatagtcttccagccttgttcagactgaagttcaagttctctaatcatgacaaagtcttttctgtagatggtgttggcactatcttgctgcagatactggaagaatttctacaggtaatgcaaaacattagtgtttgcaacagtaatatctgttgtacagttaaagtatgcattctttcatccatgctggaaatcttcaatcctaatatatggagatatgaaaaatgtggtacttgcttggtgcctcctttagcttactctcctcatgttgttcaatttgtgctgaaactttttaaagacgccaaacgatggacaagtcgtgttgacaaggacaaaccagacaaagatgtcatggattattcatgcaacaaagatacaagtgacctgtcttgtcatatccgttcggaggaggtaccattgcttaagaaatatacatgtgaggagtatctatggcttattttcccttcaggacatcaatggttgagtggtttagtacatctcacttttttcctccatgaagaaggactgaaatcattcacaagtgagaagcaacatctgagttgcccaaaacaagctgttgtgtcagaattggagtctgtggcaagtcatgaggaagatgcactttttgggaatctatttgctgaagtacgtcctgcaggattaaatgaaagtcttgaacagtcaacatctcttgggagcagtccatcaaacagccagcaggggtttattcagttagctgctgatctgatgtgctttatggaaacatccatcttgtctccagagtggtccagtgctatatatatggatgcttgcagaaaattcagtacctgtcatctagatcaacttctttcaatacttaagtgccaagcttgcttccctgatgaaagcagcactggaaatatgatgtcttcttctgaaaataaattaccacacattaatgcagcttgttttgaacttctacaaacgtttcttgtttgtgatgaatgtcctgcttctttaagggaatatcttgtggaaaaagtgtttaatgttgaaagtgggaagtatacctataaccactatacacttgctctcgttgtgcatgctatgagttacacatcaaactcaggttttagtctgggaagaaagatttttgttcagtatgttacttatcttttggagaaggcaaatgatacatcatccagctcattaaatattagtgatttctgtgcaagtctcccgtgtccttttcatctggaaattgttttggcagcattccatttaaccacagagtcagaaaaggctgatttggtcaaaattgtactctcttccctagaaaaaatgaaacagcctgtgtctggtgtaactgtggctgggctgacaagatgggcattgctcctatcaaggcttctgcttgtcctgcgtcatatgttgctgtaccccttcacacacccatcatggttatttacaaggttaagatccagattgtgggatatccagttgaaggaaggccagtcacgttccacgaataactgcttaccatcccttgccactgttattgttgaggaattgtttggtggttcagtcaaaaagagttctgtagctagtaacttgctccctcagttaattgatgttactccagttcatgccgagttctattttgataaagctgctgttgaaactttgggcttgaacttggcttatttgggtgcaactatgtcacaaatccttggttcttggagtggtaggagccctgaagttgctgatgatctcattgtggaaagatatatatttttgatttgctggagtactctctctggtatatgctgtcaaggcaacgattctgttccgaataattattacctggagcctgaccttgccgatgtcaatgccttcctaacatttgctcttagtatcagcagtggtgcttcatctcatgttggtgttgatctacctgcgttaatatttcaactcctaaagttattgcactctgatattcttggttcaagtacactggagaattgggatttccccaggaaaggagcatggatttcctttattctctctcacattaattctgttcttcggatgcagcagacaggtggagaatctgaggtggattcacacagaatacatgaggttcatggtgaggacctatttacttgtgggaagaatttgtcaatctacataactgagaacagtggacactgtttggatatcctatcttctcttctggagatctatcttcgtacttttaagaaagcttatctgtcatttcttgaaaggtcttccttggatacttgttatccttccctgctgctcaagcattctgtctttgacaaatccaagcaccatcttctttttgagaaatctggttcatatttggaaatgctggaatccatatgtaaggtttcatcaaggatagatagagtcaccacaaagctaggtgaagggcagagaaaatattatttccagaagtgcttgttacatggatttccattggattacatttctagcaacagtgctctcctttcttgcattttggtgataaatgagatcatgcaaacctttactggatgtataaaggttgcacaaccaggggacagagaccaagttgatgagggtgctatttccaaattgcttggtatggtgatggaagttagatcagatcatatatttggacctgttcatggagactgtgataatatatttatgagtctaattaacaacaggaatgatcttgcgagatacagtgaattgtttgtcctgaagcagctagaaggtttcctggctgacataaacttgaatggtagcatggatagcggggtgaaagagattttggtttctacagttgttgatgtagtggaggaccttcaatctaaatcagaggtgtttaaatttttccttggtgatgcagaaggagctcctgaaggagcaagccgtatttttgcatctgggcgtgctgatatgtcagtctttattgatgttttggattgcaaatctgagcaggttaatttgaagattatccacttattgactgatatattaagcaatggtttttgtcctggtcttaaagagaagttgcaaaacaaatttattggaatggatgtgccctgcttttcatcgtggttagaatgtataatattggggccctctgtaaaagctgaaagcacaattgttacagttaatcctgcaattagagaactgacagtggatttctttaagcatctcattggtcctccatatgaaacattgaacaaagaatttcagcatcaccttttcaactctttgctaccattacttgatcaagcatttttgtcacatgacctccagattgctagagcatatttccattttcttgttcaactatcaagtgaggaatcacacttcaagcacttgtttgaaaacactctgatgctgatggagacaatggttgaggatgagggtaaactgcaaactttgaagtttctgttttcttttgtggaggcagtgttcggtgatactggactaagtagaagtgagcttaagagactttcatcaaaaactcctggaagcagttttgggtcaggatctctcatcctaaaagagttgaaaaattcagaaaatcttgtcattcgcacgaatcaagtaagtaatactgctgttgattgtgatgctagctctggtgaggaagacgaagatgatggtacatctgatggggaattaggcagcattgatagagatgacgaagacgatggaaacagtgataaagctctagcgtcaaaagtgtgcacatttacatccagtggcagtaatttcatggaacagcattggtacttctgctatacatgtgacttaacagtttccaaaggctgctgttcagtctgtgccaaggtgtgtcatcgagggcatcgtgttgtttactccagatcaagccgtttcttctgcgactgtggggctggaggtgtgagaggtagcagctgtcagtgtctgaaacctcggaaattcactggcacctctactgtaccaccgcctgctgctagcagcttccaccccatattgccatatcacgaggatgtggagcaggttctggatagtggttctgattttgaagatgacatttctactgatgctgataataccatgaagctatctgtgccaaatgaattcagcaatgggcttcctttatttcttaaaaatcaggatattgaggtaagggtgcttgaaatctgcaaaaaattgctgcctactatactcagccaaagggaattgaatcttttgaaagacaggaaagttttgttaggaggtgatgtgctggtgtcacattcctttgatttcttccaactaaagaaagtatttaaaagtggatcactggacctgaagataaaagctgattatccaaattctagggagctaaagtcacatcttgctaatggttctcttgctaaattattgctcagtatcagcactcgaggtaagcttgctgttggagaaggcgataaagttgctatatttgacgtgggacaaatcattggacagcctactgcagtacctattactgcagacaaaaccaatgtgaagcccctttccaggaatattgttcgctttgaaattgtccatttagtttacaatccattggtggaccattaccttgctgttgctggatatgaggactgccaagtactaacattaaatagtcgtggtgaagtaactgatcgccttgccatagaacttgctctggaaggagcatatattcgtcgtttggaatgggttcaaggttctcaggtacagctcatggtagtaacaaacctgtttgtgaagatatatgatctctcacaggataatattagccccatgcattattttactgtagctgatgatgtgatagttgatgcaagcctcgtcccctcctcaatggggaaattggtgctacttgttctatctgaagggggtcttttatataggctgaatattacattggtgggcgatgttggtgccaagatattgactgaaacagtcttggttgaagatgtcatatccatgcataaagggttgtcattgtacttctcatcaacctacaggcttctttttgtatctcatcaagatggcacaaccttcatggggcgcttgaatgctgattcttcatcaataacggaattatcatatataagtgaggatcatgatggtaaatccaagccagccgggctttactgctggagagagctagtatctggcagtggtatccttacctgcctatcgaaatttaaatcaaatgctcctcttgtggtgtcgttgggtcctcatgagttggttgcacaaaacatgaggcacagtactggtgcaaattcctcagtggttggtgttgctgcctataagcctttatccaaagataaaacacattgtcttcttttgtatgatgatggaagccttcatatttactctcatacacctagtggaggtgatggttcgacgaaccttacaacagagcaaacaaagaaactgggcagcagtatactcagcagtagagcttacactggcacaaaaccagaatttccacttgatttctttgagaagacaacttgccttacatgtgatgttaagtttaatagtgaaacaaccaagagtggtgattctgaaagcattaaacaacgattgacatcagatgatgggtatttagagagtctgacacctgctggcttcaaggtggttatttcgaatcctaaccctgatatagtcatggttggttgccggatccatgtgggcaacacatctgctagcagcattccttctgagatcacaatttttcatagagtcattaagcttgatgaaggcatgagatcatggtatgatataccatttactactgctgaatcacttctggcggacgaagagttcacaattactgttggtcaaacgttcgatggttcatctatacctaggatagattgtattgaaatttatggtcgagccaaagatgaatttggatggaaagaaaaaatggacgctgcgcttgatatggaagcactgggtggtaatgctactggtggtagatcaggaaagagaccccaaaacgtgaaggctgctcctatccaggagcaagttctggcagatgcccttaggattctctcacgcatatacctgctatgccaaccaagctgctttactgacatggttgatgtaggcatggaacttgataatatgaagtgccgatctttattggaaaccatttttcaaagtgacagggaacctctgctacattctgctgcatgtcgtgtccttcaggctgtgttcccaaagaaggacatgtactatcaagtaaatgccagtttgtctattatcttattgcccatgggcgggtccatttctccctctgttccaccatttttggtttacttatggattatgtttgtgcaggttaaggacaccatgcgtctccttggggtaataaaatcactcccagcaataacttcaagaattggagttggaggcgctgcatctagctgggtgataaaagaatttatagcccagatccatacagtttccaaagttgcattgcataggaaatcaaacctggcctcttttcttgaaactcacggtacagaactagttgatggtcttatgcaagttttctggggtatcttagatttagacaggccagacacacagacgataaatagtcttgttgtgccctgtgtggaatttatttatagctacgctgaatgcctggctcttcattccaatgaaaatcctagagtttcagtgggacctgcagttgctctgctgaagaagctgctctttgcaccatatgaagcagtacagacttctagcagtttggctatctcatcccgatttctccaagtccctttccccaagcagacaatgatagctaatgatgatgctcctgaaaaccaagctaaagcaagtgcttctgttatgaattccaccagtgcaaactctcaggtcatggttgaagaagatcctgccacatcatcagtgcaatactgttgtgatggctgttccaccgttccaatacttcggcaaaggtggcactgtagcgtatgtccagattttgacctatgtgaaacttgctatgagatacttgatgcagatcgcctaccagcaccacattcaaaagatcatcgcatgtcagcaataccaattgaagttgatacatttggaggcgaaggcagtgaaatccatttctctgtcgatgagctagcggattctggtgttcttcatgctgataggagtgttcagacctccccatcatcaattcatgtatatgagtctgcagacttacctgagactattacagaccagacaactgtttcgatttctgcatcaaaacgtgccattaactccctggtacttaaccatctaattgaagagcttagaggctggatggggaccactgctggtacccgagccatacctttaatgcagttgttctacaggctttcttctgcagttggtggtcctttcatggatagttcaaagccagaaaatttggatttggagaagtttgtgaagtggcttatggatgaagtcaatgtaaataaaccgttccctgccagaacgcgatgcacttttggagaagtatcgatccttgttttcatgttcttcacacttatgttccgcaactggcatcagcctgggagtgataattctcattcaaagtcaagtgggagctctgatttggcagagaaaggtcctgctcaggttctggcatcaacaacaataactctcccgtcatccagtgctgaccaggataaaaatgagtttgcttcccagttagtccgtgcctgttctgccctcaggcagcagacatttttgaattatcttatggatattctgcagcaacttgttcatgttttcaagtcatcatccttaaatggagaagctggttcttctggttcaggctgtggatccctattgacaataagaagagagctgccagctggaaatttctctccctttttttcagattcatacgctaaatctcatccaactgatctgttcatggactactacaaattattgttggagaatactttccggcttgtatatagtatggttcgaccagagaaggagaagtctgctgagaaggatagatgctacaaggttcccaacaccaaggatctaaagttggatggatatcaagatgtgctttgcagctatattagcaatcctcatactacatttgttcggaggtatgcaaggaggctcttccttcatttatgtggcagcaagactcactactatagtgtgagggattcgtggcaatactcccatgaagttaagaaacttaataagatcataaacaagtctggaggtttccgaaatcctgtgccttatgagagaagtgttaagctcataaaatgtttgtcgactctttgtgatgtggctgcggcaaggccaaagaattggcaaaagttctgcttgaagcacatggatcttcttccatttctcatggacaatttttaccatttcagtgaagagtgtgttattcagactctcaagcttctaaatttggctttctattctggaaaagatgccaatcataatgcacaaaaaacagagaatgctgatctcgggggttctacgagaactacctcgcagtcttcagatttgaaaaagaagcggaaggctgatgattgttctgaaggttcctcagaaaaatcttgcgtggacatggaacaggctgtagagatgttcagtgacaagaaaggtgacatgttgaagcactttattgacatattcttgctagaatggaactcaacaggtgtccgtcatgaggctaaatgtgttctctttggagtgtggtaccatgcaaaaaacccacttagggaggcaatgctatcgattcttctacagaaggtgatacatcttcccatatatggacaaaacattgttgagtacactgacctcatgacctgtttacttgggaaagtgaatgacttgagtgcaaagcagaatgactctgaacttgtgaataaatgtttgacatctgaggtcataagctgcatctttgacacgctccattctcagaatgagctattggcaaatcatccaaattctcgtatatacaacacgctgagttgcttagtggagtttgatggctattacttagagagtgagccttgtgttacctgcagctgtccagatgttccgtattcaaggacgaagctcgaaaccctcaagtccgagaccaaatttactgacaacagaattataataaaatgcactggaagctttactatacagtcagttacaatgaatgtttatgatgctcgtaagtctaaatcggtgaaagtactcaacctgtattacaacaacaggcctgtgactgacttgtcagaattgaagaataattggactctctggaagcgtgctaagagctgccatcttacatttaatcagacagaattgaaggttgaatttcccattccgattacagcatgcaatttcatgattgagcttgattcattttatgagaatcttcaagcttcgtcccttgaatcactgcagtgcccacggtgtagcaggtctgtcactgataagcacggcatatgtagtaattgccatgaaaatgcatatcagtgccggcagtgtagaaatattaactatgaaaatcttgattctttcctctgcaatgagtgtggatacagcaaatatggccgttttgaattccacttcatggcaaaacccagtttttcatttgacgacatggaaaatgatgacgacatgagaaaaggattggcagcaatagagtcagaatcggaaaatgctcataggcggtaccagcaactgatgggatttaaaaagcctctcatcaaacttgtgtcaagcataggtgaacacgagatagactcgcagcagaaggatgctgttcagcagatgatggtgtccttgcctgggcccacatgcaaggtaaatcgcaagattgcacttcttggtgttctatatggtgaaaaatgcaaagcagcttttgattctgtgagcaaaagtgttcagacattgcaagggcagcgccgtgttttaatgacatatctgcaccagaaaagttctagtgataccaatgcattaccagccttttcaataccaaggtctccaaatagttgttatgggtgtagtactacatttgttacacaatgcttagagttattacaagtgctttcaaaacatgaatactgcaggaagcagcttgttagtgctggaattttatcagagttatttgaaaacaacattcatcagggccctaggacagcacgcactcttgctagggctgtgctatcttcattctctgaaagtgatgaagatgcggttcaggaattaaacaacttgattcagaagaaggtgatgtattgtcttgagcaccatcgttccatggacattgcacaatcaacacgagaagagttactgctgctatcagagacttgtgctcttgtggatgagttttgggaggcaagattacgtgtcacctttcaactgttgttctcttctattaaggttggagcaaaacatcctgcaatttcggaacatattattcttccttgtttgaggataatttctcaggcttgcacgcctccaaaatctgatggtggggacaaagagtcgggtttgggagtatctagcttgacattgcactctaagaacgatgatacaactggtaacacatctaataatcccagtgctaagattcagtcagatatatctggaaaaattcatggtggaagtcgaagaggccaggatattccacttctgagctattctgaatgggagaatggtgcatcatatttagatttcgtccggaggcagtacaaagtatcccaagcagtgaaaggatctgttcagaaggcacgtcatgattcgtataagtccgattatctggttctcaaatatggactcagatggaagcgtcgtgcatgtctggagtcaagtaagagtgacttctcaaaatttgccttgggttactgggtgtcagacttgatcttaagttcgtgttcccagtcaataagatctgagatatgcactctcataagcttgctatgcccatcaaacactcctagacaatttcagttattgaacttgctcatgtcactacttcctcgaacactctcagctggtgacagtgcagcagagtactttgagttacttgggaccatgattgattcagagtcttctcgtcttttcctaactgttcgtggttgtttgacaacgttatgttctttgataacaaaagaagtgtccaatgttgaatcacaggagagaagcctaagcattgatatatcacagggattcattctccataagcttgttgagctcctgaacaagttccttgaaattcccaatatcagaggaaggtttatgagtgataggttactatctgaagtgctggaagcttttctggtgatccgtgggcttgttgtgcaaaagacaaagctaataaatgactgcaatcgtcttttgaaagaccttcttgatagtttgcttgttgagagtactgaaaacaaacgtcaatttattcgtgcttgcatctctggattgcagaagcatgtgaaggaaaaaaagagacggacgtctttgtttattgtggagcaactctgcaatctgatttgccctgtgaaaccagagcctgtttatctcttgatactgaacaaggcacatactcaagaggagttcatcaggggttctatgacaaagaacccatactccagtgtggatgttggccctctaatgcgggatgtgaaaaacaaaatatgtaaccagcttgatttaattggacttttggaggatgattatggtatggaattattagttggtggtagtataatctcactcgatctgagcatttcccaagtctatgagcaagtatggaggaagaaccatggtcaaactcaacattctttgtccaatgtcagcgcaataactgctgcttcatctatcagagattgcccgccaatgacagtgacctacagactgcagggtttagatggtgaagctactgagcctatgattaaagagctggatgaggaaagggaggaatcacaagatcctgaaattgagtttgctatagcaggtgctgttagggaatgtggaggccttgagattattttgagcatgattcagagcctacgtgatgatgagttcagatctaatcaagaagagttggcttctgttcttaaccttctcaagtattgttgcaaaatccgtgaaaatagatgtgccctattacgtctgggtgctttaggtttgctgcttgagacagctagacgtgcattttctgcggatgcaatggaaccagctgaaggtattctactaattgtagaaagtcttactatggaagctaatgagagtgacataagcatcgcccaaagtgtttttacaactagtattgaggccactggtgctggtgaggaggccaggaaaattgttctcatgtttttggatagaatatgtcatccttcaggtgccaaaaaatcaaacaagcagcaaaggaatgaggagatggtggcaagaatcctgccgtatttgacctatggggagccagcagctatggaagctcttattcaacattttgagccctaccttagggactggactgaatttgatcgattgcagaagcaacatgaagataatccaaaagatgataatataagccaaaaggcgtcaacacagcgatctgctgtcgaaaactttgttcgtgtatcagagtcactcaagactagttcgtgtggtgagaggctgaaggatattattctggagaagggcattacgaaagctgctgttgagcatgtgaaggaaagctttgcttctgcaggacagactggctttagaacaagtgaagaatggacagctggcttaaaactgccatctattccacccattttgtcaatgttgaaggggctggccaagggccatctgtctacacagaaatgcattgatgaagaaggcatattaccgctgctccatgctttggaaggggtgcctggtgaaaatgaaattggtgcaagagcagaaaatcttttggatacgctagccaataatgaaaataatggcgatggtttcctaggagagaagattcaagagctgcgacatgctacaagggatgagatgcgtcgccgtgctcttgagagaagagcgatgctactaaagggaatgggaatgcgtcaagaatttgcttctgatggagttagacgtattgttgtatctcagcctacgattgaaggtttggatgatgtggaagaagaggaggatggtgtagcgtgtatggtttgtagagaagggtacaccttaagaccaacagacatgttgggagtctatgcattcagtaaacgagtgaacttaggtgcaacaagttctggtagtggccgtggggactgtgtttacaccactgttagccacttcaacatcatacactaccaatgccatcaggaagctaaacgtgctgatgctgcactgaagaatccaaaaaaggaatgggatggtgctaccttgcggaacaatgagacattgtgtaattgtatctttccattgagggggcgatctgttcctcttgggcagtacactaggtgtgttgatcagtactgggaccaattgaattcacttggacgagctgatgggagtcgtctccgtttgttgacatatgacattgtgctgatgctagcgaggtttgcaacaggcgcttcctttagcacagactgcaaaggtgggggaagggaaagcaactcccggtttcttccattcatggtccagatggcttcttatcttgcagatggaagtgctaaccagcagcgtcatgtaatggccaaggctgtcacgacatacttgtccggctctgcatcaacactggattctcctattcgagtttcagcatctgtctctgggtcccgtggtggttcagggtcctccgaggagactgtacagttcatgatggtttattcccttctgtcagagtcatacgagagttggctccaacaccgccctgtgttcctacagaggggcatctaccacgcctacatgcaacataagcacgggcggtcaaccctcaagctgtcatcagattcgtcatcattggctgttcggtcagacgaaggttcatcctctgatacaagtgacgagaagcttttcgctatcgttcagccgatgcttgtgtacactggcttgattgagcagctacagcagttcttcaagaagggaaaatcatccagcatgagcaagatgggtgaggaagatgaatctgctggcagccttgagaaatgggagatccagatgaaagagaagctggacaacatgaaggagatggtggggctgtccaagaacctgctctcctggcttgaagacatgacctcatcagatgatatgcaggaggcctttgatgtcatgggggcattgacggatgtattttcgagtggttatgcgacatgcgaagattttgtccgggctgccatgcatgccggcaggagctga

SEQ ID NO: 2752 - protein, 4828 aa, Sorghum bicolor
MEFPPDASDAMLLSSVARCADSLPALFRLKFKFSNHDKVFSVDGVGTILLQILEEFLQVMQNISVCNSNICCTVKVCILSSMLEIFNPNIWRYEKCGTCLVPPLAYSPHVVQFVLKLFKDAKRWTSRVDKDKPDKDVMDYSCNKDTSDLSCHIRSEEVPLLKKYTCEEYLWLIFPSGHQWLSGLVHLTFFLHEEGLKSFTSEKQHLSCPKQAVVSELESVASHEEDALFGNLFAEVRPAGLNESLEQSTSLGSSPSNSQQGFIQLAADLMCFMETSILSPEWSSAIYMDACRKFSTCHLDQLLSILKCQACFPDESSTGNMMSSSENKLPHINAACFELLQTFLVCDECPASLREYLVEKVFNVESGKYTYNHYTLALVVHAMSYTSNSGFSLGRKIFVQYVTYLLEKANDTSSSSLNISDFCASLPCPFHLEIVLAAFHLTTESEKADLVKIVLSSLEKMKQPVSGVTVAGLTRWALLLSRLLLVLRHMLLYPFTHPSWLFTRLRSRLWDIQLKEGQSRSTNNCLPSLATVIVEELFGGSVKKSSVASNLLPQLIDVTPVHAEFYFDKAAVETLGLNLAYLGATMSQILGSWSGRSPEVADDLIVERYIFLICWSTLSGICCQGNDSVPNNYYLEPDLADVNAFLTFALSISSGASSHVGVDLPALIFQLLKLLHSDILGSSTLENWDFPRKGAWISFILSHINSVLRMQQTGGESEVDSHRIHEVHGEDLFTCGKNLSIYITENSGHCLDILSSLLEIYLRTFKKAYLSFLERSSLDTCYPSLLLKHSVFDKSKHHLLFEKSGSYLEMLESICKVSSRIDRVTTKLGEGQRKYYFQKCLLHGFPLDYISSNSALLSCILVINEIMQTFTGCIKVAQPGDRDQVDEGAISKLLGMVMEVRSDHIFGPVHGDCDNIFMSLINNRNDLARYSELFVLKQLEGFLADINLNGSMDSGVKEILVSTVVDVVEDLQSKSEVFKFFLGDAEGAPEGASRIFASGRADMSVFIDVLDCKSEQVNLKIIHLLTDILSNGFCPGLKEKLQNKFIGMDVPCFSSWLECIILGPSVKAESTIVTVNPAIRELTVDFFKHLIGPPYETLNKEFQHHLFNSLLPLLDQAFLSHDLQIARAYFHFLVQLSSEESHFKHLFENTLMLMETMVEDEGKLQTLKFLFSFVEAVFGDTGLSRSELKRLSSKTPGSSFGSGSLILKELKNSENLVIRTNQVSNTAVDCDASSGEEDEDDGTSDGELGSIDRDDEDDGNSDKALASKVCTFTSSGSNFMEQHWYFCYTCDLTVSKGCCSVCAKVCHRGHRVVYSRSSRFFCDCGAGGVRGSSCQCLKPRKFTGTSTVPPPAASSFHPILPYHEDVEQVLDSGSDFEDDISTDADNTMKLSVPNEFSNGLPLFLKNQDIEVRVLEICKKLLPTILSQRELNLLKDRKVLLGGDVLVSHSFDFFQLKKVFKSGSLDLKIKADYPNSRELKSHLANGSLAKLLLSISTRGKLAVGEGDKVAIFDVGQIIGQPTAVPITADKTNVKPLSRNIVRFEIVHLVYNPLVDHYLAVAGYEDCQVLTLNSRGEVTDRLAIELALEGAYIRRLEWVQGSQVQLMVVTNLFVKIYDLSQDNISPMHYFTVADDVIVDASLVPSSMGKLVLLVLSEGGLLYRLNITLVGDVGAKILTETVLVEDVISMHKGLSLYFSSTYRLLFVSHQDGTTFMGRLNADSSSITELSYISEDHDGKSKPAGLYCWRELVSGSGILTCLSKFKSNAPLVVSLGPHELVAQNMRHSTGANSSVVGVAAYKPLSKDKTHCLLLYDDGSLHIYSHTPSGGDGSTNLTTEQTKKLGSSILSSRAYTGTKPEFPLDFFEKTTCLTCDVKFNSETTKSGDSESIKQRLTSDDGYLESLTPAGFKVVISNPNPDIVMVGCRIHVGNTSASSIPSEITIFHRVIKLDEGMRSWYDIPFTTAESLLADEEFTITVGQTFDGSSIPRIDCIEIYGRAKDEFGWKEKMDAALDMEALGGNATGGRSGKRPQNVKAAPIQEQVLADALRILSRIYLLCQPSCFTDMVDVGMELDNMKCRSLLETIFQSDREPLLHSAACRVLQAVFPKKDMYYQVNASLSIILLPMGGSISPSVPPFLVYLWIMFVQVKDTMRLLGVIKSLPAITSRIGVGGAASSWVIKEFIAQIHTVSKVALHRKSNLASFLETHGTELVDGLMQVFWGILDLDRPDTQTINSLVVPCVEFIYSYAECLALHSNENPRVSVGPAVALLKKLLFAPYEAVQTSSSLAISSRFLQVPFPKQTMIANDDAPENQAKASASVMNSTSANSQVMVEEDPATSSVQYCCDGCSTVPILRQRWHCSVCPDFDLCETCYEILDADRLPAPHSKDHRMSAIPIEVDTFGGEGSEIHFSVDELADSGVLHADRSVQTSPSSIHVYESADLPETITDQTTVSISASKRAINSLVLNHLIEELRGWMGTTAGTRAIPLMQLFYRLSSAVGGPFMDSSKPENLDLEKFVKWLMDEVNVNKPFPARTRCTFGEVSILVFMFFTLMFRNWHQPGSDNSHSKSSGSSDLAEKGPAQVLASTTITLPSSSADQDKNEFASQLVRACSALRQQTFLNYLMDILQQLVHVFKSSSLNGEAGSSGSGCGSLLTIRRELPAGNFSPFFSDSYAKSHPTDLFMDYYKLLLENTFRLVYSMVRPEKEKSAEKDRCYKVPNTKDLKLDGYQDVLCSYISNPHTTFVRRYARRLFLHLCGSKTHYYSVRDSWQYSHEVKKLNKIINKSGGFRNPVPYERSVKLIKCLSTLCDVAAARPKNWQKFCLKHMDLLPFLMDNFYHFSEECVIQTLKLLNLAFYSGKDANHNAQKTENADLGGSTRTTSQSSDLKKKRKADDCSEGSSEKSCVDMEQAVEMFSDKKGDMLKHFIDIFLLEWNSTGVRHEAKCVLFGVWYHAKNPLREAMLSILLQKVIHLPIYGQNIVEYTDLMTCLLGKVNDLSAKQNDSELVNKCLTSEVISCIFDTLHSQNELLANHPNSRIYNTLSCLVEFDGYYLESEPCVTCSCPDVPYSRTKLETLKSETKFTDNRIIIKCTGSFTIQSVTMNVYDARKSKSVKVLNLYYNNRPVTDLSELKNNWTLWKRAKSCHLTFNQTELKVEFPIPITACNFMIELDSFYENLQASSLESLQCPRCSRSVTDKHGICSNCHENAYQCRQCRNINYENLDSFLCNECGYSKYGRFEFHFMAKPSFSFDDMENDDDMRKGLAAIESESENAHRRYQQLMGFKKPLIKLVSSIGEHEIDSQQKDAVQQMMVSLPGPTCKVNRKIALLGVLYGEKCKAAFDSVSKSVQTLQGQRRVLMTYLHQKSSSDTNALPAFSIPRSPNSCYGCSTTFVTQCLELLQVLSKHEYCRKQLVSAGILSELFENNIHQGPRTARTLARAVLSSFSESDEDAVQELNNLIQKKVMYCLEHHRSMDIAQSTREELLLLSETCALVDEFWEARLRVTFQLLFSSIKVGAKHPAISEHIILPCLRIISQACTPPKSDGGDKESGLGVSSLTLHSKNDDTTGNTSNNPSAKIQSDISGKIHGGSRRGQDIPLLSYSEWENGASYLDFVRRQYKVSQAVKGSVQKARHDSYKSDYLVLKYGLRWKRRACLESSKSDFSKFALGYWVSDLILSSCSQSIRSEICTLISLLCPSNTPRQFQLLNLLMSLLPRTLSAGDSAAEYFELLGTMIDSESSRLFLTVRGCLTTLCSLITKEVSNVESQERSLSIDISQGFILHKLVELLNKFLEIPNIRGRFMSDRLLSEVLEAFLVIRGLVVQKTKLINDCNRLLKDLLDSLLVESTENKRQFIRACISGLQKHVKEKKRRTSLFIVEQLCNLICPVKPEPVYLLILNKAHTQEEFIRGSMTKNPYSSVDVGPLMRDVKNKICNQLDLIGLLEDDYGMELLVGGSIISLDLSISQVYEQVWRKNHGQTQHSLSNVSAITAASSIRDCPPMTVTYRLQGLDGEATEPMIKELDEEREESQDPEIEFAIAGAVRECGGLEIILSMIQSLRDDEFRSNQEELASVLNLLKYCCKIRENRCALLRLGALGLLLETARRAFSADAMEPAEGILLIVESLTMEANESDISIAQSVFTTSIEATGAGEEARKIVLMFLDRICHPSGAKKSNKQQRNEEMVARILPYLTYGEPAAMEALIQHFEPYLRDWTEFDRLQKQHEDNPKDDNISQKASTQRSAVENFVRVSESLKTSSCGERLKDIILEKGITKAAVEHVKESFASAGQTGFRTSEEWTAGLKLPSIPPILSMLKGLAKGHLSTQKCIDEEGILPLLHALEGVPGENEIGARAENLLDTLANNENNGDGFLGEKIQELRHATRDEMRRRALERRAMLLKGMGMRQEFASDGVRRIVVSQPTIEGLDDVEEEEDGVACMVCREGYTLRPTDMLGVYAFSKRVNLGATSSGSGRGDCVYTTVSHFNIIHYQCHQEAKRADAALKNPKKEWDGATLRNNETLCNCIFPLRGRSVPLGQYTRCVDQYWDQLNSLGRADGSRLRLLTYDIVLMLARFATGASFSTDCKGGGRESNSRFLPFMVQMASYLADGSANQQRHVMAKAVTTYLSGSASTLDSPIRVSASVSGSRGGSGSSEETVQFMMVYSLLSESYESWLQHRPVFLQRGIYHAYMQHKHGRSTLKLSSDSSSLAVRSDEGSSSDTSDEKLFAIVQPMLVYTGLIEQLQQFFKKGKSSSMSKMGEEDESAGSLEKWEIQMKEKLDNMKEMVGLSKNLLSWLEDMTSSDDMQEAFDVMGALTDVFSSGYATCEDFVRAAMHAGRS

SEQ ID NO: 2753 - DNA, 1092 bp, Sorghum bicolor
atggaggccttctcaagattggagcttgaacaagcacatgctgagctttggaacctcacctttagctaccttaagtccatggcacttgagtgtgcagttcaactcaacatccccactgttattcacaactttggtggcagtgcctctctacccaatattctctctgccatcccagttcctgaacataggaggccctatcttccacgcctcatgaggtttcttgttgtatcaggtattctttcctttgattttcccaacttaggggagggtatgtacaaactcaccccattgtcatgccttcttgtggatgacgaccacatcaatgggtgtcggagccttgggccatttgttctctcccaaaccacaaagtaccatgtctcatcagccacatacttatctgagtggttcaagggtgaggataggatagggcctatggctgcggagatgccattcaagatagctcatggcacaggcccatggggtgccctagagcgtgacccacaattcaacaaagtatttaatgctgggttaggatctaatagtcggcttgtgctagactttgttgtggcccaatatggcgatgtgtttgacagcataagctcattgctcgatgttggaggaggggatggtagcacagcgaggaccattgcaaaggctttctcacatgtcaagtgctcagtgttggaccttccaattgttattgctgacatacagccgggtgatggcatggttgactatattgcaggtgacatgtttagttcaatcccaccaactgatgctattattcttaagtatgtgctgcatgactggaatgatgatgactgtgtgaagatcctagatcaatgcaaaaaggctatacgttcttgcaaaccagctggaggaaaagtgataatcattgatacagtcgttggatctccttcgaaagagatgtttgaagcacaagtcacatctgatttgttgatgatggtggtagctgggggtaaggagcgtgataagcaagagtggcacaagatattcatggagtcaggattcaaggactacaagataaggcccgttctgggatatctgtcaatcgtcgagctctacctgtag

SEQ ID NO: 2754 - protein, 363 aa, Sorghum bicolor
MEAFSRLELEQAHAELWNLTFSYLKSMALECAVQLNIPTVIHNFGGSASLPNILSAIPVPEHRRPYLPRLMRFLVVSGILSFDFPNLGEGMYKLTPLSCLLVDDDHINGCRSLGPFVLSQTTKYHVSSATYLSEWFKGEDRIGPMAAEMPFKIAHGTGPWGALERDPQFNKVFNAGLGSNSRLVLDFVVAQYGDVFDSISSLLDVGGGDGSTARTIAKAFSHVKCSVLDLPIVIADIQPGDGMVDYIAGDMFSSIPPTDAIILKYVLHDWNDDDCVKILDQCKKAIRSCKPAGGKVIIIDTVVGSPSKEMFEAQVTSDLLMMVVAGGKERDKQEWHKIFMESGFKDYKIRPVLGYLSIVELYL

SEQ ID NO: 2755 - DNA, 1044 bp, Sorghum bicolor
atggcatcctcctctacctacctcatgctcgccagcgcccgtgctcccctcgctcctctcctaaggccaacgctgatggccctcgtcgcgagaaccgccgcagcctccatcactagtggcgccagagctagtgtccctctgttcgtcaaccccgccgccttccggccgggagtgcggcgctgtggctgggcccacatctgcagagactcgtccctccagggccctcccggcaccgattctcctgcccagaagcaagaggatatgaagaagagcgaggcggtgtcagaggctgctattcggattgccggaggcagcggccggaggttcagcgactggagcacgtcggtgctcatcttcgggatttgggggggactcctgtactacgtcttcctgctcgcgcctaaccagacaccgtaccaagacacatacctcttgcagaaacttttaaatctgaagggtaacgatggctttcgaatgaatgatgttcttgtttctctatggtacattatgggcctctggccactagtctacactatgttgctccttcctactggtagaagttccaaaagcaagattcctgtgtggccattcctggttctttcatgcatcggaggagcgtatgcgttgattccttactttgtcttatggaagccgcctccacctccaattgacgaagatgaaattggacagtggccattaaaatttcttgagtcaaagttaactgcaggagtagtgtttgccttgggcattggactgatcatatatgctggcaaagctggtggcgatgattggaaagaatttattcgatacttcaggtcgagcaagtttatccatgccacctgccttgattttactttgctatcagccttctcaccattttgggtctataacgacatgacagcaaggcgatggaaaaatggctcatggcttctaccacttgcactgataccttttgtggggccctcactatatcttctactgcgcccatcactttcttccttgctggaagcatctgcttcaccatctgatgaatttaaaaaataa

SEQ ID NO: 2756 - protein, 347 aa, Sorghum bicolor
MASSSTYLMLASARAPLAPLLRPTLMALVARTAAASITSGARASVPLFVNPAAFRPGVRRCGWAHICRDSSLQGPPGTDSPAQKQEDMKKSEAVSEAAIRIAGGSGRRFSDWSTSVLIFGIWGGLLYYVFLLAPNQTPYQDTYLLQKLLNLKGNDGFRMNDVLVSLWYIMGLWPLVYTMLLLPTGRSSKSKIPVWPFLVLSCIGGAYALIPYFVLWKPPPPPIDEDEIGQWPLKFLESKLTAGVVFALGIGLIIYAGKAGGDDWKEFIRYFRSSKFIHATCLDFTLLSAFSPFWVYNDMTARRWKNGSWLLPLALIPFVGPSLYLLLRPSLSSLLEASASPSDEFKK

SEQ ID NO: 2757 - DNA, 3186 bp, Sorghum bicolor
atgcagaacttccacgcggttactgtcaaagaggctgtgcaatgcataactccttatttagaggatacaagccaaccaagtcagcacatctacttcgatggatggagagggcttggtgcatctgcagtccttacatctatagccgaagagcccccgccatctgtgagacacaaattcgataaaatcatccatattgatagctctaggtggaaaaatcggagagaactccagaggaaaattgcacagaaactagggcttcctcagcatgtaatgaacattctagataaacaagatgaagaggacgatttcagcggggcagatgaaggctcaaggattgagatagtagcagtcgggagagagattcatcaagccctgcaaggacagagttgtctagtagttttccataatgggagcactaacatggttgacttgaatgattttggcattcctcaacctgcagatcgatgggcaaactttgttcggaaggtattgtggactttccgtggaaggcttcatgccatcccaggaatgaagctagcagctgatccaacacgtgctccttcaacttcaaatgcagaatcagccaagcctagtaatggtaatcaaacacggacagatcagaaacagctctcaagggaaaatgttccagcgacagagggagtaaatgtagacaactcacaagtttatctttattcatttcttgaggatagtgaaagtgaacagtggaatggactagcacatgatgaagctgcagaaatagctaaatacagtcgtaagcttggtgtcaccttagaaacagctgcattgtgttgcaagtacatgttgttactgaattccaggggtgtcgacacactagacttcaactgggccacccatgcctccaactattgggtttgcgatggaattatacaagaataccagcaggacaaagcatgggaggtagccactgctttgctccaagaaatgaaactagaggaattctcatcttataaattgcccgaatttggtgataagacacgctgggttgtagccaccgatccttatagagttgaagaaattaagccagagacaacatcatttttctttgccaacaataggggacggggggtagcatcattacccactaaaatattccagagatctgctgagcagcttcatgtactgaaactttgcctctgtactttcagcttttcttcaccgcctttccttcattgtcagaagataagatttcttggactggataagtgcaaggatcagccaaagaaactagaaggaaaggaggaagatgacagacgaaaaaataatttcttccagagtctatgggtgcttgacatatgtgacacagattgggaactggacttatccccgaatataattgagagtatgcttcaaaacattagggagatacatataaagagggcaagaatctggagcaatagtaatgcatggacatggagacatgtacacaatattcacaagcttcgagtgattgaacctacattgcattggaaagacgaaggtaaggaagaagagatgaaggatgaattcatgaatatgtccaagctagagctccttgatttgtcagggaatagcacaataaaagttttgccaagattatcaggtgcaactagcctcagcactctggttctagatggctgtattgggttgacaacagttgcccctgaagagctgccaccatccctggaaacatttagctttgatgcaggggaaggaaagcaatacaacaagaaagctaagatctctcgcatctccatggctggttgtgcaaggctggagaacttcagattgcgtggatctcttccgaatcttgaggagctggacctttccaacacatcggtcaaaacacttgacctgaaagatgaggtggtgcaggtcccattcctgcaacgactcattttgttgggatgtgagcaaatccgtgctatactttggccaaaggctggaatgcccaaactagtggtgctgcgcattgacactcgaggaggcacagaagaagctagatcagaaacacctcatgatgctgattactctttggtcatcagcaaggaacatgaagagatgtgccttgcacatgttgctgttacggacatgaggttgcttcagtcgttgctgcttgcaggtagcaacaagttttgctggaacacaactacatttaatctgattctgtacttgtcttcttctagcaaaaatgatgatgggcaaaacaacaggaaggagaaaattggcctcccatcggttgcatcacatctgcacaagtccccagttctcaagagtcaccagatctatagtgatatcaacactaatgaggcaactggcaatcatagtgcgccgcagtttcaactactagactttcatgtagagattgttgaggaaataagcagtgataatgtggtcaccgaacaagcaatcagggctgtgaggtttgttcttagtaaggtcaactcattgcatgtgcacgacaacttttccatcaacactgttattcccgaaagcatggtcacccgtgaaagttggtccaatctcaagttctgctccatcgaaagatgccctgatttgaacattgtgttcaccactgacgatgtgttctgcttccctgaactagagacatttttgggggctcatcttttgactgcacgctgtatctggagcaaaggatggctagcccttccatattctggaaaacttcgggctataaatctgcacttgtgccctaggctcacatttgtcctcccgttatcatggtcccaaaccttgtcatcactagagacccttcgcatcatctactgtggtgacctcaatcaggtcttccccgtggaagcagagtttctgaaggaatcatctactggccatccaagacatgaactggaacttccaaacctgaagcacatacacctgcatgagctccccaagcttcatcagatatgcgaggtcaagatgttcactcccaagctccagaccatctgggtgaggggatgctggagcctcaagcgcatcccagccaccacagaccgcccggacagccaccctgttgtggactgcgagaaggactggtggaacaagctggagtgggatggaaagaaggctcgccatcatccctccctcttcgagctgcgccactccaagtactataagaagaccctgctgagatgctcggttctccggtga

SEQ ID NO: 2758 - protein, 1061 aa, Sorghum bicolor
MQNFHAVTVKEAVQCITPYLEDTSQPSQHIYFDGWRGLGASAVLTSIAEEPPPSVRHKFDKIIHIDSSRWKNRRELQRKIAQKLGLPQHVMNILDKQDEEDDFSGADEGSRIEIVAVGREIHQALQGQSCLVVFHNGSTNMVDLNDFGIPQPADRWANFVRKVLWTFRGRLHAIPGMKLAADPTRAPSTSNAESAKPSNGNQTRTDQKQLSRENVPATEGVNVDNSQVYLYSFLEDSESEQWNGLAHDEAAEIAKYSRKLGVTLETAALCCKYMLLLNSRGVDTLDFNWATHASNYWVCDGIIQEYQQDKAWEVATALLQEMKLEEFSSYKLPEFGDKTRWVVATDPYRVEEIKPETTSFFFANNRGRGVASLPTKIFQRSAEQLHVLKLCLCTFSFSSPPFLHCQKIRFLGLDKCKDQPKKLEGKEEDDRRKNNFFQSLWVLDICDTDWELDLSPNIIESMLQNIREIHIKRARIWSNSNAWTWRHVHNIHKLRVIEPTLHWKDEGKEEEMKDEFMNMSKLELLDLSGNSTIKVLPRLSGATSLSTLVLDGCIGLTTVAPEELPPSLETFSFDAGEGKQYNKKAKISRISMAGCARLENFRLRGSLPNLEELDLSNTSVKTLDLKDEVVQVPFLQRLILLGCEQIRAILWPKAGMPKLVVLRIDTRGGTEEARSETPHDADYSLVISKEHEEMCLAHVAVTDMRLLQSLLLAGSNKFCWNTTTFNLILYLSSSSKNDDGQNNRKEKIGLPSVASHLHKSPVLKSHQIYSDINTNEATGNHSAPQFQLLDFHVEIVEEISSDNVVTEQAIRAVRFVLSKVNSLHVHDNFSINTVIPESMVTRESWSNLKFCSIERCPDLNIVFTTDDVFCFPELETFLGAHLLTARCIWSKGWLALPYSGKLRAINLHLCPRLTFVLPLSWSQTLSSLETLRIIYCGDLNQVFPVEAEFLKESSTGHPRHELELPNLKHIHLHELPKLHQICEVKMFTPKLQTIWVRGCWSLKRIPATTDRPDSHPVVDCEKDWWNKLEWDGKKARHHPSLFELRHSKYYKKTLLRCSVLR

SEQ ID NO: 2759 - DNA, 1896 bp, Sorghum bicolor
atggcttcgtctcccgccccctcccctcccgacgtctcgcctcccccgaaacccacgccgacgttcactccgaacccggcggccacctcctccagctcccttgagacgtcgggtccccccctaccccccccctcgtccttccctgcggagcagtctgctcgtggtcggtctaagcacgagcgctggagcgaagactcggattctggcggctccccatcttaccgtgacgtcgtcatctctccttcggctccggcatcgctttctgccccgacgaaagcctctgcggctgggtcggctgctggagctggaggcgacgtggtggcggccaaccctgtggcccgggccgcccccaaaattatcctctgcggccagcggcgtcctgctgtcccgcgtggtcgcgcggacgggtggcaggtgttcgagtcgcgtagtgctcggcgccggcgccagtgtgccgcttgtcctccccgacgccctgtccccgccgaccttttgggcaggtgcttcaactgcttctcctccgcgcacgccgctgcccagtgccgccaaagaacccggtgcttccgctgcaagtccctggggcatcgatcctacgagtgtcctcggtcggctcgcgctgcacgtccgccgaggtgtgtcgctgtctggcggcgcatctctgtgaacccaacgccgactgacgactccttcccgcaacggtcttctcgggcgggacagatgagtggcgtgccgatgccggatgtcaattcctccccgcaacggttttctccggcgagaaggacgagtggcgtagctgaggatgctgcgaaggcgcaggtccctgcccctccaccaaggcgtttctctgtgtggcggcgtgtttctcctatcccggtggcggtcgacgctccccgcccgcaacgaaagttgtgggtcactgagccgccggtcgctgcaatggaggatcctccggtgaagcgtgtgctcgagtatgacattgacattcgtttctctgttcgtattcagcctggtggttctactgctagcccacctcctccgcccggggatagcgaagatcaggatgcctctgcacgtcgacggcgccggatgcattccccttctcccccacatccatccggcctgggtccggctgctgatggccctagcgcgtccggcgctggcatgtccaacattggtggagctgggcgtgggcctggccacaggcgaagggacacggccacaacctttctggagccggtctgcgattcccaagcagcctgcgtggttcctctcgagctcccaagcgatgagctccgctgcattaactcctctgttgccgatggtgtaaagctgactgatgtttccaccccgaagacgctggttggcggaggcccgtcaattgccgttgccgccgccttctcttcggacgaggcagagcgctttctaatggaaaaggacctggtcctccctcgggccggtggtgggccgaggtcggaggactatcctgatgctgacccggacctgaagtcttcctgtggtgatgttgaggtgggctttggtggggctacggtgcttccggcctcaccacgctctcctctcgtcttccatccggtcgaggcaacggtggaaccggcctcacctcaatctcccttctcccccatatcggagtccaacctgctggtcgcctctccgctgctgcccgagacaccagcacgcgcgcccaaggctgcagtgaagccactgatgaccttcatcgacaagcttactcgacgtacatcaggcctccttgctgtcccggtcaacaagcgcagaagcaagacactcccaccaggtgccaccccacggcgtagccggcgccttgctggtgcgacggtggaatttgacattaacgacttggaaagaagaacaaagaagaag

SEQ ID NO: 2760 - protein, 632 aa, Sorghum bicolor
MASSPAPSPPDVSPPPKPTPTFTPNPAATSSSSLETSGPPLPPPSSFPAEQSARGRSKHERWSEDSDSGGSPSYRDVVISPSAPASLSAPTKASAAGSAAGAGGDVVAANPVARAAPKIILCGQRRPAVPRGRADGWQVFESRSARRRRQCAACPPRRPVPADLLGRCFNCFSSAHAAAQCRQRTRCFRCKSLGHRSYECPRSARAARPPRCVAVWRRISVNPTPTDDSFPQRSSRAGQMSGVPMPDVNSSPQRFSPARRTSGVAEDAAKAQVPAPPPRRFSVWRRVSPIPVAVDAPRPQRKLWVTEPPVAAMEDPPVKRVLEYDIDIRFSVRIQPGGSTASPPPPPGDSEDQDASARRRRRMHSPSPPHPSGLGPAADGPSASGAGMSNIGGAGRGPGHRRRDTATTFLEPVCDSQAACVVPLELPSDELRCINSSVADGVKLTDVSTPKTLVGGGPSIAVAAAFSSDEAERFLMEKDLVLPRAGGGPRSEDYPDADPDLKSSCGDVEVGFGGATVLPASPRSPLVFHPVEATVEPASPQSPFSPISESNLLVASPLLPETPARAPKAAVKPLMTFIDKLTRRTSGLLAVPVNKRRSKTLPPGATPRRSRRLAGATVEFDINDLERRTKKK

SEQ ID NO: 2761 - DNA, 1581 bp, Sorghum bicolor
atgcttctccagccgatccccaccgccaccctcgccgctggacggagctccggcgaagctcccttcccctttcgccgccgctgccgccgccacatgctcctccctatccgcgccgactcgaccccgatctccctctcggcctccgccccctcgcggccggccaagccggccgcttgcaccgccgacgagctccactacgcccccgtcgacggcgccggctggcgactcgcgctctggcggtacaggccgccgcgcaatgctcccgtcaggaatcatccgctgatgctgctgtcgggagtcgggaccaacgccgtcggattcgacctgtcacccggggcttcgtttgcccgtcacatgtctagccaaggatttgatacgtggatagttgaagtaagaggtgctggtctgagcacgcgtgaatatgatgattctgctccatctggctcagtcacttttgaggatgtctctggtggtattcaacctcttaataaacagattacattcgaggctacttcccttcagagttctggtggctatgctagtgattgtgatgaccttggaatagttgctttggatgaaccacctttacttgctgaactttctaatttttttgatcggatcgcaaagctcatggaagaggctgtagttaatggaaattttcatgagatcacagaaaaagtttctgttctctcagaaatggtagagagctctaccattattggtccagtgagagaagaaagtctacgtcttttgaagaattttcaggaccagttggattcgtgggagcgttttgtagcaacacagatgaatctgacttctgaatataattgggactttgaccattacctagaggaggatatacctgctgcggtagagtatattagacagcacagtaaagcaaaagatgggaagttgcttgccattggacactcgatggggggaattttgttatatgcaatgctgtcaagatctggttttgaaggagtttcatcaaatttagcagccattgtcactttggcttcttctattgactacacaacatccaattcatcactgaagctgttactgcctcttgctcatcctgcacaagctcttaatgtccctgctgttccattgggtatgttgttggcagcagcatatccgtgggcatcttgtccaccatatcttttttcctggcttaatcctcaaatatcagctcaggacatgatgcatccggagttgctgtctaagcttgtttccaacaacttttgtacagtgcctgcaaaggttgtcctgcaacttacaaccgcattcagggaaggtgggctgtgcaaccgaaatggaaccttctcgtataaggatcatttgcaagagtgtcagactcctgtccttgcattggctggagataaagacctaatatgccctcccgaggctgtttatgaaactgtgaaactcattccaaagcacaaggtgaactatagggtgttcggaaagccacaaggcccacattatgcacattatgacttgattggaggtcgactggcgaccgatgatgtgtatccatgtatcatagagttcctctctcgccatgatggttgttga

SEQ ID NO: 2762 - protein, 526 aa, Sorghum bicolor
MLLQPIPTATLAAGRSSGEAPFPFRRRCRRHMLLPIRADSTPISLSASAPSRPAKPAACTADELHYAPVDGAGWRLALWRYRPPRNAPVRNHPLMLLSGVGTNAVGFDLSPGASFARHMSSQGFDTWIVEVRGAGLSTREYDDSAPSGSVTFEDVSGGIQPLNKQITFEATSLQSSGGYASDCDDLGIVALDEPPLLAELSNFFDRIAKLMEEAVVNGNFHEITEKVSVLSEMVESSTIIGPVREESLRLLKNFQDQLDSWERFVATQMNLTSEYNWDFDHYLEEDIPAAVEYIRQHSKAKDGKLLAIGHSMGGILLYAMLSRSGFEGVSSNLAAIVTLASSIDYTTSNSSLKLLLPLAHPAQALNVPAVPLGMLLAAAYPWASCPPYLFSWLNPQISAQDMMHPELLSKLVSNNFCTVPAKVVLQLTTAFREGGLCNRNGTFSYKDHLQECQTPVLALAGDKDLICPPEAVYETVKLIPKHKVNYRVFGKPQGPHYAHYDLIGGRLATDDVYPCIIEFLSRHDGC

SEQ ID NO: 2763 - DNA, 933 bp, Sorghum bicolor
atgcctgatatccagctaggatgccacactatacagtcccatggcaccaaagtggcaagattacacatgtatgactggattatacttttatgtcttgctgtatttgatggactgttaaacttaatcgagccctttcaccgctttgttggacgcgacatgatgaccgacttgagttatcccctcaagggcaacacaatcccattttgggctgttcctctgattgccatagtgctaccttggttcatctttggtgtcatttacttcaaaaagaaaaatgtctatgatttacaccatggcatactagggatcttatactcagtgcttataactgctgtgatcactgatgcaattaaggatggtgttggccgccctcgcccagatttcttttggcgttgttttcctgatggcaaacctaattatgataatatcaccaccgatgtgatttgccatggagaaaagagtgtcatcaaggaaggtcataagagcttcccaagtgggcattcttcatggtcttttgccggtctaggttttcttgcgtggtacttggctggaaaacttaaagcttttgatcgcaaaggtcacattgcaaaactatgcttagtttttctgcctctacttgtcgcgtcacttgtggcggtttctcgagttgatgattactggcatcactggcaagatgtttttgcaggcggcatcttaggtcttacagttgcttcattctgttacctgcagttcttcccgtttccctttgacaatgatgctctatggccacacgcatacttccaacagctagctgagacacacagcaatggtaatgcaaactcaatcaacataagacctacagagtctgaagatgaacaagaagaccatggtggcattgcccttagggataccagccctatcttggagtcaatggagtctggccggagactatga

SEQ ID NO: 2764 - protein, 310 aa, Sorghum bicolor
MPDIQLGCHTIQSHGTKVARLHMYDWIILLCLAVFDGLLNLIEPFHRFVGRDMMTDLSYPLKGNTIPFWAVPLIAIVLPWFIFGVIYFKKKNVYDLHHGILGILYSVLITAVITDAIKDGVGRPRPDFFWRCFPDGKPNYDNITTDVICHGEKSVIKEGHKSFPSGHSSWSFAGLGFLAWYLAGKLKAFDRKGHIAKLCLVFLPLLVASLVAVSRVDDYWHHWQDVFAGGILGLTVASFCYLQFFPFPFDNDALWPHAYFQQLAETHSNGNANSINIRPTESEDEQEDHGGIALRDTSPILESMESGRRL

SEQ ID NO: 2765 - DNA, 426 bp, Sorghum bicolor
atgtcgacctctaataatggaaatgatccaaaggggaaaagtgtgatgactaccatcactaataattctccttgggtgctaatagttgaaaattgccaagttgactactttgttacatcttatctcttaagaggccataatgttcaagtgattgctgttcaaggtcctctgcaagcgttagagctcctgaatgcggaacacaatgtgaagctaattctatctaattattggatgccaaatatgactggatatgacctactgatggagatgaagaaatcacctaagttgagccacctcccagtggtgattacctcatttgacaaaagtcctgaagtagttaagaagtgcttggatggtggagcaaaggactacatcataaagcctatcaagcatgctgatgttcctcgaattctaagcttcatttga

SEQ ID NO: 2766 - protein, 141 aa, Sorghum bicolor
MSTSNNGNDPKGKSVMTTITNNSPWVLIVENCQVDYFVTSYLLRGHNVQVIAVQGPLQALELLNAEHNVKLILSNYWMPNMTGYDLLMEMKKSPKLSHLPVVITSFDKSPEVVKKCLDGGAKDYIIKPIKHADVPRILSFI

SEQ ID NO: 2767 - DNA, 1272 bp, Sorghum bicolor
atggcggtggagaagacgctgcccggcgcgaatgccgggaggaccgtgctcgtcacgggcggggcgggctacatcggcagccacgccgtgctgcagctcctcctcgcgggattccgcgccgtcgtcgtcgacaacctcaacaactcctctgagctcgccgtccgacgcgtcgccgcgctcgcgggggaccactcgcgcaacctctccttccacaagattgatctccgtgacaagggaacgctggaaatggtttttgcttctacaagatttgatgctgttgtccactttgctggattgaaagctgtgggtgaaagtgtacagaagccattactttattatgacaacaacgtcattggcacgataaatcttctagaagttatgtctgctcatggttgcaagaagttggtgttctcatcatcagctgcagtttatggatctcccagaaactcaccttgcacagaagagtttcctctgactccaaacaatccatatggcaaaacaaagcttgttgttgaggatatttgccgtgatatctaccgttcagatcctgaatggaagatcattttacttaggtacttcaatccagttggtgctcatcctagtggatatcttggtgaggacccacgaggaattcccaacaatcttatgccctatgttcagcaagttgcggttggtaggaggccagctctgacagttttaggaaatgactatgcgacaagagatggaactggggtccgagattacatccatgttgttgaccttgctgatggacatattgctgcattacagaagctttttgagaactctagcatagggtgtgaagcatacaaccttggaaccggaagaggtacatctgtgctggagattgttaaagcgttcgagaaggcttctgggaagaaaatccctctgatttttggtgaaagacgccctggtgatgcagagattctcttttcagagactactaaagcagagagggagcttaactggaaagcaaaatatggtattgaagagatgtgtcgcgaccaatggaactgggccagcaagaacccttatggctatggatcgcttgactctaccaagcagaatggccaccaaacaaatggatctgctgactcctccaagcagaatggccaccacacaaatggttcaactgactcacccaagcggaatgaccactatgcctatgggtccgccgactcacccaagcggaatgggcactatgtttatggatcatcagacttcaagcagaatggtaatggtcacctgcgctga

SEQ ID NO: 2768 - protein, 423 aa, Sorghum bicolor
MAVEKTLPGANAGRTVLVTGGAGYIGSHAVLQLLLAGFRAVVVDNLNNSSELAVRRVAALAGDHSRNLSFHKIDLRDKGTLEMVFASTRFDAVVHFAGLKAVGESVQKPLLYYDNNVIGTINLLEVMSAHGCKKLVFSSSAAVYGSPRNSPCTEEFPLTPNNPYGKTKLVVEDICRDIYRSDPEWKIILLRYFNPVGAHPSGYLGEDPRGIPNNLMPYVQQVAVGRRPALTVLGNDYATRDGTGVRDYIHVVDLADGHIAALQKLFENSSIGCEAYNLGTGRGTSVLEIVKAFEKASGKKIPLIFGERRPGDAEILFSETTKAERELNWKAKYGIEEMCRDQWNWASKNPYGYGSLDSTKQNGHQTNGSADSSKQNGHHTNGSTDSPKRNDHYAYGSADSPKRNGHYVYGSSDFKQNGNGHLR

SEQ ID NO: 2769 - DNA, 789 bp, Sorghum bicolor
atgcagctagagaaggggtctctggacctggtgctggtgccatgcggtctggtggtgatgctgagctaccacctcctcctcctctaccgcatcctccggcaccccgccagcacagtgatcggctacgagaaccacaacaagctcacctgggtgcgccgcatggtgcagccgggagcgacccccgacgagacagcgctggcgctgagcgtcatctccagcaacatctcggcgtccaccaacctggcgtcgctgtccatcgcgctgggctccctcatcggcgcctgggtcagcagcaccaccaagatgttcatgacggagctcgtctatggcgaccgcagccaggccacggccaccgtcaagtacatctccctgctggtctgcttcctcgcctccttcacctgcttcatccactccgccaggtactatgtacaggccagcttcctcatcaccacgctcgactccgatgtgccggcgagctacgtgcagcacgccatcatccggggcggcaacttctggtccatgggactccgggcgctctacctcgccaccacgctgctcatgtgggtcttcgggcccatacccatgttcgcctgctccgtgctcatggtggccatcctccacatgctggacaccaactccctgcccctgcaccagcaccagttcacagttaggaaacggcacgagcagagagctctcacctcaaccatgcctacaaggcagcagcagcccagtctgcagaatccaatgctcagcaaccctgtcttgtcacctgttacatttttcagttga

SEQ ID NO: 2770 - protein, 262 aa, Sorghum bicolor
MQLEKGSLDLVLVPCGLVVMLSYHLLLLYRILRHPASTVIGYENHNKLTWVRRMVQPGATPDETALALSVISSNISASTNLASLSIALGSLIGAWVSSTTKMFMTELVYGDRSQATATVKYISLLVCFLASFTCFIHSARYYVQASFLITTLDSDVPASYVQHAIIRGGNFWSMGLRALYLATTLLMWVFGPIPMFACSVLMVAILHMLDTNSLPLHQHQFTVRKRHEQRALTSTMPTRQQQPSLQNPMLSNPVLSPVTFFS

SEQ ID NO: 2771 - DNA, 585 bp, Sorghum bicolor
atggctgcggccgccgcgttcccgtcggcgtgcgccgctggttcccttcctcgtgcaccctccctgacccctgtgcgtcttcttctccccgttccgctctcccccgcgcgctgggaccgctcccgcggctgcagcagccgcctcgttggcgtaggcgccagcagcatccgccgcgcgccaacccttcgacggaacgcctccgcggagacggtggttccctacgtgccgggctccggcaagtacatagcgccggactacctcgtgaggaaggtgtcggccgaggaggtgcaggagctggtgagggggcacaggaaggtgccgctcatcgttgacttctacgcgacctggtgcgggccctgtgttcagatggcgcaggacatcgagatgcttgcagttgagtatgaggacaatgccctgtttgtgaaggtggacacagatgatgaatatgaatttgcaaaagacatgcaggtaagaggacttccaacgctttatttcttcagtccagatcaaaacaaagacgccatacgcactgaggggctaattcctacggatatgatcagaaacatcattgacaacgagttatga

SEQ ID NO: 2772 - protein, 194 aa, Sorghum bicolor
MAAAAAFPSACAAGSLPRAPSLTPVRLLLPVPLSPARWDRSRGCSSRLVGVGASSIRRAPTLRRNASAETVVPYVPGSGKYIAPDYLVRKVSAEEVQELVRGHRKVPLIVDFYATWCGPCVQMAQDIEMLAVEYEDNALFVKVDTDDEYEFAKDMQVRGLPTLYFFSPDQNKDAIRTEGLIPTDMIRNIIDNEL

SEQ ID NO: 2773 - DNA, 1380 bp, Sorghum bicolor
atggcacaccatcgtcgtcttcaccgccagctccaactcgtgtgcctcgtcgccgtcgtgctgacggccgccccagctgcccatgccatcttccatttcgacttccgtttggacagcgacagcccgttcttcggccgctcggcggctgccaggcatgacaattggcgccgcgccgccctcgagagcaacgcccggcaggcgaggaggctcgccaaggccctcgacaagctcagcggggccgcccccggcgcccccgccgccgccgccaccgacatcgcggcggccgacgtgaccatctccccgtacgcccaccagggccacagcctgaccgtgggcgtgggcacgccgccgcagcccagcaaggtgatcctggacctgggcagcgacctcctctggacgcagtgcagcctggttggccccacggcgaagcagctggagcccgtgttcgacgccgccaggtcgtcttccttctccgtcctgccctgcgacagcaagctgtgcgaggccggcacgttcaccaacaagacctgcacggaccgcaagtgcgcgtacgagaatgactacggcatcatgacggccaccggcgtgctcgccactgagacgttcaccttcggggcgcaccacggcgtctccgccaacctcaccttcggctgcggcaagctcgccaatggcaccatagccgaggcgtccggcatcctgggcctgtctccgggccctctgtccatgctgaagcagctggcaatcaccaagttctcctactgcctcacccccttcgccgaccgcaagacgagcccggtgatgttcggcgccatggccgacctgggcaagtacaagacgacggggaaggtgcagacgatcccgctgctgaagaacccggtggaggacatctactactacgtgcccatggtggggatgtcggtcgggagcaagcggctggacgtgccgcaggagaccctggcgataaagcccgacggcaccggcggcacggtgctggactcggcgaccacgctggcgtacctggtggagccggcgttcacggagctgaagaaggcagtgatggaaggcatcaagctgccggtggcgaaccggagcgtcgacgactacccggtgtgcttcgagctgccgcggggcatgtccatggaaggggtgcaggtgccgccgctggtgctgcacttcgacggcgacgcggagatgtcgctgccgcgggacaactacttccaggagccgagccccgggatgatgtgcctggcggtgatgcaggcgccgtttgaaggcgcccccaatgtcatcggcaacgtgcagcagcagaacatgcatgtgctctacgacgtgggcaaccgcaagttctcctatgcgcccaccaaatgtgacagcatctag

SEQ ID NO: 2774 - protein, 459 aa, Sorghum bicolor
MAHHRRLHRQLQLVCLVAVVLTAAPAAHAIFHFDFRLDSDSPFFGRSAAARHDNWRRAALESNARQARRLAKALDKLSGAAPGAPAAAATDIAAADVTISPYAHQGHSLTVGVGTPPQPSKVILDLGSDLLWTQCSLVGPTAKQLEPVFDAARSSSFSVLPCDSKLCEAGTFTNKTCTDRKCAYENDYGIMTATGVLATETFTFGAHHGVSANLTFGCGKLANGTIAEASGILGLSPGPLSMLKQLAITKFSYCLTPFADRKTSPVMFGAMADLGKYKTTGKVQTIPLLKNPVEDIYYYVPMVGMSVGSKRLDVPQETLAIKPDGTGGTVLDSATTLAYLVEPAFTELKKAVMEGIKLPVANRSVDDYPVCFELPRGMSMEGVQVPPLVLHFDGDAEMSLPRDNYFQEPSPGMMCLAVMQAPFEGAPNVIGNVQQQNMHVLYDVGNRKFSYAPTKCDSI

SEQ ID NO: 2775 - DNA, 1554 bp, Sorghum bicolor
atggcggtgaaggtgtgggtgttcgtcgtggcactgatgttcatcggtgtagtagtagtagtagggcttggagctgacgacggcagcagtagggatggcgccggcagccttagccgctgtcgtctgagctcgcccaactaccatggcgctctggcaaaggccatcctgttcttcgaggggcagcggtcggggcggctgccggcgaaccagagggtcaagtggcgcggggactcggcgctcaccgacggccaacccgaaaacgtgaacttgacgggcgggtactacgacgccggagacaacgtgaagttcggtttcccgatggcgttcagcgtcaccctcctgagctggagcgccgtcgagtatcgcgacgaggtggcggcggcgggccagctccggtacctccggtccgccatccagtggggcgccgacttcctcctccgtgcacacacctcgccgaccaccctctacactcaggtcggcgacggcaacgccgaccaccagtgctgggagcggccagaggacatggacacgccgaggacgctgtacaagatcacccagagctcgccggggtccgaggccgccggcgaggcagccgcggcgctcgccgccgcatacctggtgttcagggacgaccgggacaagtccttggccacgcagctcctggccgcctccagatccctcttcgacttcgccaacaattacagaggatcctaccagttgtcctgcccattctactgctcctactcaggctaccaggacgagctccagtgggcgtcggcatggctgtaccgggcaaccaaggacagcaaatacctcgacttcctgcagaacaaccagggcggcagcggaaccgagttcagctgggacaacaagtatcccggagctcagctgcttgcaacacaggagtacttgggtggaaggacagagctggagggctacaagaggggcctggactctttcgtctgcgctgtcatgcccaacagcggcaacacgcagatccacaccacccctggagggcttctctttacccgcgattcagtcaatctgcagtacacaaccactgcagccctgctgctgtcaatctactcaaagaccctgacttctgtaggcgaccaagtagtccagtgcagcgccgcaagtttctctccagatcagatcagttcattcgcaacgtcacaggtggattacatcctgggagacaatccaaagggcatgtcgtacatggtgggcttcagctccaagttcccaaggcggattcaccaccgcggctcctccatcccgtccatcaaggttctccccaggaaggtcacctgcaacgagggcttctcgtcatggttcccgaccagcaacgccaaccctaacaaccatgtcggcgccatcgtcggcggacctgacgggaacgaccagttcagtgacaacagggaggactccacgcactccgagccagcaacgtacatcaacgccgcatttgtgggtgcctgcgctgctgccctcgggcagcagaaccagctcaaggagcctgtggacaacatagccccagtggacatcatctaa

SEQ ID NO: 2776 - protein, 517 aa, Sorghum bicolor
MAVKVWVFVVALMFIGVVVVVGLGADDGSSRDGAGSLSRCRLSSPNYHGALAKAILFFEGQRSGRLPANQRVKWRGDSALTDGQPENVNLTGGYYDAGDNVKFGFPMAFSVTLLSWSAVEYRDEVAAAGQLRYLRSAIQWGADFLLRAHTSPTTLYTQVGDGNADHQCWERPEDMDTPRTLYKITQSSPGSEAAGEAAAALAAAYLVFRDDRDKSLATQLLAASRSLFDFANNYRGSYQLSCPFYCSYSGYQDELQWASAWLYRATKDSKYLDFLQNNQGGSGTEFSWDNKYPGAQLLATQEYLGGRTELEGYKRGLDSFVCAVMPNSGNTQIHTTPGGLLFTRDSVNLQYTTTAALLLSIYSKTLTSVGDQVVQCSAASFSPDQISSFATSQVDYILGDNPKGMSYMVGFSSKFPRRIHHRGSSIPSIKVLPRKVTCNEGFSSWFPTSNANPNNHVGAIVGGPDGNDQFSDNREDSTHSEPATYINAAFVGACAAALGQQNQLKEPVDNIAPVDII

SEQ ID NO: 2777 - DNA, 2694 bp, Sorghum bicolor
atggagtctcgacggagatcgcgtggtcttgcaaggttttccaggcaggtccatgccctcttcctcaagaacctctctttccagaggaggaacgcgaggacgaacgccgcgatcgccgcgttcccggcgctgctctgcgtgctcctcgtcaccatccagcgcgtggtggacagcgagctggagcggcctccgttccggtgcggctgcgtcggcaccgagtgcggcatccagtactccacgcccatccaggcgctcgcctgcgccgtgcccgcgccgccgaggtggccggcgctggtgcaggtgccgcccaccgaggcgcgcgcactgacgcgcctgcacccgcggccgtgcaaggcatccgagaagagctgccccgccaccgtgcttctcaccggacagaaccgccagcttgcccaaggccttggaaacttgctgttcccacctgttcccccacagtacggactcatgcctgctgcttcgaattcttcggactacctggatttgttctcgacagtagttcctggttcaagctctctgccggcacatgtgctcttcattgaaccgggtctcgttccaaatgagaccttgtatctgctccaaccgaagtgcttatcagagtcacgcaatatttcaggacattttgatgggataccaatggaatctggttatgacttcctcgatacaaacaagaggcgcttccatatatatgtttggtacaattccagcttcagcagagataatggacaccattccatgacagttttgcgtgtttcacggttggttaatatggcatccactgcatatctgaactttttaaaaggagaaaatgcagagatgcgcctcgagtttttgaaagaaatgcccaaagctgcagttaaaacgaggctggacttcaccactctcctggatgcactgttctttacctggacagttcagctcctccttccagtaatattgacataccttgtttacgagaagcagcagagactaagactcatgatgaagatgcatgggctgaaggatgcaccctactggttggtatcttacgcctatttcttggccctttcagcagcctacatgatgttcttcatcatctttgggtccattatagggctggttatattcagactaaatagctacatcatacagtctctgttctacttcgtatgtatcaacctacagatcatgtctgcttttctgcttgcaactttcttctcatctgtcaagactgctagtgtgattggttacatgtatgtctttggctctagccttcttggtgaagcgcttttgaagatattcatcgaggatgcaaccttcccaagacattggcttgtaataatggagcttgttcctgggttctccatgtaccgaggaatatacgagctctctgagtatgccgcagcaggaaggaacatgggaaaacctgggatgagatgggtggacttgaacgacccgattaacgggatgaaagatgttttggttctaatgtctatcgaatggataattctccttgttgtagcatttttactggaccatagacctgcatggcagcctctgtttctctttggatttctatcgacaaaacattcatcgccatcacagaaaccaatcaaattgaagaggcaatccaggagggtccatgtttatgcgacaaaacctgatgtgtccctagagcgcaaagtggtgaaacgattattgaaggatatggacatgaggaatatgatcatctgccataatctgaagaaagtgtatcctggaaagaatgggaaccctgacaagcatgctgttaaaggattatcgctagctttgcgcaaagggcagtgttttgggatgttgggtcccaatggggcagggaaaacatccttcatcaacatgatgattggccttgtgaaaccgacttatggtactgcttacatacatggaatggatctgaggacagacatgaacgaaatatacacaaatattggtgtatgtccacagcacgatttgctttgggagcctctgacaggaagagagcatctgatgttctttggtcggatgaagaatctcacaggtgctgctctaacacaggcagtcgaagactccctgaagagcgtaaatctgttccacagtggtttcggcgacaaatctgtaagcaagtacagcgggggcatgaaaagaaggctcagcgttgccatcgcgctcatcggcaatcctaaggttgtttacatggacgagccgagcactgggctcgactcaaggtcgaggaacgatctgtggaacatcatcaagcgagcaaagaaagactgcaccatcattcttaccacacattccatggaggaggcagaggagctgtgcgatcgcatcggcatcttcatcaacggcaacttccagtgcattggaactcccaaggagctgaaggtgaggtacggcggcacccggatcctgacgatcacgacctcgccggagcacgaggaggcagtggagctgatcgtgagccggctgtcgcccggctacaccaggatctacagcgtgtccgggacgcagaagttcgcgctgccccggcgggaggtggggctgggctgcgtcttcggcgccgtggaggtggcgcggcgagcgttcccggtgctcgggtggggggtggcggacgccacgctggaggacgtcttcgtcagggtggccaaggaggcccgggcgttccacgttctctcatag

SEQ ID NO: 2778 - protein, 897 aa, Sorghum bicolor
MESRRRSRGLARFSRQVHALFLKNLSFQRRNARTNAAIAAFPALLCVLLVTIQRVVDSELERPPFRCGCVGTECGIQYSTPIQALACAVPAPPRWPALVQVPPTEARALTRLHPRPCKASEKSCPATVLLTGQNRQLAQGLGNLLFPPVPPQYGLMPAASNSSDYLDLFSTVVPGSSSLPAHVLFIEPGLVPNETLYLLQPKCLSESRNISGHFDGIPMESGYDFLDTNKRRFHIYVWYNSSFSRDNGHHSMTVLRVSRLVNMASTAYLNFLKGENAEMRLEFLKEMPKAAVKTRLDFTTLLDALFFTWTVQLLLPVILTYLVYEKQQRLRLMMKMHGLKDAPYWLVSYAYFLALSAAYMMFFIIFGSIIGLVIFRLNSYIIQSLFYFVCINLQIMSAFLLATFFSSVKTASVIGYMYVFGSSLLGEALLKIFIEDATFPRHWLVIMELVPGFSMYRGIYELSEYAAAGRNMGKPGMRWVDLNDPINGMKDVLVLMSIEWIILLVVAFLLDHRPAWQPLFLFGFLSTKHSSPSQKPIKLKRQSRRVHVYATKPDVSLERKVVKRLLKDMDMRNMIICHNLKKVYPGKNGNPDKHAVKGLSLALRKGQCFGMLGPNGAGKTSFINMMIGLVKPTYGTAYIHGMDLRTDMNEIYTNIGVCPQHDLLWEPLTGREHLMFFGRMKNLTGAALTQAVEDSLKSVNLFHSGFGDKSVSKYSGGMKRRLSVAIALIGNPKVVYMDEPSTGLDSRSRNDLWNIIKRAKKDCTIILTTHSMEEAEELCDRIGIFINGNFQCIGTPKELKVRYGGTRILTITTSPEHEEAVELIVSRLSPGYTRIYSVSGTQKFALPRREVGLGCVFGAVEVARRAFPVLGWGVADATLEDVFVRVAKEARAFHVLS

SEQ ID NO: 2779 - DNA, 702 bp, Sorghum bicolor
atggggctcgagatggaggtcatgtctgaggctgctgctcctacgacggctgttgtgcctgcggcggcggcgagggagccgggggtggatgtggatatttacccgctcacacgctactacttcggcgccagggacgccgccgccgccgtgccccgcggcctggagaccgccgctgaccgcgcgctacggctcaaggcaaacttcgcggcgcgcgggctccgcaccagcgtccatggcgtcctcctggtggagctgttcgatcacccgcacctgctgctgctgcaggtccggaactcctcctttctgctccccggaggccgcctcaggcctggcgaggaagaggtccaaggcctcaagcgcaaactctccagcaagctctcctttgtcgatgcagatgatgatcagaccattgaagaagaggatgactggcagattggagagtgcatcgggatgtggtggagatctgaatttgaggccatcccatttccatacatgcctccaagcttccgtgcaccgaaggaatgcatcaagctgttcctggtcaggctgccgatgtctcggcagttcatcgtgcccaggaacatgaagctcctggccgtgcctttgtcccaggttcatggcaatgctcaggtttacggtccaattatatctggcattccgaatctactgtccaagttctccttcaacgtcatcagtgactga

SEQ ID NO: 2780 - protein, 233 aa, Sorghum bicolor
MGLEMEVMSEAAAPTTAVVPAAAAREPGVDVDIYPLTRYYFGARDAAAAVPRGLETAADRALRLKANFAARGLRTSVHGVLLVELFDHPHLLLLQVRNSSFLLPGGRLRPGEEEVQGLKRKLSSKLSFVDADDDQTIEEEDDWQIGECIGMWWRSEFEAIPFPYMPPSFRAPKECIKLFLVRLPMSRQFIVPRNMKLLAVPLSQVHGNAQVYGPIISGIPNLLSKFSFNVISD

SEQ ID NO: 2781 - DNA, 1518 bp, Sorghum bicolor
gatgctcgaagcaaagttaggaagctgctccagttgtaccgggtgacttgccaaaagcttacacaagttgaggtacaaggtaatcccatagttggacggatttaccttgaagcagctaaaatagtaaagaaagaccctatctatgcaaagcttggggccattgtgggaaatattcctggtgttgaagttggcgatgaattttattatagaattgagttagcaatagttggtctgcatcgcctgcatcaaggaggtattgacacttctaaggtgaatggtgttcccattgctataagtgtcgttgcctccggaggctatcgtgatgaattgtcgagctcaggtgaactaatatacacaggctctggagggaaggctgggggtaataaagatggagacgatcaaaagcttgagtggggtaatcttgccttgaagaattgcattgagaccaagaccccggttcgagtgattcatgggttcaaaggtcaaaacagaagtgaatttggtaaggaaacttcgacatttacatatgatggattgtatgaggtggtggaatgttggcgagaaggcccaaaaggagggatggtcttcaagtacaagttatggaggattgcagggcaaccaaaattaaccctacatgtggtcaaggcaattaggaagtctaaaagtcgtgaagggctttgtttgcctgatatatctcaaggaagcgagaggatacccatatgtgtcatcaacacagttgatgacatgaggctagcaccacttaaatacatcacgaaactcacatatccaacttggtgtgaaattgtacctcaaaatggttgcaactgcacaaaccactgctcagacactattagatgttcttgtgcatggaagaatggaggggaaatcccgttcaattgcgataatgctattgtcaaggccaagcgtctcatatatgagtgtggtccatggtgcaggtgcccgccaacttgctacaatagggtgagtcagcatggtgtcaaaattccacttgaaatattcaagacaggcaagacaggttggggtgtaagatctctcagttctatatcttcgggcagtttcatatgcgagtatactggtgagctcttgaagggtgaagaagctgaaaatagacagaatgacgaatatctatttgatattggtagaaactactatgatgaagaactttgggaggggattccaccagtggttgatgtacagtcttctacctcgtcctccgggacaatgaaaggcttcacaatagatggagctgagtgcagcaacgtgggaagatttatcaaccatagctgttcaccaaacctatatgcccaaaatgttctctgggaccatggtaacatgaagatgccacatattatgctttttgctgttgagaatatcccaccactgcaggagctgacctaccattacaattataaggtaggctcagtccatgacgagaatggtaacgagaaggttaaacattgctattgtggtgcctcggcttgcaggggcaggctctac

SEQ ID NO: 2782 - protein, 506 aa, Sorghum bicolor
DARSKVRKLLQLYRVTCQKLTQVEVQGNPIVGRIYLEAAKIVKKDPIYAKLGAIVGNIPGVEVGDEFYYRIELAIVGLHRLHQGGIDTSKVNGVPIAISVVASGGYRDELSSSGELIYTGSGGKAGGNKDGDDQKLEWGNLALKNCIETKTPVRVIHGFKGQNRSEFGKETSTFTYDGLYEVVECWREGPKGGMVFKYKLWRIAGQPKLTLHVVKAIRKSKSREGLCLPDISQGSERIPICVINTVDDMRLAPLKYITKLTYPTWCEIVPQNGCNCTNHCSDTIRCSCAWKNGGEIPFNCDNAIVKAKRLIYECGPWCRCPPTCYNRVSQHGVKIPLEIFKTGKTGWGVRSLSSISSGSFICEYTGELLKGEEAENRQNDEYLFDIGRNYYDEELWEGIPPVVDVQSSTSSSGTMKGFTIDGAECSNVGRFINHSCSPNLYAQNVLWDHGNMKMPHIMLFAVENIPPLQELTYHYNYKVGSVHDENGNEKVKHCYCGASACRGRLY

SEQ ID NO: 2783 - DNA, 528 bp, Sorghum bicolor
atggccatgtcgctgagccgcatctcccactggatatggccggggagcagaactagaaaccgcagaggccgcgagccaccggcggtgagcacggccgtgacgaaaggcctcttcccggactccccgtccgggttccgggagccagaccccgtcgggcgcccgggctccggcgcggcacggccgcgtaagggcaagatccgccggcgcggcgaccgcggggaggatagggtcgacggcgagcgtggcatggttatcgtacagtccgacggcgacggctgcctgtctgactcggactcggacggctccgactggtcaatcggctggctcgagccgctcgcgccggagttgcagagcgacgcggactccgagggcagcttcgccgtcctcgtgccgtgctatcgacacagccgcgctgaccggcctgcccgtcctgatggtaggttccctggtcctggtggtgtcgcccacggcggagtttcagataacaagaattttgtggagcaatgggtgtcttcccttcggaactga

SEQ ID NO: 2784 - protein, 175 aa, Sorghum bicolor
MAMSLSRISHWIWPGSRTRNRRGREPPAVSTAVTKGLFPDSPSGFREPDPVGRPGSGAARPRKGKIRRRGDRGEDRVDGERGMVIVQSDGDGCLSDSDSDGSDWSIGWLEPLAPELQSDADSEGSFAVLVPCYRHSRADRPARPDGRFPGPGGVAHGGVSDNKNFVEQWVSSLRN

SEQ ID NO: 2785 - DNA, 1758 bp, Sorghum bicolor
atgctcagccgactcgccgcggcgcggcggcagcagctgctgctacccgcgcgcggcgccccggccgtcgcgttcgcgtaccgctcctcctcgacagcggcggccgcggtccacggggccgcggcgcccgcgcccgcctccgcctccgtgctcccggacacgctcgacaggggctccgacgcctaccagcgcaacgccgccgccgtcggcgggctgctctccgacctgcgcgcccgcgtctcccaggtgctgcgcggtggaggcgtcgaggcggtgaggcggaacgcggcgcgggggaagctgctcccgcgggaccgcatcgaccggctgctcgaccccggcgcgtccttcctcgagctctcgcagcttgcaggctcagatgtttatggtgaagcattaccatccgcaggtataataactggcataggacctgttcatggacgattatgtatgtttgtggccaatgacccgaccactaagggtggcacatactatcctcttactgtcaaaaagcatctgcgggcacaggaaatagcttccgagtgcaaactgccttgcatctatctcgttgacagcggaggtgctaatctccccaggcaggctgatgttttccctgaccgtgaaaattttggccgaatattctacaatcaagctaagatgtcttcagacggtatccctcagattgcattagtcttaggatcttgcactgctggtggggcttatattcctgcaatggcggatgagagtgttatagttaagggaaatggaactatatttctagcgggtccgccacttgtaaaggctgctacaggagaggagatatctgctgaggaccttggtggagcatcagtacattgcaaggtatcaggagtctcagatcattttgcacaagatgaacttcatgggcttgagttggggcgaaacattgtgaagaacctgcacttagctgctaaaggaacaaatattcaaagttctgcttgtggttaccaagagccattgtacgatgtagaggaacttcgctcaattgcaccagctgatctgaaacagtcctttgacattcgttcagtaatagcccgtattgttgatggaagtgaatttgatgagttcaaaaaattgtatggaacaacactagtgactggttttgcaaggatatgcgggcaaccagttggaattattggaaacaatggcattttgtttactgagtcagcgctaaagggctcccacttcattgaattgtgtgctcagcggcatattcctttgattttccttcaaaacattactgggttcatggtcgggtcgaagtctgaagctagtggaattgccaaagctggagcaaagatggtcatggcagtttcctgtgctaaggttcctaaaattacaataattgttggtggaagttttggtgctgggaactatggaatgtgcgggcgtgcatatagcccaaactttttatttctttggccaactgctaggatatctgttatgggtggcatccaggcagctggtgtcctcgctcaaattgaaaagaacaacaaaaagagacaaggagtggagtggagcaaggacgaggaagaagccttcaaggcaaaagtggtggaggcttacgacagagaaggaagcccgtactattccactgctagactatgggacgacggggtcatcgaccctgctgacaccaggcgggttctcagcctctgcctctctgcttccgccaagccggttccggaagatacaaaatacggtgtattccggatgtaa

SEQ ID NO: 2786 - protein, 585 aa, Sorghum bicolor
MLSRLAAARRQQLLLPARGAPAVAFAYRSSSTAAAAVHGAAAPAPASASVLPDTLDRGSDAYQRNAAAVGGLLSDLRARVSQVLRGGGVEAVRRNAARGKLLPRDRIDRLLDPGASFLELSQLAGSDVYGEALPSAGIITGIGPVHGRLCMFVANDPTTKGGTYYPLTVKKHLRAQEIASECKLPCIYLVDSGGANLPRQADVFPDRENFGRIFYNQAKMSSDGIPQIALVLGSCTAGGAYIPAMADESVIVKGNGTIFLAGPPLVKAATGEEISAEDLGGASVHCKVSGVSDHFAQDELHGLELGRNIVKNLHLAAKGTNIQSSACGYQEPLYDVEELRSIAPADLKQSFDIRSVIARIVDGSEFDEFKKLYGTTLVTGFARICGQPVGIIGNNGILFTESALKGSHFIELCAQRHIPLIFLQNITGFMVGSKSEASGIAKAGAKMVMAVSCAKVPKITIIVGGSFGAGNYGMCGRAYSPNFLFLWPTARISVMGGIQAAGVLAQIEKNNKKRQGVEWSKDEEEAFKAKVVEAYDREGSPYYSTARLWDDGVIDPADTRRVLSLCLSASAKPVPEDTKYGVFRM

SEQ ID NO: 2787 - DNA, 1587 bp, Sorghum bicolor
atggcattgggcgtggtcggcctcgtgctcgcattgccactcttgttcttgctgacaagggcggcatggatcactgtctcctgctactacctcacgccggcgaggatccggacaatcctggccggccagggcgtgcacggcccgccgccacgcctcctcgtcgggaacctccgcgacgtctctgccctcgtcgccgaggccaccgccggtgacatgagctccctgagccacgacatcgtcggccgccttcttccccattatgtcctgtggtccaagatgtacgggaggctgttcgtgtactggtacgggagcgagccccgggtgtgcgtgacggacgcgggcatggtgcgggagctgctgtcgtcgaggcacgcgcacgtcaccggcaagtcgtggctgcagcggcagggcgccaagcacttcatcggccgcggcctgatcatggccaacggcgcgacgtggtcgcaccagcgccacgtggtggcgccggcgttcatggccgacaggctccgtggcagggtggggcacatggcggagtgcgcccggcagacggcgcgcgcgctgcgtgaggcggtggcgcgcgccggcaacgaggtggaggtgggcgcgcacatggcgaggctcgccggcgacatcatcgcccgcaccgagttcgacaccagctacgacaccgggaagcgcatcttcgacctcatcgaggagctgcagcggctgacggcgcgctccagccgccacctctgggtccctggcagccagtatttaccaagcaaatacaggcgggaaataaagcggttgaacggggagctggagcagctgctcaaggagtccatcgagcgcagccgcgagatcgccgacgagggccggacgccgtcgtcggcgtgcggcatggggctcctcggtatgctgctggccgagatggagaagaacaagaacgacggcgagctggggtacgacgcccagatgatgatcgacgagtgcaagacgttcttcttcgccgggcacgagacgtcggcgctgctcctcacctgggccatcatgctgctcgccaccaacccttcgtggcaggacaaggcgcgcgccgaggtcgcgggcgtctgcggcggcgcaccgcccaccgccgaccacctccccaagctcaccgtgctgcagatggtgatcaacgagacgctccggctgtacccgccggcgacgctgctgccgcggatggcgttcgaggacatcacgctcggctccggccccggcgacgagctgcgcgtgcccaagggcgcgtcgctgtggatccccttgctggccatccaccacgacgaggccgtgtggggagcggacgcgcacgagttcaggccggaccggttcgcgccggggaggccccggccgtgggcggggcggttcctgccgttcgcgtcggggccccgcaactgcgtcggccaggcgtacgccatggtcgaggccaaggtcgtgctggccgtgatgctcgccagcttccgcttcggcatctccgacgagtaccgccacgcgcccgtcaacgtgctcacgctccggccgcgccacggcgtgcccgtgcgcctgctgccgttgacgccgcagtag

SEQ ID NO: 2788 - protein, 528 aa, Sorghum bicolor
MALGVVGLVLALPLLFLLTRAAWITVSCYYLTPARIRTILAGQGVHGPPPRLLVGNLRDVSALVAEATAGDMSSLSHDIVGRLLPHYVLWSKMYGRLFVYWYGSEPRVCVTDAGMVRELLSSRHAHVTGKSWLQRQGAKHFIGRGLIMANGATWSHQRHVVAPAFMADRLRGRVGHMAECARQTARALREAVARAGNEVEVGAHMARLAGDIIARTEFDTSYDTGKRIFDLIEELQRLTARSSRHLWVPGSQYLPSKYRREIKRLNGELEQLLKESIERSREIADEGRTPSSACGMGLLGMLLAEMEKNKNDGELGYDAQMMIDECKTFFFAGHETSALLLTWAIMLLATNPSWQDKARAEVAGVCGGAPPTADHLPKLTVLQMVINETLRLYPPATLLPRMAFEDITLGSGPGDELRVPKGASLWIPLLAIHHDEAVWGADAHEFRPDRFAPGRPRPWAGRFLPFASGPRNCVGQAYAMVEAKVVLAVMLASFRFGISDEYRHAPVNVLTLRPRHGVPVRLLPLTPQ

SEQ ID NO: 2789 - DNA, 2727 bp, Sorghum bicolor
atgggcctggcggtgaagcgcgtcttcctcctcaccgcctcccttgtcctcctcctgctcagcttcgagctcctgctgcagaacgaggtcctgctccgacgtgtgagccatggctgcaacgaggtcagtgccgtggcagtgacccgtgacgccggttctggtttcctctccaggttcaggatgctggcggtaagcctggatcatcatcatcggtcgccgccgcgacacccacaccggagccatcaaaagagttctgcagctccagctccagcaccggcgattcaggttcatgaagctcttcccactccgactccgacgctggctgctcccgctcctgctcctcttccccatgagagtcatacaaggatgccactcagaaaccacagccgcattgccccagcgaggagtgtggcacgcaaactgggaggtggaggaggtcacgccaggctcccgacacccaccattgtcggcctggctgtggctggagcatgtctgcttgttctcggggttgcagtggcagcagcagcctcactcaggagatcaaggaagcttcagaagaagcctttcaagctgttttcccatggatcaagagctcacaggtcaacttgcgctaccatcaaggttagttcgcatcccagcgcagatctgctttacccgggttctgctgtgcaatgccaggaggactatgcgatcatcaaagaatcttcagagtctaagagcttatcagttcttctcactccatcaataagtagtgcagagttgatcataagcgattatgctgtgaaaaccagcaccagcttgcagtctgatgaagctgactctttccgttcattgccctgctctcattcatcaggtggctccattacagagttgccgctgccaaattgtgataaatctattgcagatccttctccatcttctcgacatagggatgattcaccttctagttcatcatatcaatcactatcaccagattgtagatctcccttctgcccaaagactccacctttcacagcttctgatcaagcccatgtgcagaagaccttttgccatcttccagaaaatccagctgaggagaaaactgaagtaataaaccaccaaaagactgcaaaagctaccaacaattcaggatccatgggacatcctgaagctccaaaagtagagcaggtcaatgcaaagctcaggtatctctcgtcaggttgcaattctaattcctgtgctacagagatcacatcctccgaaacaaactcagcattcagggtgtcaaatacagacattaatttggatccaaaggaatcaatacggaactcagctgaagaagccaagctaaaaccatctggagcaacaagtataccaaaaacaccaccaccccctccaccaccaatcaaacctacttcaagtcttaaagggcagaactctggccagcctccattgccacctccattaccgattcagttacaagttggcaaagatgggttaccacttccaaggttgaaacctctgcattgggacaaagtaagggcagctccaaaccgctcaatggtgtggaatgacattcagtcaagttccttcgagtttgaatttgatgaacagatgatcaagtcattatttgcatacaactttcaagggcaagcaaaaaatgaggaccccaagagcaagactttagctaccagcaaacatgtcattgagcaccacaaacttcaaaatactactatactcttgaagaccttaaatgctagcactgaacaagtctgcagttctataacagaaggtactggactgtccacgcaacaactagaagcgttggtcaagatgaaaccatccgaggaggaggagaaaaagctacttgattatgatggggacatcaacatgttggatccagcagagaactttgtcaaggtgctactgacaataccaatgtcattttcaagaattgaggcaatgctgtacaaggaaacttttgatgatgaagttgcccatctcaggatgtcctttgcactgattaaaggagcctgcagtgaactcaggtccagcaaattgtttttaagattacttgaagcagtactcaagaccggaaacagaatgaatgttggaactataagaggaggggcaagtgctttcagacttgacgcactgctgaaactgtcagatatacgtggagctgacgggaagacaaccctcctgcattttgttgtccaagagatggagcgattacaaggatcaaaggcttcagataagctcagtggaacttctggaccttgtcaagccacactggcagaaagagaagagtatccagaaataggtacagaatttgtttcagagttaagtaatgagcttggcaatgtcaagaaggtagcaagtatagatttagataccttgaaaagctcaatctcaaatctatcacatggactggctcaactgataaggcttgtcgggacggagcttaccagcaatgacaggaaccagaacttcctgcagtgcatgagatcattccaaactcatgcagagaataccatgcaggaactcaaggttgacgaagccgaggtcctacagcaggtcagagaactcacagagtattatcatggagaggttggcaagaatgagtccaacctcctccatatatttgtcatcatgagagattttcttggtttgctagatagggtgtgccgagacatgaggggttcaaagcacatccaacctccgaacatagtctttccgctcaggtga

SEQ ID NO: 2790 - protein, 908 aa, Sorghum bicolor
MGLAVKRVFLLTASLVLLLLSFELLLQNEVLLRRVSHGCNEVSAVAVTRDAGSGFLSRFRMLAVSLDHHHRSPPRHPHRSHQKSSAAPAPAPAIQVHEALPTPTPTLAAPAPAPLPHESHTRMPLRNHSRIAPARSVARKLGGGGGHARLPTPTIVGLAVAGACLLVLGVAVAAAASLRRSRKLQKKPFKLFSHGSRAHRSTCATIKVSSHPSADLLYPGSAVQCQEDYAIIKESSESKSLSVLLTPSISSAELIISDYAVKTSTSLQSDEADSFRSLPCSHSSGGSITELPLPNCDKSIADPSPSSRHRDDSPSSSSYQSLSPDCRSPFCPKTPPFTASDQAHVQKTFCHLPENPAEEKTEVINHQKTAKATNNSGSMGHPEAPKVEQVNAKLRYLSSGCNSNSCATEITSSETNSAFRVSNTDINLDPKESIRNSAEEAKLKPSGATSIPKTPPPPPPPIKPTSSLKGQNSGQPPLPPPLPIQLQVGKDGLPLPRLKPLHWDKVRAAPNRSMVWNDIQSSSFEFEFDEQMIKSLFAYNFQGQAKNEDPKSKTLATSKHVIEHHKLQNTTILLKTLNASTEQVCSSITEGTGLSTQQLEALVKMKPSEEEEKKLLDYDGDINMLDPAENFVKVLLTIPMSFSRIEAMLYKETFDDEVAHLRMSFALIKGACSELRSSKLFLRLLEAVLKTGNRMNVGTIRGGASAFRLDALLKLSDIRGADGKTTLLHFVVQEMERLQGSKASDKLSGTSGPCQATLAEREEYPEIGTEFVSELSNELGNVKKVASIDLDTLKSSISNLSHGLAQLIRLVGTELTSNDRNQNFLQCMRSFQTHAENTMQELKVDEAEVLQQVRELTEYYHGEVGKNESNLLHIFVIMRDFLGLLDRVCRDMRGSKHIQPPNIVFPLR

SEQ ID NO: 2791 - DNA, 441 bp, Sorghum bicolor
atgaacatcatgctctggcaaagggaggcaggaagcttgaggcagcaactgcataacttgcaagagcaccatcgacagttgttgggtcagcagctttctggcctggacgtgagagatttgcagaatttagagaataagctggagatgagcctaagaaatattcgtctgaagaaggaccaacttatttttgatcagattcaagaattaagcaagaagggaagcctcatgcaccaggacaacatagaactatacaacaaagtcaaccttcttcatcaagagaatattgaattacggaaaaaggtgtatggacaaggagtaaatgagcatccaacaagtactacagttagacatagtattctgaatacagagaatgaagatgttccgatcaatcttgagctgagtatgcaaagggacaggtcagaaacaccaagtatagggtga

SEQ ID NO: 2792 - protein, 146 aa, Sorghum bicolor
MNIMLWQREAGSLRQQLHNLQEHHRQLLGQQLSGLDVRDLQNLENKLEMSLRNIRLKKDQLIFDQIQELSKKGSLMHQDNIELYNKVNLLHQENIELRKKVYGQGVNEHPTSTTVRHSILNTENEDVPINLELSMQRDRSETPSIG

SEQ ID NO: 2793 - DNA, 774 bp, Sorghum bicolor
atgccgtcgaccgcgatgtcttgggacgggtacggcgggcagatcttccccgccgacatgtcgtcgttccaccaccaggacaccctggaggccgtgttccggcagcctgagacgacggcgcccctgcaggcgccggcagcagcgggggagatggagctgctgctgaggaacgggtcgcccgtaccggtggtggatgccggcgtccatgccgcggccgcaccgcggaagcggccgttcaggacggatcggcacagcaagatccgcacggcgcagggcgtgcgcgaccgccggatgcggctgtcggtcggggtcgcgcgagagttcttcgcgctgcaggaccggcttgggttcgacaaggccagcaagacggtgaactggctcctcacccagtccaagccggccatcgaccgcctcgtcgacgccgccgagccggcggtggctctagtctcaggaggaccaccgacggtggtgaaggggagaggggaggggaactcctcaagcacttgctgtttgacggtggactcgagggaggaggcgacggagaaggcaagaagcagaggcggcggcggcggcggtaccggtggtcctgatgggccaccggcgctcatggaagaacacggccgcggtgagctgggctggatcatgacggaggccacagcggcagcggcggcagcaacggcgcagccgcagcagatggacgggctggagtactactaccagtattgcctgcagctcgaggagatgatgagatgcaacggaggaatgccaaggtga

SEQ ID NO: 2794 - protein, 257 aa, Sorghum bicolor
MPSTAMSWDGYGGQIFPADMSSFHHQDTLEAVFRQPETTAPLQAPAAAGEMELLLRNGSPVPVVDAGVHAAAAPRKRPFRTDRHSKIRTAQGVRDRRMRLSVGVAREFFALQDRLGFDKASKTVNWLLTQSKPAIDRLVDAAEPAVALVSGGPPTVVKGRGEGNSSSTCCLTVDSREEATEKARSRGGGGGGTGGPDGPPALMEEHGRGELGWIMTEATAAAAAATAQPQQMDGLEYYYQYCLQLEEMMRCNGGMPR

SEQ ID NO: 2795 - DNA, 480 bp, Sorghum bicolor
atggaggccgcggtgcccagccgtgttgcgctctccgcggcgagccgcctcccgaatcgccacgccgtggcaggagatagatcttttgtttacaagggaagatgccagagtcttgcaattcctatggcgctgtcagcagctgcaccaggcaaagggggtgtgcttgatcggccagtagagaaaactactcctggtcgtcagtctgaatttgatgtgaagaaatcccgcaaaatgtcgcctccataccgtgtcattctgcacaatgacaactacaacaggcgcgagtacgttgtccaggtcctgatgaaagtgatccctgggatgaccgtcgacaacgctgtaaacataatgcaggaggcgcatgtgaatgggctgtcagttgtgattgtctgttcccagtccgaggctgaggagcactgcacgtcgctcaggggcaacggcctccgaagctcaatcgagcctgcgagtggtggctgctga

SEQ ID NO: 2796 - protein, 159 aa, Sorghum bicolor
MEAAVPSRVALSAASRLPNRHAVAGDRSFVYKGRCQSLAIPMALSAAAPGKGGVLDRPVEKTTPGRQSEFDVKKSRKMSPPYRVILHNDNYNRREYVVQVLMKVIPGMTVDNAVNIMQEAHVNGLSVVIVCSQSEAEEHCTSLRGNGLRSSIEPASGGC

SEQ ID NO: 2797 - DNA, 1581 bp, Sorghum bicolor
atgagccgccctaacgcccgcggcgagcccaaggtacaaaccctagctctcgctcctccctccccagccgcccccgccaagatgggcgcccatcggcgacaacccagctcccgccgccgccttgtcggcgccctctcactcctcgccgcgtccgcgctggcccttctcctcctagcatcccgcccggtgcccccgacctacggcgtcatcatcgacgccggcagcacggggagccgcgtccacgtcatcgcctaccgcgccacggcggggctcccgcagctggactgggcacgcacggcctcgatgaaggcgaccccggggctatcgtccttcgcggcggacccacgcggcgcggggctgtctctggcgccgctagtagagtttgcccggcgacgtgtgccgcgggagagctgggggcaaaccgaggtgcggctcatggccactgccgggctgcgtctgcttgattccgcagtggccgagtccgtccttcagtcttgcagggaagtgcttcggggctcgggcttccaatttcaggacgaatgggccaccgtgatctcaggggctgaggaagggatatacgcatgggttgcagcaaattatgctttggggactcttggcagtgatccaaaagacaccactgggattattgaacttggtggggcttctgttcaggtgacacttgttaccagtgaacctgtgcctccggagttctctcatgtgctcaagtttggtgatgtctcatataacctgtacagccacagctttttgcagcttggtctgaatgtagcatatgaatcattccatgacttgctcagctcacctggccttagcttaatggccacacatttgatttctcaagctaagtacaaagatccttgcactccaaggggatttacacacatagcaggatcagttaaacttcctgttagtgttcttgagccgaaggttgagtacagaccgtttgctcatgctgtggggaacttttctgagtgtagatctgcagcgttaacactactgcaaaaaggaaaggagggatgtacatatcatgaatgtcgccttggagcagcatttgtacctgagttggaagggaaatttttagcgacagaaaatttttaccatacttcaaagttctttggtctgcactcaaagtccttcctttctgatctgatggcggctggagagaaattttgccatggggactggtcaaagattaagaagaagtacagctcttttgatgacggacagctgcttcttttttgcttttcctcagcatatattattgctctgctacatgatacacttaaaatgccactggatcataagaggattgatgttgtaaatcaaatccatggcgtgcctgttgactgggcattgggtgctttcattgtgcagacgacgatgaaccgaacagacattctccatcctaaggtggagaaggcctcggctgaggacgatctacgacatggagaaaggcaggtacatcataacaagggtcagccgatgagtcgcacacatcagcgttgggagtgggtggacttcctgcagcggagcactattgaccatgtatgtagattttcctaa

SEQ ID NO: 2798 - protein, 526 aa, Sorghum bicolor
MSRPNARGEPKVQTLALAPPSPAAPAKMGAHRRQPSSRRRLVGALSLLAASALALLLLASRPVPPTYGVIIDAGSTGSRVHVIAYRATAGLPQLDWARTASMKATPGLSSFAADPRGAGLSLAPLVEFARRRVPRESWGQTEVRLMATAGLRLLDSAVAESVLQSCREVLRGSGFQFQDEWATVISGAEEGIYAWVAANYALGTLGSDPKDTTGIIELGGASVQVTLVTSEPVPPEFSHVLKFGDVSYNLYSHSFLQLGLNVAYESFHDLLSSPGLSLMATHLISQAKYKDPCTPRGFTHIAGSVKLPVSVLEPKVEYRPFAHAVGNFSECRSAALTLLQKGKEGCTYHECRLGAAFVPELEGKFLATENFYHTSKFFGLHSKSFLSDLMAAGEKFCHGDWSKIKKKYSSFDDGQLLLFCFSSAYIIALLHDTLKMPLDHKRIDVVNQIHGVPVDWALGAFIVQTTMNRTDILHPKVEKASAEDDLRHGERQVHHNKGQPMSRTHQRWEWVDFLQRSTIDHVCRFS

SEQ ID NO: 2799 - DNA, 1155 bp, Sorghum bicolor
atggaggagaggaatgacatcaacatggagaagtcagatgagatactcatgccgggtttccggttccatcccaccgacgaagagctggttagtttctacctcaagaggaagatccagcaaaagcctatctccattgagcttatcaggcagctggacatctacaagtttgacccatgggatctcccaaagcttgcgagcaccggtgagaaggagtggtacttctactgcccaagggatcggaaataccgcaacagtgtaaggccgaacagagtcacggcagccggtttctggaaggccacagggacagacaggccaatctactcatctgagggcaccaagtgcataggcctgaagaagtcccttgtgttctacaaagggagagctgcaagagggatgaaaactgactggatgatgcatgagtttaggctcccttcgctcaccgatccctcgctccccaagcgcccgatcgacaagaccattccactcaatgactcctggactatctgtaggatcttcaagaaaaccagttccatggcgcaacgagcgctgtcccatacctgggggcctccactgcctggggcaacagaggcagacatgttcaccgcgttgcagtcagtgcaagcttcagaatttgctcttgagagctcactgcaagttgcaccgcttgcacctgcaggccagttcaccagcaggcatggtcagcaccaccaccagcagaagggtaacaacaacccatctctggacggctcctcatgcaagctcatcaacttcaacaacagcagcccatccgaggaacaccataacttcccaatcaccttccctttcgaagtgcaagaggcaccgcagaaggctgcagctgcggcggcgccaatcttcttcggcgcgcatcctgctcatcacctcagtggattcgtggtcgattcttctgccgatgtcaatggcggcggcatcggtggcaggagtcaggactcctcgtccaccaggaagcctagcaatggcttcagcactaacagcagtgactggggggaaactgcagggagaatcaacttcccttttgatctgggtgcagattcttcagaggagtggagatgcaacataccctgggagtccttcctgactagcccagctgctctccagactgagctgccacactag

SEQ ID NO: 2800 - protein, 384 aa, Sorghum bicolor
MEERNDINMEKSDEILMPGFRFHPTDEELVSFYLKRKIQQKPISIELIRQLDIYKFDPWDLPKLASTGEKEWYFYCPRDRKYRNSVRPNRVTAAGFWKATGTDRPIYSSEGTKCIGLKKSLVFYKGRAARGMKTDWMMHEFRLPSLTDPSLPKRPIDKTIPLNDSWTICRIFKKTSSMAQRALSHTWGPPLPGATEADMFTALQSVQASEFALESSLQVAPLAPAGQFTSRHGQHHHQQKGNNNPSLDGSSCKLINFNNSSPSEEHHNFPITFPFEVQEAPQKAAAAAAPIFFGAHPAHHLSGFVVDSSADVNGGGIGGRSQDSSSTRKPSNGFSTNSSDWGETAGRINFPFDLGADSSEEWRCNIPWESFLTSPAALQTELPH

SEQ ID NO: 2801 - DNA, 1497 bp, Sorghum bicolor
atggcgctggcggggacgggggtgttcgcggagatcctggacggcgaggtgtacaggtactacgccgacggcgagtggcgcagctccgcctccggcaagtccgtcgccatcgtcaaccccaccacccgcaagacgcagtacagggtgcaagcatgcacccaggaggaggtgaacaaggtgatggacgcggccaaggtcgcgcagaaggcgtgggcccggacaccgctgtggaagcgcgcggagctcctccacaaggcggctgcgatcctgaaggagcacaaggcacccatcgccgagtgccttgtcaaggagatagccaagccggccaaggatgctgtttctgaggttgtgcggtctggggatttgatttcgtatacagctgaggagggtgtgcggatactgggggagggcaagctgcttgtttctgatagcttccctggtaatgagcggaacaagtactgtctcagctccaagataccccttggagtagttttggcaatccctccattcaactatcctgtcaacttagcggtttctaagattggcccagcactaattgcgggcaattctcttgtgctcaagcctccaactcagggtgctgtggctgcacttcatatggtacactgcttccacctggctggtttcccgaaaggtttgatcagttgtgtgactgggaagggttctgaaataggagattttcttacaatgcatcctggagtcaactgcataagttttactggtggcgatactggtatagccatttcaaagaaggctggaatggtccctcttcagatggagcttgggggcaaagatgcttgcattgtgttggaggatgcagatctagacttggttgcaggaaatatagtaaagggtggtttctcttacagtggccagaggtgcactgctgtcaaagtagtgctaatcatggaatccatcgcagatgccgtagtacagaaggttaacgccaagttggcgaaactgaaagttggcccacctgaggacgactctgatatcaccccggttgtaacagaatcctcagccaacttcatcgagggtctggtgatggatgcaaaggagaaaggagcaaccttctgccaggaatacaggagagaaggcaaccttatatggccattgctgctggatcatgtccgccctgacatgaggatcgcatgggaggaaccttttgggcccgtcttgcctgtgatcaggatcaactcagttgaggagggcatccaccattgcaacgctagcaatttcggcctacagggatgcattttcacaagagacatcaacaaggcaatcctgatcagtgacgcaatggagactggaactgtgcagatcaactctgcaccagcccgcggacctgaccatttccccttccagggtctgaaagacagtggcattggatcccaggggataacaaacagcattaacatgatgaccaaggtgaagagcactgtcataaacctgccgtcaccatcctacaccatgggctga

SEQ ID NO: 2802 - protein, 498 aa, Sorghum bicolor
MALAGTGVFAEILDGEVYRYYADGEWRSSASGKSVAIVNPTTRKTQYRVQACTQEEVNKVMDAAKVAQKAWARTPLWKRAELLHKAAAILKEHKAPIAECLVKEIAKPAKDAVSEVVRSGDLISYTAEEGVRILGEGKLLVSDSFPGNERNKYCLSSKIPLGVVLAIPPFNYPVNLAVSKIGPALIAGNSLVLKPPTQGAVAALHMVHCFHLAGFPKGLISCVTGKGSEIGDFLTMHPGVNCISFTGGDTGIAISKKAGMVPLQMELGGKDACIVLEDADLDLVAGNIVKGGFSYSGQRCTAVKVVLIMESIADAVVQKVNAKLAKLKVGPPEDDSDITPVVTESSANFIEGLVMDAKEKGATFCQEYRREGNLIWPLLLDHVRPDMRIAWEEPFGPVLPVIRINSVEEGIHHCNASNFGLQGCIFTRDINKAILISDAMETGTVQINSAPARGPDHFPFQGLKDSGIGSQGITNSINMMTKVKSTVINLPSPSYTMG

SEQ ID NO: 2803 - DNA, 867 bp, Sorghum bicolor
atggcggtgcgcgccattcacacgccgccgctgctcctctgcaccgtggcgttgctgctgctgaccggcggcctcgtgtcgccgtccaccgccgagctcagcctcgacacggtgagggacttcctgacgcgggaggaggacaccattgtgttcagcctcatcgagaggaccaagtacccgctcaaccggccggcctacgagcccctccacttcggcgacggcgccgcgcaccgcctcaacgcctctttcgccgagctcttcatccgcgagtccgaggccgttcagtccaaggccggaaggtaccaaagcctacaggagattccattcttcgcttacagagttcctttcactctggcacctccatacaacttcacaagagatctgtatcccgctgccgcattacttaacgttaatgacgccatatggagcatgtacttcaatgagctgctccctctgctggccaagaacggtgatgatggcaactatgccgtaactgttgatgcagatcttgcatgtcttcaggtgctttcaagaaggatcaactatggtaggtacgtggcagaagtgaagttcagaggagaccagcagacctataccagcttaattcaggctaaggatagagatgctctgatgaagctactgacatctgaagcccaagaagacgtggtaaagagaagggtagagaagaaggcagttgtatttgggcaaaccataacattagatggaccaatccaaactgatgtcaaccatagcagccaggctaacttcaaagttgatccttcagttgtttataaactgtatgatcagtgggtgattccgttgactaaacaagtggaggtcgagtaccttctccatcgtctcgattga

SEQ ID NO: 2804 - protein, 288 aa, Sorghum bicolor
MAVRAIHTPPLLLCTVALLLLTGGLVSPSTAELSLDTVRDFLTREEDTIVFSLIERTKYPLNRPAYEPLHFGDGAAHRLNASFAELFIRESEAVQSKAGRYQSLQEIPFFAYRVPFTLAPPYNFTRDLYPAAALLNVNDAIWSMYFNELLPLLAKNGDDGNYAVTVDADLACLQVLSRRINYGRYVAEVKFRGDQQTYTSLIQAKDRDALMKLLTSEAQEDVVKRRVEKKAVVFGQTITLDGPIQTDVNHSSQANFKVDPSVVYKLYDQWVIPLTKQVEVEYLLHRLD

SEQ ID NO: 2805 - DNA, 330 bp, Sorghum bicolor
atggttggatggagaacatcatcaatccgacgtcagcatgagttgccaaaacatcgtcttcttgttcgtgatgaaaagtatccgcatattgtttatgttgaaaaggaagttacagacaacaatggaacagaagcccatgctgatctttatgatccagaagaggagatgataagaggccttacgcaagttccatgggaacgtgttgatgtgagcttccagaaaagcagccaaagattagttgcgcataacacaattcaggttaaaagctattggctaaactcggatggagcagacgtgatcaaccacatgatggataatttcatcgtctaa

SEQ ID NO: 2806 - protein, 109 aa, Sorghum bicolor
MVGWRTSSIRRQHELPKHRLLVRDEKYPHIVYVEKEVTDNNGTEAHADLYDPEEEMIRGLTQVPWERVDVSFQKSSQRLVAHNTIQVKSYWLNSDGADVINHMMDNFIV

SEQ ID NO: 2807 - DNA, 678 bp, Sorghum bicolor
atggcgacgatgttcgcgcggccggtgctggccgccctgctgctgccggcgttcctgctctccgccgccggggccgccgacagcaaggacaaccctgccgatcagctcgttgcattgatcaacagcaaccgtactgccagcaaggcttctgctgtttctgataatcaaggtttaggatgcattgctctgcagtacatcagagcatatgaaggtcattgtgaccaggtggatgacaagaagccgatggagtcaagtttcaccgacacatttgccccaacctgtggcgtccaagccacaactctttccaagattactggtaggcttgtgggctgccagtccaagtatgcgactccagctgaggcctttaacatcctggtgaatgatgcgaagggccttcaaatattgcacagcaagaaccacacagaggttggggcagctgtgagtggcaccgatggtggtggaccttacttctggtgtgtcctgttcagtgacgggaagcctactaccagcttcaaggtggatggcgaagtgcccaaggcggccatccatccagggtgcttcagtggcaacaatgacgactgcatgggcgcgacgaatggcgccatttcgaccaatgctggtgcatcgaggctggtggcggcccttccttttgctgtagcttgtgcctttgctttgtga

SEQ ID NO: 2808 - protein, 225 aa, Sorghum bicolor
MATMFARPVLAALLLPAFLLSAAGAADSKDNPADQLVALINSNRTASKASAVSDNQGLGCIALQYIRAYEGHCDQVDDKKPMESSFTDTFAPTCGVQATTLSKITGRLVGCQSKYATPAEAFNILVNDAKGLQILHSKNHTEVGAAVSGTDGGGPYFWCVLFSDGKPTTSFKVDGEVPKAAIHPGCFSGNNDDCMGATNGAISTNAGASRLVAALPFAVACAFAL

SEQ ID NO: 2809 - DNA, 1125 bp, Sorghum bicolor
gaactgtcggtgcagcctttaaccaggttcgtgcgccggggtggtcgactggggacggatccggagcgggacgagacgacgctcacttcctcatcctcctacggttccacggagccacaggaggaggacgacgatgccgcattagaagcggccaaggacaagaggtgggcacatgcacgagcacgaccccaagggcagcagaccaagaatgcagcagtcccctgtttcactggcggcagcaggaaggacagggcgcatcagcgcccggcctcgcttgattttggctcccctggtgttgccagatcatcaacgcattctccagggttcccggtcactggtgtggtcggggtgatgaacaaggggttgggcatatcaaattcatcacacggtaggccagacgtgatgtctagtccagggacaccgagctacaatcggcgtgggatgacgacaggtgttggctatcagcagggttcgaattctgaaagagcgatcccgccttcggccggccatagatggcatccgggaagcagcatggtgttgccttatagcagtgggaggacactgccgtcgaaatgggaggatgcagagaggtggatcttcagtcctaaccccaataataatgcacttgggaggtcagtcccgcaactctggcggccgaaatccaaaagtggtcctcttggacctcctggtagatttggtggagcgtactcttgtgtttcatcatcgactcagttccttgacaatggtagagttggaagtctcgctgtgaatgcaccttacttgtctggggtcttgctacctgagcatgcttgtgggggtgttatggactggggaagggatctaagtggagtatcgggtgacgatagcagcaatggccgaggaggcagcatgagggcttccttctcccgttcactatcggcacaagaagtcaaagagctggagagttgtttctctaagcttgaggtcagggatgtgcaagtggatgatcgagttactctgactaggtggtccaagaaacatgtcacccgaggctctgacaagaatgcaccaaatattattgaatggaagaaaaagactgtggattctaaatcttcatcagaaactgcaaagttaatatcaaagtaa

SEQ ID NO: 2810 - protein, 374 aa, Sorghum bicolor
ELSVQPLTRFVRRGGRLGTDPERDETTLTSSSSYGSTEPQEEDDDAALEAAKDKRWAHARARPQGQQTKNAAVPCFTGGSRKDRAHQRPASLDFGSPGVARSSTHSPGFPVTGVVGVMNKGLGISNSSHGRPDVMSSPGTPSYNRRGMTTGVGYQQGSNSERAIPPSAGHRWHPGSSMVLPYSSGRTLPSKWEDAERWIFSPNPNNNALGRSVPQLWRPKSKSGPLGPPGRFGGAYSCVSSSTQFLDNGRVGSLAVNAPYLSGVLLPEHACGGVMDWGRDLSGVSGDDSSNGRGGSMRASFSRSLSAQEVKELESCFSKLEVRDVQVDDRVTLTRWSKKHVTRGSDKNAPNIIEWKKKTVDSKSSSETAKLISK

SEQ ID NO: 2811 - DNA, 1782 bp, Sorghum bicolor
atggtgtcggacgccagcaagaagaaggccgcgcagaagaaggcggccgccgcagccaagaggggagccaaggtcccggccccttcctcatcctcctcctcctctgccgccgctaaggccgtcgatgccgtcgccgcgctcaagctctccgatcgcacctgcaccggcgtcctcgcctcccacccgctctcccgagatatccacatagagtctctttcattaacgtttcatggccatgaccttattgtagattctgagttggagctcaactatgggaggcgttatggtttgctcggcctaaatggctgtgggaaatctactctgctcaccgcgataggctgcagggaactccctatacctgaacacatggacatataccatctcacccatgagatcgaggcttcagacatgtctgcgctacaagctgttgttagttgtgacgaagaaagagtgaagttggaaaaggaagcggagattttggctgcacaggatgatggtggtggtgatgctttggatcgtgtatatgagcgtctagaagcgattgatgcatcaaccgctgaaaagcgcgctgctgagatattatatggtttaggttttaacaagcaaatgcaagctaagaaaactcgagatttttctggaggttggcgtatgagaattgctttggctagagcactgttcatgaatccaacaatccttttgcttgatgagcctacaaatcatcttgatcttgaggcatgtgtctggttggaagagatgctaaagaaatttgaccgtatacttgttgtcatatctcactcccaggactttctgaatggtgtgtgcactaacatcatccatatgcagaataagaagctcaagttatatactgggaactatgaccagtacgttcagacccgttctgagcttgaagagaatcagatgaagcagttcaagtgggagcaggagcagattgcatcaatgaaagagtacattgcacggtttggccatggatctgcaaagcttgcacgtcaggcccagagcaaggagaaaactcttgcaaagatggagcgtggtgggctcactgagaaggttgttagggataaaatactggtcttccgcttcacaaatgttggcaaacttccaccaccagtgcttcagtttgttgaggtcacgtttgggtacacaccggataatctcttgtacaagaagctcgactttggtgttgacctggactctaggattgcactggttggtcccaatggggcagggaagagcactctcctgaagctgatgacaggtgagctggctccattggacggtatggtgaggcggcacaatcacctgcgcatcgcacagttccatcagcacctggcagagaagctggacctggacatctcggccctgcaatacatgatgaaggaataccctgggaacgaagaagagaggatgagagccgcagtcggtaagtttgggctgtcagggaaggctcaggtgatgccaatgaggaacctgtcggacgggcagaggagccgtgtcatctttgcgtggctggcatacaggcagccgcagctactgctgctggatgagccaacaaaccatctcgatatcgagaccatcgactccctagcggaggcgctgaacgagtgggacggcggtctggtactggtgagccatgacttcaggctgatcaaccaggtcgctcatgagatctgggtttgtgagaatcaggcagtgactaggtgggaaggcgatatcatggatttcaaggaacatttgaggagcaaggctggtctatctgattaa

SEQ ID NO: 2812 - protein, 593 aa, Sorghum bicolor
MVSDASKKKAAQKKAAAAAKRGAKVPAPSSSSSSSAAAKAVDAVAALKLSDRTCTGVLASHPLSRDIHIESLSLTFHGHDLIVDSELELNYGRRYGLLGLNGCGKSTLLTAIGCRELPIPEHMDIYHLTHEIEASDMSALQAVVSCDEERVKLEKEAEILAAQDDGGGDALDRVYERLEAIDASTAEKRAAEILYGLGFNKQMQAKKTRDFSGGWRMRIALARALFMNPTILLLDEPTNHLDLEACVWLEEMLKKFDRILVVISHSQDFLNGVCTNIIHMQNKKLKLYTGNYDQYVQTRSELEENQMKQFKWEQEQIASMKEYIARFGHGSAKLARQAQSKEKTLAKMERGGLTEKVVRDKILVFRFTNVGKLPPPVLQFVEVTFGYTPDNLLYKKLDFGVDLDSRIALVGPNGAGKSTLLKLMTGELAPLDGMVRRHNHLRIAQFHQHLAEKLDLDISALQYMMKEYPGNEEERMRAAVGKFGLSGKAQVMPMRNLSDGQRSRVIFAWLAYRQPQLLLLDEPTNHLDIETIDSLAEALNEWDGGLVLVSHDFRLINQVAHEIWVCENQAVTRWEGDIMDFKEHLRSKAGLSD

SEQ ID NO: 2813 - DNA, 621 bp, Sorghum bicolor
atggccgcgcagtccttcctcctcgcagccacggccacggccacgaccgccgcgctcttcgcggctccctattcctccgcacgccctttccactcggcccacttcgtcgccggcccggggggcgccgccgccgccagggcactcgtcgtcgccgacgcgtctaagaaggccgtagccgtcctcaagggcacgtccgaggtcgagggcgtcgtcacgctcacgcaggacgacgacggacctacaactgtgaacgtccgtatcactggacttactcctggacttcatggcttccacctccacgagtttggtgatactaccaatgggtgcatatcgacaggaccacattttaatccaaacaatctgacacacggtgcaccagaagacgaagtccgtcatgcgggtgacctgggaaacattgttgccaatgctgagggcgtagctgaggcaaccattgttgatacccagattccattgagtggcccaaattcagttgttgggagagcatttgtggttcatgagcttgaagatgatttggggaaaggtggccatgagctcagcctctctactggaaatgctggtggaagactggcatgtggtgttgttggcctgactccattgtag

SEQ ID NO: 2814 - protein, 206 aa, Sorghum bicolor
MAAQSFLLAATATATTAALFAAPYSSARPFHSAHFVAGPGGAAAARALVVADASKKAVAVLKGTSEVEGVVTLTQDDDGPTTVNVRITGLTPGLHGFHLHEFGDTTNGCISTGPHFNPNNLTHGAPEDEVRHAGDLGNIVANAEGVAEATIVDTQIPLSGPNSVVGRAFVVHELEDDLGKGGHELSLSTGNAGGRLACGVVGLTPL

SEQ ID NO: 2815 - DNA, 3030 bp, Sorghum bicolor
atgtcgtcgcggcaggacaaggagaaggcggtgaacgtgcaggtcctcctccgctgcaggcccttcagcgacgatgagctccggagcaacgcgccgcaggtcatcacctgcaacgacttccagcgggaggtagccgtcacgcagattatcgccgggaagcagttcgacaaggtcttcacattcgacaaggtttttggaccaacagcaaagcagaaggacttgtatgaccaggccatcattcctattgtaaatgaggtcttagagggattcaattgcaccatttttgcgtatgggcagacaggcactgggaaaacgtacaccatggaaggagagtgcaggagagccaagagtggaccaaagggccaattacctgcagacgctggagttatacctcgggcagtgaagcagatctttgataccctggagaggcagaacactgagtacagtgttaaggtcacattccttgagctgtacaatgaggaaattacagatcttcttgcacctgaagagatatctaaggctacatttgaggataaacagaagaaaaccttacctcttatggaggatgggaagggtggagttcttgttcgaggtcttgaggaagaaattgtcacgaatgcaagtgaaatattctctctattagaaagggggtctgcaaagcgccgcactgcagagacattacttaacaagcaatccagtcgatcgcactccctattctcaatcactattcacataaaagaggcaacccctgaaggagaagagctgataaaatgcgggaagttaaatctagttgacttggctgggtcagagaacatctctcgttctggggctaaggagggccgtgcaagggaggctggtgaaattaataaaagcttgcttactctaggccgtgtgattacggcattggtagaacaccttggacatgttccttacagggacagcaaactcacaagattgctgcgtgattcattaggaggaagaacaaagacttgcattatcgctactgtttcaccctccgtgcattgccttgaagaaaccttgagtactttggattatgcacaccgggcaaagagcattaagaacagacctgaggtaaaccagaaaatgatgaaatcaacattaattaaagatctttatggtgaaattgaccgacttaaggcagaggtctatgctgctcgagaaaaagttggagtgtacattcccaaagacagatatcagcaggaggaaaatgagcgaaaggcaatggctgatcagatagaacaaatgaatgcttctttggaagcaaaccagaagctaattagtgatctgcaacaaaagtatgattctgagcttcaacattctgctgatttgagcaaaaagcttgaagtcacagagaaacatctggaccacacaagcaacctactctctacgacaaaagaagatctgaagcaggcacagtacgatctaaaggagaaagattatataatttcagaacagaaaaaagcagaaaatgctttaacacaccaagcttgtgtgctgagatcagatctggaaaaatatactcgtgataatacttcactgtattcaaaaattgctaggggagacaagctaagtgcaacaaatagatcagtcgtgaatacattccaaactgaccttgcttcgaagttggatattctttcgaatacactcaatgcatccatagatcaacaaaataggcacctaaagtctgtggaggatttatgccaatcttgtgttgagtcccatgacaaggctacttctgagctgaaaaagaagattttggcttcaaaatcattgtacatgtcgcatatggaagctttccaaaatgttgtcctcctacataaagcaagtgcaaatgccacactagaagatatatcatcactgtctgctgcaagctgctgtagtcttgaccagctactatcatgtgttgagggagaggcacagaatatatttaatgacattcataaattgttaaccacccaccgaagcgagatgacacacttcactcaagaattaagggagagtttccgaataagcttggacaggtcaaaagaaatgtccacttatattattgggctatttgacaagtatgttgaggaaacatccaagttacagagccactcaaataatactcatgaagctcaaatgaaaagcattgaagattttcagatggcttatgaggagcaatcaaaatcagaggagcagaagcttctagcggacatcagcagtttagtgtctaaacatattactcgacaaagagagttggtgggtgttagattgagttctctgggtgattctgctcgtggaaacaaggcatttttggatgaacacacatcggccatggagtttgtcacaaaagatgctaagaggaagtgggaaacatttgcagagcaggctgagaatgactgcaaagctggctccagcttctctgcagctaagcattgtcgcatggaaaccatgctgcaagagtgcgcatgcactgttgactccgctgttcagcaatggaagacgtcacatgctgctgttaacgatctcagcagaaaacaagttgctgaagttgaagcactcctcaggactgcgattgagaacaatgagcaacatgaagtggagattgcatcttctcgagctgtggctgaagaagacgcctccaataacagcaatgacatagcccagggcatcgaaaatctgttggaagaggcacgaaattcgagttcaagagtggtctcaacggtggaggctcacttcgcggagctacagaagctgcaagagagccactccagccaggctgccggtatcaacatgcacgccgacaaggctttccaaaccagttacaaggactacgaaccgagtggtgaaactccggtgaggtctgagccgaatgtgccaagcaaaggctcgattgagtcgctgcgagccatgcccatggagaccttgatgaatgagttccgtgagaaccatccttatgaatctgaatcgggcaaagagtccaagttaactcagattcctcgcttgccgcttgcgacaatcaactga

SEQ ID NO: 2816 - protein, 1009 aa, Sorghum bicolor
MSSRQDKEKAVNVQVLLRCRPFSDDELRSNAPQVITCNDFQREVAVTQIIAGKQFDKVFTFDKVFGPTAKQKDLYDQAIIPIVNEVLEGFNCTIFAYGQTGTGKTYTMEGECRRAKSGPKGQLPADAGVIPRAVKQIFDTLERQNTEYSVKVTFLELYNEEITDLLAPEEISKATFEDKQKKTLPLMEDGKGGVLVRGLEEEIVTNASEIFSLLERGSAKRRTAETLLNKQSSRSHSLFSITIHIKEATPEGEELIKCGKLNLVDLAGSENISRSGAKEGRAREAGEINKSLLTLGRVITALVEHLGHVPYRDSKLTRLLRDSLGGRTKTCIIATVSPSVHCLEETLSTLDYAHRAKSIKNRPEVNQKMMKSTLIKDLYGEIDRLKAEVYAAREKVGVYIPKDRYQQEENERKAMADQIEQMNASLEANQKLISDLQQKYDSELQHSADLSKKLEVTEKHLDHTSNLLSTTKEDLKQAQYDLKEKDYIISEQKKAENALTHQACVLRSDLEKYTRDNTSLYSKIARGDKLSATNRSVVNTFQTDLASKLDILSNTLNASIDQQNRHLKSVEDLCQSCVESHDKATSELKKKILASKSLYMSHMEAFQNVVLLHKASANATLEDISSLSAASCCSLDQLLSCVEGEAQNIFNDIHKLLTTHRSEMTHFTQELRESFRISLDRSKEMSTYIIGLFDKYVEETSKLQSHSNNTHEAQMKSIEDFQMAYEEQSKSEEQKLLADISSLVSKHITRQRELVGVRLSSLGDSARGNKAFLDEHTSAMEFVTKDAKRKWETFAEQAENDCKAGSSFSAAKHCRMETMLQECACTVDSAVQQWKTSHAAVNDLSRKQVAEVEALLRTAIENNEQHEVEIASSRAVAEEDASNNSNDIAQGIENLLEEARNSSSRVVSTVEAHFAELQKLQESHSSQAAGINMHADKAFQTSYKDYEPSGETPVRSEPNVPSKGSIESLRAMPMETLMNEFRENHPYESESGKESKLTQIPRLPLATIN

SEQ ID NO: 2817 - DNA, 1698 bp, Sorghum bicolor
atggtggggttgatgatgaactttagaaacaatgcggatgagaagcttgtctgtgctcttagcagcagaaccaccgatgagaaaggatctccaaggaaattgtacataattgatgcccggccaagagcaaatgctttagcaaatggggcaaagggtgggggctcagaatcatcttctaactaccccagatctgaggttctttttttaggaatacaaaacatccacacaatgagagatagtctttctcgccttagggactatgtggatgctcatggctcaatttcatcaaatggaagcccttcagctgtatctgttgttggagatcggaggaatcgtggatcaacctggggtggaggcaatctaaatagcatgacatcattttcttcaacactgggggaatggctaaaccatatccagaatattctggtcggtgcttcatggattgctgcacaaatttcagaagaagcagcgtcagttcttgtacattgcagtgatggatgggaccgtacaacccagttggttgcacttgcttgtttattgcttgatccctattatcgaactttcagtggattccaggctcttgttgaaaaggattggttagcatttggtcatccatttgcagagagaatgggagttccaacagtagctgagaatgtggggtcacagtatgagctactaaggcaaccttccctcggaaatttaagcagttctccaagtaggaacactttagggccatcaggaccatcctctaatccttcagttcaatctcagacatcaaacaactcttcaccgatattgttacagtggctcgattgtatctcgcagttgttacgtctgtacccatctgcatttcagttctcatcaaaattcctagttgattttatggattgtgtgctatcgtgtcgctttgggaacttcttgtgcaatagtgaacgggaaagggagcaatctggtgtcacaaactcctgtcgttgcatgtggtcatatttggctaatctaagagcttctggcggcagcttccatgagcactataatccattctatgatccagtaaagcacaatggtgcactattgccccctgctgcagcacttgccccaacactctggccccagttttatttgaggtggacatgccccattgagtcacaaggtggtgatcttgaatcccaatggcatgctatgaataaaaaatatgcagatgcaatgaaggcaaaggatattgctgagtggagggcaaaagatatcaaattgaaattggaatctatgaaacaagacttgcaaagggagaaacgtgctagtagtacagctttagccacagctcaaagtgctcaaagggagaatgctgccattaagaaggcgatagaatctataggatgcacaattaaattctcgacaagcgaagacgaggacaaaactgaagtgctgtcgtgttcattacgaagaggcgcagatggtagagctcagcaagatgaaaatggtgacttctctgtatcaatctctgcaattgaggacagcctggtctcggatgcaccaggggaccatttttgcgaatcactctgccccttccgcacaagagaagggtgcagatggccagatgctccgtgtgcacagcttggaagtcagtttgtcggtttgaaggcaaattttgatgcttttgaccggttgtctatacaggactgctattttggaccagagtag

SEQ ID NO: 2818 - protein, 565 aa, Sorghum bicolor
MVGLMMNFRNNADEKLVCALSSRTTDEKGSPRKLYIIDARPRANALANGAKGGGSESSSNYPRSEVLFLGIQNIHTMRDSLSRLRDYVDAHGSISSNGSPSAVSVVGDRRNRGSTWGGGNLNSMTSFSSTLGEWLNHIQNILVGASWIAAQISEEAASVLVHCSDGWDRTTQLVALACLLLDPYYRTFSGFQALVEKDWLAFGHPFAERMGVPTVAENVGSQYELLRQPSLGNLSSSPSRNTLGPSGPSSNPSVQSQTSNNSSPILLQWLDCISQLLRLYPSAFQFSSKFLVDFMDCVLSCRFGNFLCNSEREREQSGVTNSCRCMWSYLANLRASGGSFHEHYNPFYDPVKHNGALLPPAAALAPTLWPQFYLRWTCPIESQGGDLESQWHAMNKKYADAMKAKDIAEWRAKDIKLKLESMKQDLQREKRASSTALATAQSAQRENAAIKKAIESIGCTIKFSTSEDEDKTEVLSCSLRRGADGRAQQDENGDFSVSISAIEDSLVSDAPGDHFCESLCPFRTREGCRWPDAPCAQLGSQFVGLKANFDAFDRLSIQDCYFGPE

SEQ ID NO: 2819 - DNA, 261 bp, Sorghum bicolor
atggcgtccggctggggcatcaacgggaacaagggccgctgctacgacttctggctggatttcagcgagtgcatgagccgctgccgccagccctccgactgcggcctcctccgcgaggactacctcgagtgcctccaccactccaaggagttccagcgcaggaacaggatctacaaggaggagcaacgtcagatcagagctgctgctcggaaggccaaggaagaagctgagggagccccagctgttgcagctcaccattag

SEQ ID NO: 2820 - protein, 86 aa, Sorghum bicolor
MASGWGINGNKGRCYDFWLDFSECMSRCRQPSDCGLLREDYLECLHHSKEFQRRNRIYKEEQRQIRAAARKAKEEAEGAPAVAAHH

SEQ ID NO: 2821 - DNA, 402 bp, Sorghum bicolor
atggcggaggaggcggccgcgacgttggccggcggcgacaagctcatcctgcggggcctgcagttccacggcttccacggagtcctgaaggaggagcagacgctgggacagaagttcgtcgtcgacatcgacgcctggatggacctcgccgccgccggcgagtccgacagcatcgctgacaccgtcagctacaccgacatctacggcattgctaaggatgtcatcgaaggcacgccacacaacctcttggagtcggtggctcactcgatcgcaaaggccacgctgctcaagttccctcagatctccgcggtccgagtgaaggttggcaagccacatgtcgcagtgcaaggcgtcctggactatctgggcgtggagataatgaggcacagaaagaaagaatga

SEQ ID NO: 2822 - protein, 133 aa, Sorghum bicolor
MAEEAAATLAGGDKLILRGLQFHGFHGVLKEEQTLGQKFVVDIDAWMDLAAAGESDSIADTVSYTDIYGIAKDVIEGTPHNLLESVAHSIAKATLLKFPQISAVRVKVGKPHVAVQGVLDYLGVEIMRHRKKE

SEQ ID NO: 2823 - DNA, 396 bp, Sorghum bicolor
atggcctccatcgccggatcttccgccctctccttcgccaggcccgtcaaggcaatcaacacgaattctctagctttctccccagtgaagaagggtaacacattcctccgcctgcaaccagtgcctatgagatctgtttcctgcgctgccaagaaggatacagtggacaaggtttgtgaaattgtaaagaagcagcttgctcttcctgacaacactgatgtttgtggtgaatccaaattctctgaacttggcgcggattcactggacacggttgagattgtgatgggcctcgaggagcacttcgacattagcgtggaggagtccagcgcgcagacaatcgcaaccgttgaagatgcggctgacctcatcgacaagcttgttgctgggaaggcatag

SEQ ID NO: 2824 - protein, 131 aa, Sorghum bicolor
MASIAGSSALSFARPVKAINTNSLAFSPVKKGNTFLRLQPVPMRSVSCAAKKDTVDKVCEIVKKQLALPDNTDVCGESKFSELGADSLDTVEIVMGLEEHFDISVEESSAQTIATVEDAADLIDKLVAGKA

SEQ ID NO: 2825 - DNA, 210 bp, Sorghum bicolor
atgccgaagcaaatccacgagatcaaggacttccttctcaccgcgaggaggaaggatgcccgttcagtgaagatcaagaggagcaaggatgttgtcaagttcaaggttcgctgctccaagtacttgtacaccctctgcgtctttgatgctgagaaggcaaacaagttgaagcaatcacttcccccaggtttgagcgtccaggaggtttga

SEQ ID NO: 2826 - protein, 69 aa, Sorghum bicolor
MPKQIHEIKDFLLTARRKDARSVKIKRSKDVVKFKVRCSKYLYTLCVFDAEKANKLKQSLPPGLSVQEV

SEQ ID NO: 2827 - DNA, 729 bp, Sorghum bicolor
atggctgcagcagcgtcctcctctgcctcgccgctcctcctcccctcagggccgaggcatgcgtcggcctcggcgacggcgtggcttcgcggcgccagcgcgttcaggagcagggcgctgacctcagaggcgccgtgctgctgcaaggccgccggtgtcggtggaagcgcggcgcaatgcggggcggctgacgagttcttgatcggtggtggcagcagtacccggagggggatggtaggagtggccctgggagcctctgccttggggctggcagcgtttgacgcggtcgccgccgggttgccgccggaggagaagcccaagctctgcgacgccgcctgcgaaaccgagctcgaaaatgtgcctatggtaactacagaatccggtctgcaatacaaggatatcaaagtgggcgaagggccaagtccacccattggtttccaggttgctgcaaattatgttgctatggtgccaaatgggcagattttcgacagttcactggagaaaggtcagccctacatattccgtgttggatcaggacaggtgattaaggggcttgatgaagggattttgtcaatgaaggttggaggactacgtcggttgtacatacctggtccattagcgtttcctaagggtcttacttcagcacctggaaggccaagagtacctccgagcagccctgttgttttcgatgtcaatttactgtacataccaggtctcgatgatgagtga

SEQ ID NO: 2828 - protein, 242 aa, Sorghum bicolor
MAAAASSSASPLLLPSGPRHASASATAWLRGASAFRSRALTSEAPCCCKAAGVGGSAAQCGAADEFLIGGGSSTRRGMVGVALGASALGLAAFDAVAAGLPPEEKPKLCDAACETELENVPMVTTESGLQYKDIKVGEGPSPPIGFQVAANYVAMVPNGQIFDSSLEKGQPYIFRVGSGQVIKGLDEGILSMKVGGLRRLYIPGPLAFPKGLTSAPGRPRVPPSSPVVFDVNLLYIPGLDDE

SEQ ID NO: 2829 - DNA, 1110 bp, Sorghum bicolor
atggcgctcccgggctcggcgggaacccgcgcggcggtcggcctctgccggatcgcggcgagcgcgtcctcgtcagcggcggccggactctgccggatcgcggcgagcgcgtcgtcgccttcgccgtctgcggcggccggcgggaggagggaatgggagctgccgttcgcgctggtggcggagcgggggatggtggtgggcggccaccgcgggatggggatgaacgcggtgggggcgccgccaggggcgcgcgtcggggccgccagggagcgggagaacacgctgctctccttcggccgcgccgccgcgcacgccgccgtcgccttcgtcgagttcgacgtgcaggtcactaaagatggctgcccaataatcttccatgatgacttcatcctaacacaggggattggagctgtatatgaaaggcgtgttactgatcttctcttggaagatttcctctcttatggtacacaaaaagaatctcgcaaggtttccaagcctttacttagacgggcaggagatggtagagtccttaattggagtacagaagaagatgattctctttgcacattgcaagaggtctttcaacgtgtcagtcctcgcctgggatttaacattgagctgaagtttgatgacagcattgcgtatcacaggaaagaccttgactgtgctcttaaagctgtattgcaagtacttttcctaacagaaggagggacatacaaacaccatgattcaagaaggaactcacttgacgatgccatccgggtatgcctagagtatgatctgcatgggatcgtgtcagacgtgagaggcgttctcaagaacccatctgcagttatcagagcacaagaatctaaccttgcacttctcacatatggggagctaaataacgtgtcggaggcagtctatgtccaatacctgatgggtgtacatggcgtcattgttgatcgggtggaggagatctcaaacgctgtggcgggtttcggtaaaccagacctcggccagagtggtgctggtgtggacggaggcggagcaaagcatcaggccttctcacaacagcagctggggttcttgctccggcttatccctgaactgattgaacagcaacattga

SEQ ID NO: 2830 - protein, 369 aa, Sorghum bicolor
MALPGSAGTRAAVGLCRIAASASSSAAAGLCRIAASASSPSPSAAAGGRREWELPFALVAERGMVVGGHRGMGMNAVGAPPGARVGAARERENTLLSFGRAAAHAAVAFVEFDVQVTKDGCPIIFHDDFILTQGIGAVYERRVTDLLLEDFLSYGTQKESRKVSKPLLRRAGDGRVLNWSTEEDDSLCTLQEVFQRVSPRLGFNIELKFDDSIAYHRKDLDCALKAVLQVLFLTEGGTYKHHDSRRNSLDDAIRVCLEYDLHGIVSDVRGVLKNPSAVIRAQESNLALLTYGELNNVSEAVYVQYLMGVHGVIVDRVEEISNAVAGFGKPDLGQSGAGVDGGGAKHQAFSQQQLGFLLRLIPELIEQQH

SEQ ID NO: 2831 - DNA, 1776 bp, Sorghum bicolor
atgggatcactcaagatgactgaaaaagctcccggtgctgcactgccagagtcttcatgtgcctacttgcttcaagaactcaagatgatatgggatgaagttgggcaaaaccaaaatgaaagggaaagaatcctggaagagcttgagcaggagtgccaagaggtttacagaagaaaagtaaatagtgcaaatatgtctcggattcagctgcatcaagcattagctgaatctgaggctgaatttaccaacctgctgctatcccttggagaaagatcattcccaggacgtcctgagaaaatggcaggcactctaaaggagcagctgaattccattacacctgccctacaagaaatgcagatgaggaaggaagccagagtaaagcagttcatggaagttcaaactgaaatacacagaattgcttctgaaattgcaggacgcttagggaatgaagctgtcactgtgaatgaagaagatctgtcactaaagaaactcgaggagttccaaagcgaattgcaaagactgaaaagagagaagagtgatcgtctctgcaaagtggaagaatacaaagttctaattcacaattttgcaaaagtaatgggaatggatcctttgaagatacttgctaatgtgcacccaaggttgctagatggaccaaatgagcaacagaccaagaatatcagtgatgacatcctcaacaagctcaatatgactgttcagcagctaaaagaagagaagagcaatagaagggaaaagctccaaaaccttgtaaaagcattaacaagcttatggaatactctggatactactatggaggagcgccaaccatatgggcaaattaaggtactcgcaatgacttcagtaaatggaatgttaggtcctggaagcctcacacttgagacaattcaacaggttgaatctgaagttcagcgtctaaatcagttgaaggcaagcaaaatgaaagagctattcctaaaaaagagagcagaagtcgatgaaatttgcaagaaatcacacatggacatgccttatcaaacagaaatggacaaaataatgaatctgataatgtcaggagatgtggtccatgatgatctattaaagacaatggatgaatatatatacaaagcaaaagaggaggccacaagccggaaagacataatggataaggttgaaaaatggatggcttcatgtgatgaagagcggtggctagaagaatacagcagggatgaacgaaggtactcaataagcagaggagcacacaagcacttaaaaagggcagagcgtgctcgaattatagttaacaaaattccaggcttggtagagcagttaatggccaagacacaattctgggaacaggagagaaacaagatcttctactatgatgagctcccgcttctggcaatgctgaaagactacatgttcacactcaaagaaaaagaagaagagaaatacaggcaacgggagaataaaaagatacagactctacttgtaaagaggcctgagaattcaataatgttaaggcccaacacaagcttcagtcgtccatcaagcagaggcttcaatacgagtcctggctccacatccatctggaccagccaagtttctgccaaagtgcaactgcctgactcagagaactccccagctgaaaaagatatgcgtgcaaaaagaattaggaacagaagtatgcagggcgtgttgggaaataatagaagctgttcaacctctcatgaagataaagcagaagtctcaactgtgaagcaaggcctttcaccaatttaa

SEQ ID NO: 2832 - protein, 591 aa, Sorghum bicolor
MGSLKMTEKAPGAALPESSCAYLLQELKMIWDEVGQNQNERERILEELEQECQEVYRRKVNSANMSRIQLHQALAESEAEFTNLLLSLGERSFPGRPEKMAGTLKEQLNSITPALQEMQMRKEARVKQFMEVQTEIHRIASEIAGRLGNEAVTVNEEDLSLKKLEEFQSELQRLKREKSDRLCKVEEYKVLIHNFAKVMGMDPLKILANVHPRLLDGPNEQQTKNISDDILNKLNMTVQQLKEEKSNRREKLQNLVKALTSLWNTLDTTMEERQPYGQIKVLAMTSVNGMLGPGSLTLETIQQVESEVQRLNQLKASKMKELFLKKRAEVDEICKKSHMDMPYQTEMDKIMNLIMSGDVVHDDLLKTMDEYIYKAKEEATSRKDIMDKVEKWMASCDEERWLEEYSRDERRYSISRGAHKHLKRAERARIIVNKIPGLVEQLMAKTQFWEQERNKIFYYDELPLLAMLKDYMFTLKEKEEEKYRQRENKKIQTLLVKRPENSIMLRPNTSFSRPSSRGFNTSPGSTSIWTSQVSAKVQLPDSENSPAEKDMRAKRIRNRSMQGVLGNNRSCSTSHEDKAEVSTVKQGLSPI

SEQ ID NO: 2833 - DNA, 972 bp, Sorghum bicolor
atggctgtcccacaagttgacaagaaaatgcttggtgaacttgaggctatgggattcccaactgctcgttcagttagagcactccatttttcaggtaattccaatctcgaatctgctgtaaactggcttctggaacatgaaagtgacccagacattgatcagctaccattggttccaagagaaataagcattgaatgtggtgacacatcaaatgaagtaagaaatgacgttcaagaaacgagggatactgtgctggagcagaaacctgaagaacagactgaaactggaagacagaatgagacatcccagttggaacgagaaccaaatgcagatgaacaggaggaacaagatacaaagaggatattagcactatacaagcaaaaacgagacgaggaaggaagagcaagagggcgaatacgaaatcaattacaagaggatcagagggagaggattcgagctgctaaagatcttatggaagcaaagcgaactctcgaggaaaatcaaagaaagcggatgatggaaagtcggattgcagatcaagaggaggagaaaagagcaagagagagaatacgacagcgtatagcagatgataaggtgaaacctgttgaacgtgtcgtcacatcagaacaactgagagaccgcctgcgaactctgaagaagaatcacaaggatgaccctgctgctgtcgcaagagcgtaccaaatattgctcaagattgttgccaacatagtgaagaacccagaagaggaaaagttcaggaggatccggctcagcaaccctgttttcaaggacagggtgggcagcctgcaaggtggcgtggagttcctggagctgtgcgggttccagaggctcagcggcatcggctacctggtgatgccgagggacaagatcgacatggcgctcctcaacgctgctggggtcgagatcgcgtcggccatggagaacccctacttcgggctgctctccaagtga

SEQ ID NO: 2834 - protein, 323 aa, Sorghum bicolor
MAVPQVDKKMLGELEAMGFPTARSVRALHFSGNSNLESAVNWLLEHESDPDIDQLPLVPREISIECGDTSNEVRNDVQETRDTVLEQKPEEQTETGRQNETSQLEREPNADEQEEQDTKRILALYKQKRDEEGRARGRIRNQLQEDQRERIRAAKDLMEAKRTLEENQRKRMMESRIADQEEEKRARERIRQRIADDKVKPVERVVTSEQLRDRLRTLKKNHKDDPAAVARAYQILLKIVANIVKNPEEEKFRRIRLSNPVFKDRVGSLQGGVEFLELCGFQRLSGIGYLVMPRDKIDMALLNAAGVEIASAMENPYFGLLSK

SEQ ID NO: 2835 - DNA, 795 bp, Sorghum bicolor
atgaggctcaccgcagccaagcctgcagccatcaccctcgccgagcgccagccgatccccatccccacatgcagctgcagctgcacggtggccaagaagagccgtagcgaccggctggcatggagggtcgcagtggcaagcggcgacgccgacgccgaggctgacggtgccgaggcgagcgctggcgcgggccaggcaccgacggcgcgagcggggcggcgggcccggctgtcggcgaggcggcgggagcgcgtcccgctgcccgacggcgtctccggcgtcagtgtcggcgagttcctgcgccacccggacgccgtggagtccctcctcaacaccggcgcgctcgagagcttcgcgcccgcgggcaccgggcccggcacgttcacctgcgggcttcgccgcatcgggctcctcggattcgaggtcgccccggtgctcgacctgcgcgtcgccccgaccagcaccgactgcaccatcgagatgctgtcgtgcaggtttgagggttcagaagcacttgagcagcagaatgaactcttttcagcatttatgagtaaccatataacgtggagcgaggatgccgaggagccctgcctagacatcgatgtcaccttggaggtcactctggaggtctacactaagccattcagcatgcttccactgtcagcagtggagaaaccgggcaaccttttgatgcaaggcctgctggacaggcttgttcccatgctgggagagcagttgctgagggactaccattcctgggttcagcttcagcagcagcaacatgaagcgtcttga

SEQ ID NO: 2836 - protein, 264 aa, Sorghum bicolor
MRLTAAKPAAITLAERQPIPIPTCSCSCTVAKKSRSDRLAWRVAVASGDADAEADGAEASAGAGQAPTARAGRRARLSARRRERVPLPDGVSGVSVGEFLRHPDAVESLLNTGALESFAPAGTGPGTFTCGLRRIGLLGFEVAPVLDLRVAPTSTDCTIEMLSCRFEGSEALEQQNELFSAFMSNHITWSEDAEEPCLDIDVTLEVTLEVYTKPFSMLPLSAVEKPGNLLMQGLLDRLVPMLGEQLLRDYHSWVQLQQQQHEAS

SEQ ID NO: 2837 - DNA, 1122 bp, Sorghum bicolor
atggaggtgaggtccgagcaagggctgatggcagggagggatctattcggcatgccgaagagcccgccggcgccggtgcctgggccgccggcgtccgcggccatgcagagcgtgcgcatggcgtacactgcggacggcaccgctgtgtacgctccggtgagctcctcggccgcgacgccgtcttaccagccgcagggcccagcccacggcactagcatgtctgcggcgacggtcgttggtggcaatggcgcgtcagctgtgcctggcatgggggagccggtggccaagaagaagcgcgggcgaccaagaaagtacgggcccgacgggtccatggcgctggcattggtgcctgcgtcggcggctacgggatcaccggctacagggtcaccagcgacagggcagggttcttccgggccgttctcaccggctgggttaaatccggcgagctctctgctagtggtgtcgccagatggatttaagaagcggggccggcctaagggttctaccaacaagccgcgcgtggatgctgctgggtcatcaggagctggatttacacctcatgttattacagttcaagctggggaggatgtgtcatcaaagattatgtcattttctcagcatggaacgcgtgcaatttgtgttctttcagcaaatggtgccatatcaaatgtgacgcttcgtcagactgctacatcaggtggaactgtaacatacgagggtcgatttgagatactatcactgtcaggctcattcctcctggtggagaatggtggtcagcgtagtcgaactggaggactcagtgtgtccctggctggtcctgatggtcgtctgttgggtggtggagttgcgggacttctcatagcagcttcaccagttcagatagtactgggaagcttcaattctggaggcaaaaaagagtcaaaaaagcatgctccttcagaacccacatcagtgccactgaaggtcgctccgaccaccgggatgggacccaacagccctccttcaagaggtacattgagcgagttatctggtggcactggaagcccaccaccactgcatcaaggcatggctgctagcaataataaccaaccgccgttcctgtctagcatgccttggaaatga

SEQ ID NO: 2838 - protein, 373 aa, Sorghum bicolor
MEVRSEQGLMAGRDLFGMPKSPPAPVPGPPASAAMQSVRMAYTADGTAVYAPVSSSAATPSYQPQGPAHGTSMSAATVVGGNGASAVPGMGEPVAKKKRGRPRKYGPDGSMALALVPASAATGSPATGSPATGQGSSGPFSPAGLNPASSLLVVSPDGFKKRGRPKGSTNKPRVDAAGSSGAGFTPHVITVQAGEDVSSKIMSFSQHGTRAICVLSANGAISNVTLRQTATSGGTVTYEGRFEILSLSGSFLLVENGGQRSRTGGLSVSLAGPDGRLLGGGVAGLLIAASPVQIVLGSFNSGGKKESKKHAPSEPTSVPLKVAPTTGMGPNSPPSRGTLSELSGGTGSPPPLHQGMAASNNNQPPFLSSMPWK

SEQ ID NO: 2839 - DNA, 354 bp, Sorghum bicolor
atgtctgtgcggataaaggcagtggtggacaagttcgtgatggagctcaaggaggcactggacgcggacatccaggaccgcatcatgaaggagcgggagatgcagagctacatcgcggagcgcgagcgcgaggtcgccgagcgggaggccgcgtggaaggccgagctctcccgccgagaggctgagatcgcgagacaagaggcgaggctgaaggtcgagagggagaacctggagaaagagaagagcgtcctcatgggcacggcttcgaatcaggataaccaggacggagccctggagatcaccgtcagcggcgagaagtacaggtgcctccggttctccaaggcgaagaagtga

SEQ ID NO: 2840 - protein, 117 aa, Sorghum bicolor
MSVRIKAVVDKFVMELKEALDADIQDRIMKEREMQSYIAEREREVAEREAAWKAELSRREAEIARQEARLKVERENLEKEKSVLMGTASNQDNQDGALEITVSGEKYRCLRFSKAKK

SEQ ID NO: 2841 - DNA, 528 bp, Sorghum bicolor
atggcgaccgacgcgatcctggagacgatcaagccgcggcggagcgaggacgagcagctcccggtgaccacgcccggcgccgcgggaaccaaggcgggcggcggcggcgggatcggtctgcgccgacgcatgtcgtcgttctcggtgcacgtgaggccgccgccgtcgctgtcgctgtcgtcgtcggtggcggcgttccgtcgcgcgcggtcgatgccgtccgtgaaggcgctggcggcggcgggcgcgctgcggcggtggtgggagtgggggctcggctgggtgactgcgccgttcgcgccccgcgggctggaccacctcgacgacgaggcgcggccgctgggcggcgggtgcagctgcgccggcggggccgcgggcggtgggtggcggcacgtcctgttcaagctccgcgccggggcccgacgcctgctgggccgcgatgggcggccgctcaaggccgccgcgccgcaggacttcgggtacgactccgttagctacaagcagaacttcgacgacggcgaggcgtga

SEQ ID NO: 2842 - protein, 175 aa, Sorghum bicolor
MATDAILETIKPRRSEDEQLPVTTPGAAGTKAGGGGGIGLRRRMSSFSVHVRPPPSLSLSSSVAAFRRARSMPSVKALAAAGALRRWWEWGLGWVTAPFAPRGLDHLDDEARPLGGGCSCAGGAAGGGWRHVLFKLRAGARRLLGRDGRPLKAAAPQDFGYDSVSYKQNFDDGEA

SEQ ID NO: 2843 - DNA, 1026 bp, Sorghum bicolor
atgcagcaccaggtccaggatcaccaccaggccatgggcgacacgctgtgggacctgctcggggaggagatggcggcggcgggcggcgagcacgggcttcccccagggttccggttccaccccaccgacgaggagctggtgaccttctacctggcggccaaggtgttcaacggcgcctgctgcggcatcgacatcgccgaggtggacctcaaccggtgcgagccgtgggagctccccgacgcggcgcgcatgggggagcgcgagtggtacttcttcagcctccgcgaccgcaagtaccccacgggcctccgcaccaaccgcgccaccggcgccggctactggaaggccaccggcaaggaccgcgaggtgctcaacgccgccaccggcgcgctcctcggcatgaagaagacgctcgtcttctacaagggccgcgcgccgcgcggggagaagaccaagtgggtcctccacgagtaccgcctcgacggcgacttcgccgccgctcgccgcccatgcaaggaggaatgggtgatctgcaggatactgcacaaggcaggcgacctgtacagcaagctgatgatggtgaagaacccctactacctccccatggcaatggaaccctccagcttctgcttccagcaggagcccaccgcgcatcccctcacaaaccctagcggcggctgcacaatacccctcggcctccccttccaccacggccaccccggcatgcagccgccgtcgccgagcaaccatggcaacaagcaggtcgtcttcgccggggcagcgggctgctgcatgcagcaagagccgccaaacggcagcaacagcgccgtgctgcccatgccgccgttccctcccttcactcccatcgtcgctggcaagccggcggccccggcgccaccgccccaggtcggggtcaacgccggtccacaggagccaccgccaccaacctggctggaggcctacctgcagcacagtgatgggatcctttatgagatgggcccagctgcagcgcccaggggcgcatga

SEQ ID NO: 2844 - protein, 341 aa, Sorghum bicolor
MQHQVQDHHQAMGDTLWDLLGEEMAAAGGEHGLPPGFRFHPTDEELVTFYLAAKVFNGACCGIDIAEVDLNRCEPWELPDAARMGEREWYFFSLRDRKYPTGLRTNRATGAGYWKATGKDREVLNAATGALLGMKKTLVFYKGRAPRGEKTKWVLHEYRLDGDFAAARRPCKEEWVICRILHKAGDLYSKLMMVKNPYYLPMAMEPSSFCFQQEPTAHPLTNPSGGCTIPLGLPFHHGHPGMQPPSPSNHGNKQVVFAGAAGCCMQQEPPNGSNSAVLPMPPFPPFTPIVAGKPAAPAPPPQVGVNAGPQEPPPPTWLEAYLQHSDGILYEMGPAAAPRGA

SEQ ID NO: 2845 - DNA, 774 bp, Sorghum bicolor
atggaggccggcctgcgcgcgcttggccaccgctactgcggcggcggcggctgcggaatcagcctcggtgggttcgccgccgcgcgtgccatccggctccggcgccaacgccagcgtcgcgcggccgccttctgctcccttgctactgttggtggagatgggaatggcgccgcgggtggtggccccgtgaggagcggcgtcgaggtggcgcgcgccaggaggatgctccatgtcgtgctcgtctcgccgctgataccaggaaatacagggtccattgcaaggacatgtgctgcatctgcagttggcctgcatcttgtcgggccattaggttataaggtagacgacacaaaattgaagcgtgcgggattggattattggccatacgttgttgtcaagattcatgactcttgggaccacttcttcgattatttcatgaagcaggagggagataaaaggctgttggcattcaccaaaagaggcacacaaatccattcagatttctcctacaggccaggggactggctagtctttggttctgaaacaaaaggattgcctcaacaagcccttgaggattgctgtagagaaggcctaggtggtggaaccctccgaattcccatggtggaaacctacgtccggtgcctgaacctctccgtcagcgttggaatcgcactgtatgaggcagctagacagctgaactacgaacagcttcagtatcagcctgagcttccggaggaagcacaggggctattcccagcagaggacatttatgcatga

SEQ ID NO: 2846 - protein, 257 aa, Sorghum bicolor
MEAGLRALGHRYCGGGGCGISLGGFAAARAIRLRRQRQRRAAAFCSLATVGGDGNGAAGGGPVRSGVEVARARRMLHVVLVSPLIPGNTGSIARTCAASAVGLHLVGPLGYKVDDTKLKRAGLDYWPYVVVKIHDSWDHFFDYFMKQEGDKRLLAFTKRGTQIHSDFSYRPGDWLVFGSETKGLPQQALEDCCREGLGGGTLRIPMVETYVRCLNLSVSVGIALYEAARQLNYEQLQYQPELPEEAQGLFPAEDIYA

SEQ ID NO: 2847 - DNA, 2085 bp, Sorghum bicolor
atggacgaggcggacgatgaacttcgcaccttgaaggtcggcttcaccgccgccggagaggagcagttccggaagctcgtggcggagaagctgcgggggttcaagagggacgtggaccacaccctcgtggaatatgttactatcatgctcaagaatggaaagcgtaaggatctcgccagtaaagaactccgtgtatttctaggggatgatactgcagtattcatttcctggttgtgggaccatctttctctaaatatgtacttatatgtgcaagcacaagaacaaactcaggaggttaaggatgatgaagcccccaaagaagtatctggaagagaaaaatcatcagatgtgctcccgagaagcaaatgtcaaactcatagtgagcacacagttgaatcaagtgcagctagtactaggaaacggaataagcgggaatggaaaggaattggtcgggagggtaatgaaaaatttccacttcgaaatgtactaactgatattcttcacggggaggagaaaagatcgcaaaagtccaatgaaatacgacaccctccatcaaaacaacagaacggcagaaagcgtgacagggatgatgagccacagcaaacaaagagagacgtctcatcacgccccatgcttggtggtggtgcttcccgtcgtcttctacagtttgctgttcgagatgcagtaaaagctgtacagccaaccagcaccaatgctgaaccagcatccaagcgtctgcgctctgtggttgccactacttctgcagagaacatgcatgataggagatcagaaagatctcaggactacctgaacgatagaagatcagaaagatctcaagacaacttgagtgacagaagatcagaaagaactaggccaatgctacaggtacaaggagctgctttagctcttagagctgcagcggaagctgctgcagattctacaaaggttagatctactggaagtgttttcaagcgattgggtcaagggaatgttgtgaaacagccatctcgttctcgtgatgagaagagagatttcgaagattttgagccagctacgaccgcagatgaacatgattctgatcgatatgttaataatgaggaatctgaagaggaatctggagagctgaccatggcagatagggtagctggaatgaatgttgattcgagctctgaggatgatatggaccgagatgaggggattacaagataccaaacttctctttcacatgaagatactttctcaccatttgcagagaagaaaactgtatcagcacaatgcagcgtcgaaccagagaccgatgcaataaggccttcaagtgtgaatgacaaggagcaacctgttccttcatcaacaaaaacagcaagtaaagctgtggctatttctgttgatgtaaatatggtggaaccttccagttatgaaacaccaaaagatgttcatgttgtggagaagccttatgttacacccatgaattcaaatgccaccacactggctaccaatgccaaagaagtaggccatgcagaagctcaaaaggattctcagcggtctgcaccatctgttccggtttcatatagcacagcgcatccgacggaggatgcagattcgagaacactttatgttagcaatgttcactttgctgccaccaaggactcattatctcgccatttcaacaagtttggtgcagttctaaaagtagtcattgtcactaatgctgcaacgggccagccaacagggtctgcctatgtagagttcttacacaaagaatcagctgaacgagcgttgtcgttgaatggcacatcatttatgactcgcattctcaaggtcgtccggcgaagttctcatgaagcagctcacttttatggttggcctggtagtggacggtcatcattatatggtaggcatggtaggatggcatacccaagagctgttctccccggtggttcctttagagggcgtgctccgatgaaagctggcgctagaagtttacagtggaaacgggagccttcaggcactgattcaagtgcaggtgcgaaaactgacatgagtgtgccattttcctctgaacaggtgctcccacctgcaacatag

SEQ ID NO: 2848 - protein, 694 aa, Sorghum bicolor
MDEADDELRTLKVGFTAAGEEQFRKLVAEKLRGFKRDVDHTLVEYVTIMLKNGKRKDLASKELRVFLGDDTAVFISWLWDHLSLNMYLYVQAQEQTQEVKDDEAPKEVSGREKSSDVLPRSKCQTHSEHTVESSAASTRKRNKREWKGIGREGNEKFPLRNVLTDILHGEEKRSQKSNEIRHPPSKQQNGRKRDRDDEPQQTKRDVSSRPMLGGGASRRLLQFAVRDAVKAVQPTSTNAEPASKRLRSVVATTSAENMHDRRSERSQDYLNDRRSERSQDNLSDRRSERTRPMLQVQGAALALRAAAEAAADSTKVRSTGSVFKRLGQGNVVKQPSRSRDEKRDFEDFEPATTADEHDSDRYVNNEESEEESGELTMADRVAGMNVDSSSEDDMDRDEGITRYQTSLSHEDTFSPFAEKKTVSAQCSVEPETDAIRPSSVNDKEQPVPSSTKTASKAVAISVDVNMVEPSSYETPKDVHVVEKPYVTPMNSNATTLATNAKEVGHAEAQKDSQRSAPSVPVSYSTAHPTEDADSRTLYVSNVHFAATKDSLSRHFNKFGAVLKVVIVTNAATGQPTGSAYVEFLHKESAERALSLNGTSFMTRILKVVRRSSHEAAHFYGWPGSGRSSLYGRHGRMAYPRAVLPGGSFRGRAPMKAGARSLQWKREPSGTDSSAGAKTDMSVPFSSEQVLPPAT

SEQ ID NO: 2849 - DNA, 789 bp, Sorghum bicolor
atgatggagttcaaaactggcatttttactgtggccatactagccattgtgctgtcctcaccagcagttgctcagaagagcccacctgctccatcagctacaatccttccaccagcgccagcacccgcacctgcgccgcgccatgttgacctcgctgatctcctcagtgtggccggaccgttccacaccttcctggactacctgcagaagaccaatgtcatcgagaccttccagaaccaggcgaacgacacaaagaacggcatcaccatctttgtgcccaaggactctgcgttcgccgcgctcaagaagacaacatttgccaacctcacccaggaccagctcaagtccctgctcctgtaccacgcgttccccaaatactactccctggctgagttcgacaaactgagcactctcaacccagtgaccacctttgccggctcgcagtacacgctgaacctcacctacaacatgggcaccatccaagtgaaatcgatgtggtccaaccccaagatcagcagcagcgtgtactcaacccgcccggtcgctgtgtacgaggtcaacaaggtcctcttgccaatgcaaatcttcaagagcgacccaccgctggcgcctgcccctgctcccgcccctgactccaaggcctctgatgttgctcccagcccaaggtcagggaaatcagcaagcgcaaaggcgaaggcggatgagaagagttcgtcgcaccaagttggtgccgacgttgcccattacctggcgcttgctgtctcaggtgtcctgatgctgttgtggtga

SEQ ID NO: 2850 - protein, 262 aa, Sorghum bicolor
MMEFKTGIFTVAILAIVLSSPAVAQKSPPAPSATILPPAPAPAPAPRHVDLADLLSVAGPFHTFLDYLQKTNVIETFQNQANDTKNGITIFVPKDSAFAALKKTTFANLTQDQLKSLLLYHAFPKYYSLAEFDKLSTLNPVTTFAGSQYTLNLTYNMGTIQVKSMWSNPKISSSVYSTRPVAVYEVNKVLLPMQIFKSDPPLAPAPAPAPDSKASDVAPSPRSGKSASAKAKADEKSSSHQVGADVAHYLALAVSGVLMLLW

SEQ ID NO: 2851 - DNA, 2292 bp, Sorghum bicolor
atgaataccaatgtagtagtggctagtaaaacagttgtagcacttgctgctctagtcgcgacgacgctgccgatgctcccacctagcagcgcggcacaagcagctgcaactgcaactacaacagccactggtctgggcagtactagctgcacaaggacctgcggcaacatcagcatcccgtacccgttcggcgtggagcctggctgctaccacgccgccggcttcaacctcacctgcaagcagcagcactcccaccaccaccatcatcagccacccaagctgttcctcggcgacggcaccgtgcaggtgctagacatctctgttgaacacaacacggtgtgcatcaacagccccggcgtgcagttgcagtatgatagcattagccaaattggtcctgctaacgggacatggggcctcgggctcccaaagaccggaccgtacttcctgtcggagtcagctagcatggtcgaggcgatagggtgcagcatccaggtcagcatcctagggggactgaataacagcctggtgagttcttgcactgctatctgcccacttattttctccaaaggtggtggcgtcagcggaacgataggaaatggcaactgcactggcattggttgctgtcgggccagcatcgttgtaggctactcttcctacacaatccagattgaacgcatatctggcccgggctggtacgttcctacttctgtattcatagtcgaccagagtttctttgtcagtatcaactcgaatggagaacgaattcctggatcccttactacggccacactagactggataattggtacttcgacatgtcctacaaacaataagaccgccccagaatgtctcagtagtcacagctattgccaaaattcctcttcgttgggccatggtgggtatacatgtcaatgcgcaaatggttatcaaggcaatccttatgttcatggtggatgccaagatatcgacgagtgcaaataccccaaccaatatgtttgctatggtgtttgcaagaatacaccaggaagttatatttgccaatgcaacacgggctatacaggcaatgcttccatcccaaatggatgcacaggtttaagcattgggctaggagttggtggtgggacaggtcttttgcttctagcccttggtggaccctacataatgcataaaatcaagcttcaaaaggcgaataaggtgaaacaaaggttattcaagcaaaatcatgggctacttttacagcagttaatatcacacaatactgatattagtgaaaggatgataattaccctaagtggtatagagaaggcaacaaataattttgacaaagctcgcatcgttggtggtggagggcatggtgtcgtgtttaagggaattctagatctacaagttgtggcagtcaaaaaatcaaagatagtagtgcaacgagaaatcaatgaattcataaatgaagttgcagttctttctcaagtaaaccatagaaacgtggtgaagctcttaggatgttgccttgagacagaagtcccattgctagtttatgagttcatttcaaatggaaccctttgtcatcaccttcacattgatggccccatatcactaccatgggatgatcgaatgagaatagcaactgaagttgcaaaagctctatcctatctgcattcagctgcttcaatgccagtgtttcatagagatattaagtcagcaaatatacttcttgatgatgctttaactgcaaaggtatcagattttggagcttctagatatatcccgattgatcagacaggagtgactacggtagttcaaggaacaatgggctatttggatccaatgtattattacacgggccggttaacagacaagagtgatgttttcagttttggtgttcttcttgtagaattgcttactcgaaaaaaaccatacgtctacaggtcagtagacaatgatggtcttgtttcacattttgtctcactgcttgcagaaggcaaactagttgacataattgatcctcaagttatggaggagaaaggtggagaaatccaagaagttatcacactagcagcaatgtgcacaaaattgaagggagaagataggcctacgatgagggaagtggagatgacccttgaaagcttgctagttaataagaagaggctggttcaatataatggaacaccaatgagtaactgtggggatgaagctacaactcattacatggcaattggtagagattgtaatgaagctagcaggcaatacactatggaagaggaaatttggttatcagcaagttatcctcggtga

SEQ ID NO: 2852 - protein, 763 aa, Sorghum bicolor
MNTNVVVASKTVVALAALVATTLPMLPPSSAAQAAATATTTATGLGSTSCTRTCGNISIPYPFGVEPGCYHAAGFNLTCKQQHSHHHHHQPPKLFLGDGTVQVLDISVEHNTVCINSPGVQLQYDSISQIGPANGTWGLGLPKTGPYFLSESASMVEAIGCSIQVSILGGLNNSLVSSCTAICPLIFSKGGGVSGTIGNGNCTGIGCCRASIVVGYSSYTIQIERISGPGWYVPTSVFIVDQSFFVSINSNGERIPGSLTTATLDWIIGTSTCPTNNKTAPECLSSHSYCQNSSSLGHGGYTCQCANGYQGNPYVHGGCQDIDECKYPNQYVCYGVCKNTPGSYICQCNTGYTGNASIPNGCTGLSIGLGVGGGTGLLLLALGGPYIMHKIKLQKANKVKQRLFKQNHGLLLQQLISHNTDISERMIITLSGIEKATNNFDKARIVGGGGHGVVFKGILDLQVVAVKKSKIVVQREINEFINEVAVLSQVNHRNVVKLLGCCLETEVPLLVYEFISNGTLCHHLHIDGPISLPWDDRMRIATEVAKALSYLHSAASMPVFHRDIKSANILLDDALTAKVSDFGASRYIPIDQTGVTTVVQGTMGYLDPMYYYTGRLTDKSDVFSFGVLLVELLTRKKPYVYRSVDNDGLVSHFVSLLAEGKLVDIIDPQVMEEKGGEIQEVITLAAMCTKLKGEDRPTMREVEMTLESLLVNKKRLVQYNGTPMSNCGDEATTHYMAIGRDCNEASRQYTMEEEIWLSASYPR

SEQ ID NO: 2853 - DNA, 540 bp, Sorghum bicolor
atggagtcctcctctcacatcaccggggaggacgacggagagggctgcaacagctgcgagtccggctggacaatgtaccttgcctcgcccatgcatatgcatggccacgccggcgacgacgctgccggcagcggcaagagcagcggcagccaagggagcagcgtcgacgacggctacggctacatgatcagccgcggcaaccagcagggctaccaacattacgccgacgccgacgacgacgactccctcgcgtccgatgcctccaccggcccagctaaagtgaagtcgtcgccatcgtcgtcaccgccggaataccaacaacgccgcaaagatgatgacgatgacgatggagggcatcatcatggtcatggcaaggagcaggaggaggacgatggcgcacgcacaaagctcgccaccagctcccgcaagaaagctgctgctggcaatggaggaggaggaggagcagagggcaactcatcaaggcgaggccacagcaagagaggcggcggctcttcaaggagaagcttcttcctctggtaa

SEQ ID NO: 2854 - protein, 179 aa, Sorghum bicolor
MESSSHITGEDDGEGCNSCESGWTMYLASPMHMHGHAGDDAAGSGKSSGSQGSSVDDGYGYMISRGNQQGYQHYADADDDDSLASDASTGPAKVKSSPSSSPPEYQQRRKDDDDDDGGHHHGHGKEQEEDDGARTKLATSSRKKAAAGNGGGGGAEGNSSRRGHSKRGGGSSRRSFFLW

SEQ ID NO: 2855 - DNA, 2727 bp, Sorghum bicolor
atggcgaccgccgtggcgtcgcagccgcgccacctccccctcggcgccggcggagagcccaggtgcacggccagcacatcgaaggttcatactctggagaaagtatatggtttcagattcctatgtagaagcgttgttgatgtaaagagccacaaattccactcccgcatttcaaagaggaagtgcgacttgaggaactcaccgtcggagtgtgacaggaccatccacagtgctagatggttggagtttcggagacacaagggactcttccagagaactagaaggatggttcacattattccattggcttctgacgatgatggcaaccgtgtatctgttaatggagctccgcaagttggttcgacaagcaacattgatgaaataaggttgaaactgaataaagcattgcagagtgaagatatcagcaatggactcgtccagtcagtacatgatgctgcgagatctattgagttggctttcatagagcacagcaaatcgtcaaagagctcatggtttccaaagacatggctgggtgttgagaacaatgcttggataaaatcactgtcttaccaggctgctgtagactcattgttgcaagcagttattgatgtttcatctcgtgggaatggcagagatagagatattaatgtatttgttcaacggagtttgtcccgcctgctcacccccctcgagagtgttatcaagaatgaattgtctaagagggaacctacattgtatgaatggtattcgtccaatcaaaatcctttggtggtgggacaatttgtaaacatttttgaaaaggatccaatgtttaactctgctacagcaatatgtcgtgaaggggagccaatgaatactagtgaaagtgatctttctctgcttatgctaggattgatctgtcttgctgcaatcacaaagcttggatcagcaaaagtttcttgtcagcaattttcttcaatggtgcctgatattattggtcgattcatggatatgcttcttgagtttgctcctctaagtaaagcatataacttgacgaaagatattggccttcagagagaatttttgtataattttggtcctcgtgctgctgttcctaaacttggtaatgatcatgggcttgagatatcattttggattgaattggttcagaaacaattactccgggcacttgatcgtgaaaagatatggtcaagactgacaacaagtgaaagtattgaggttctggaaaaggatcttgcaatatttggttttttcattgctttgggtagaagcacacaaggatatttgtcttccaagggtctgactgatttggatgattcactgaatggtattgtaaggtatcttatcggtgggagtgtactatattatccacagctgtcctcaattagttcatatcagctgtatgtggaggtagtctgtgaagagctcgagtggcttcctttttacaatgatgatgttccaagtgcaaaaactgatactgaaggcagagaagaagtgtctaaaggagaagtcatatcaagagtcctaaatgtgtgctcttactggatgactagttttataaagtacagctcatggcttgagaacccttcaaatgtgaaggcggcaaaattcctttctaagggacatgccatgttgagtgactgcatgaaggagcttgacatatcaagaaataatatgtcaaaaggctgtggcttcccaggacctgaagaagaattggatactggaacagagttagcttcctttgacaagtcacttgaaagtgttgaagaagctttggttaagttagaaaatttgcttcaagaattacacgtttccagttcgaactctggtaaggaggatctacaggctgcatgctctgatcttgaaatgataagaagactgaagaaagaagctgagtttcttgaggcatcctttcgagcaaaagcagaatatctggaggccgatgcacctgcagaggaaggacgtgtaaagacaggtagcaggacgaacgatacatcagcaccacaaaaatcaggaagcagggtggataataaacgccgtccattttgggacttctttggtcggtctttgggaaagaaagttgatccagctcttgcagatcaggatggcactgttgacaatgtggagaagaaagatggggagtcaaatgacatcctccgctttgaacagttaaggcgtgagctgattgagttagaaaagcgggtgcagaagagtgcagatgaagctcaaaaggaggaggagatggttgtcacagacgaaataattgcgccatcacctggttcatcagttccttccggccaggctaccaagaaagaaaatgtcataactaaatcagtggagaaggtcaaagagactacaacgactgtgttgcaggggacacaactcttagcaattgatacaggagctgctatgggtttgctaaaaagagctcttattggggatgaactaactcagaaggaaaagcaggctcttcaaagaaccttgacagatttggcatctgttgttcctataggaatactcatgcttttgccactcaccgccgttggtcatgctgctattttggctttcatccaaagatatgtgccatcgatgatcccgtccacatatgctcccgataggttggatctccttagacagcttgagaaagtgaaggaaatggaagttgctgaaggcagcagtgaagatatattggaggccgttggttcgagaactgagcaagtgaaataa

SEQ ID NO: 2856 - protein, 908 aa, Sorghum bicolor
MATAVASQPRHLPLGAGGEPRCTASTSKVHTLEKVYGFRFLCRSVVDVKSHKFHSRISKRKCDLRNSPSECDRTIHSARWLEFRRHKGLFQRTRRMVHIIPLASDDDGNRVSVNGAPQVGSTSNIDEIRLKLNKALQSEDISNGLVQSVHDAARSIELAFIEHSKSSKSSWFPKTWLGVENNAWIKSLSYQAAVDSLLQAVIDVSSRGNGRDRDINVFVQRSLSRLLTPLESVIKNELSKREPTLYEWYSSNQNPLVVGQFVNIFEKDPMFNSATAICREGEPMNTSESDLSLLMLGLICLAAITKLGSAKVSCQQFSSMVPDIIGRFMDMLLEFAPLSKAYNLTKDIGLQREFLYNFGPRAAVPKLGNDHGLEISFWIELVQKQLLRALDREKIWSRLTTSESIEVLEKDLAIFGFFIALGRSTQGYLSSKGLTDLDDSLNGIVRYLIGGSVLYYPQLSSISSYQLYVEVVCEELEWLPFYNDDVPSAKTDTEGREEVSKGEVISRVLNVCSYWMTSFIKYSSWLENPSNVKAAKFLSKGHAMLSDCMKELDISRNNMSKGCGFPGPEEELDTGTELASFDKSLESVEEALVKLENLLQELHVSSSNSGKEDLQAACSDLEMIRRLKKEAEFLEASFRAKAEYLEADAPAEEGRVKTGSRTNDTSAPQKSGSRVDNKRRPFWDFFGRSLGKKVDPALADQDGTVDNVEKKDGESNDILRFEQLRRELIELEKRVQKSADEAQKEEEMVVTDEIIAPSPGSSVPSGQATKKENVITKSVEKVKETTTTVLQGTQLLAIDTGAAMGLLKRALIGDELTQKEKQALQRTLTDLASVVPIGILMLLPLTAVGHAAILAFIQRYVPSMIPSTYAPDRLDLLRQLEKVKEMEVAEGSSEDILEAVGSRTEQVK

SEQ ID NO: 2857 - DNA, 1260 bp, Sorghum bicolor
atgctaagttggctccgacgcttccctaacgatgtgatccataggaagggcggcaatggcaccacaggccggaggacctcctccaccacctcttggaggaacaagagcaacagcttcaccgcacgaatcatccgttgtgcctcctccgtcgtcgacacggcaggccgccgacacgacgacgacgacgacgacgatgatgattgtcgtctaccgtcgtcgcctcctcctcctcctcctcctcctccagcagcaccaccaaatgataacaacagaaacaccagtgtcgtcctcgcagccaaagccttctctttccgcgagctcgctgacgccgcagggaactttcggcaagccaacttcctcggcgagggaggtttcggccgcgtctacaagggccgcctgcacaataacattgctggtgaggaccttccggtggccatcaagcagctggatcgcaatggcttccagggcaacaatgagttcatggtggaggtgctcatgctcagcatgctacaccaccccaaccttgtcagcctcgttggttactgcgctgagggtgaccaacgcctgctggtctatgagtacatggcattaggatccctcgaggaccacctgttgttgcttcctgccgatgccgatgatggcagccaccagcggcagcctctgccatggcgcacgaggatgaagatcgcgctcggcgcggcgcagggcctagagtacctacatgaaaacacagtcatctacagagatctcaagtcctccaacatcctcctcgaccaagactacagtcccaagctctccgacttcgggcttgccaagctcctccccgccccgcgaactgactactcatcgtcgtcaagcagaagcagcagcagcagcagcagcaaggtgatgggcacgtatgggtactgcgcgccggagtacctgcggacaggaaagctgagcgtcaagtcggacgtgtatagcttcggggttctactgctggagctcatcaccgggcgacgagccatcgacgccagccggccggacggcgagcaaagcctggtgggatgggcggcacggatatttggtgaccccaagaggttccatgagttggtggaccctcgcttggtgatggcaatgcgagtgcctacaacgtcagagttgaagcaggccgtgggtgtggcatccatgtgcttgcaggaacactacgccctgcgtcccgtcatgaccgacgtcgtcgtcgccctttccttcctcgccactgattctcccccctgctaa

SEQ ID NO: 2858 - protein, 419 aa, Sorghum bicolor
MLSWLRRFPNDVIHRKGGNGTTGRRTSSTTSWRNKSNSFTARIIRCASSVVDTAGRRHDDDDDDDDDCRLPSSPPPPPPPPPAAPPNDNNRNTSVVLAAKAFSFRELADAAGNFRQANFLGEGGFGRVYKGRLHNNIAGEDLPVAIKQLDRNGFQGNNEFMVEVLMLSMLHHPNLVSLVGYCAEGDQRLLVYEYMALGSLEDHLLLLPADADDGSHQRQPLPWRTRMKIALGAAQGLEYLHENTVIYRDLKSSNILLDQDYSPKLSDFGLAKLLPAPRTDYSSSSSRSSSSSSSKVMGTYGYCAPEYLRTGKLSVKSDVYSFGVLLLELITGRRAIDASRPDGEQSLVGWAARIFGDPKRFHELVDPRLVMAMRVPTTSELKQAVGVASMCLQEHYALRPVMTDVVVALSFLATDSPPC

SEQ ID NO: 2859 - DNA, 1734 bp, Sorghum bicolor
atgatgatggcgcaaccggaaccggaagggggccagcagcagcagcagcagcggaggaacgccggcggcggcggccggggggacgaggcatggcggcggtgggcgatgctggtggcgacggtgtggatccaagctctgacggggaccaacttcgacttctcggcctactcgtcggcgctgaaatcgtcgctggggatctcccaggaggcgctcaactacctagccacggcgtcggacatgggcaaggcgctggggtggtcgtcggggctggcgctgctctacatgccgctccacgccgtgctcatgctctccgccgccatggggctcgccgcctacgccgtccagtacttgtgcctcgtcgcgtccgtcgccgtcccttaccctctggtgttcttggtctgcttgatagcagggtgcagcatctgctggttcaacacagtctgctttgttctctgcatacgcagcttctctgcaaacaaccgctctctagccctctccctctcaataagcttcaacgggctcagcgctgccttctacactctctttgggaatgccctcgccccttcctcaccagctgtatacctcctcctcaatgcgatcctcccttttggtgtctctgttcttgcactcccagcgatcctcctctgccacaaaaatgacggccacctccaaagcacgcccaggcatgacaggcgtgtcttccttggtctctacatcctcgcattcatcacgggcatatatctggtggtctttggatctttcaccgcaaccagctctactgcatgggtcatcctcacaggtgccatggtcctcctcgcccttcctctcatcatccctgcctgctccagttgctcatatgtggatacagatggccctgaccctgcatcgctactaaaccatgatgatccacataagccactcctaatcagtaacaatcgtcagatggagtccaatgcgatgacgcaaaaaccaatggagcaccagatgcagggaaattgttgtggaacaatagtgggcaagggccgcctggtggcgctcagtgaagaacatagtgcaaagaagctcattcggtgtgtggacttctggctctactacacagcctacttctgtggagccactgttggcctggtatacagcaacaacttggggcagattgcacagtcattgcaccagcagtcacagctcaccatgctacttgctgtctactcatcctcctccttcttcggtcgtcttctttctgcactacctgacattcttcacaggaaggtaccacttgctcgcacagggtggcttgctgctgcattggtccccatgccaatggcctttttccttatgtggaaccaacaagatgcaagcaccctggtagcaggaacagcactagttggcctaagctcagggttcatctttgctgcagcagtgtcagtgacctccgagctctttggaccaaatagcgttggggtgaatcacaacatcctaatcaccaatatcccattgggctcactcctctatggccagattgctgccatggtatacgatggaaatggccaaaagatgacagtaatggataaccgcactggcattgttgaaaccatgattgtgtgcatggggatgaagtgctactcaaccaccttcttcctgtgggcttgcatcacatttctagggttagcatcaagcatagctctattcatacgaacaaaaccagcttatgctgctgctgctagccggtcaagttga

SEQ ID NO: 2860 - protein, 577 aa, Sorghum bicolor
MMMAQPEPEGGQQQQQQRRNAGGGGRGDEAWRRWAMLVATVWIQALTGTNFDFSAYSSALKSSLGISQEALNYLATASDMGKALGWSSGLALLYMPLHAVLMLSAAMGLAAYAVQYLCLVASVAVPYPLVFLVCLIAGCSICWFNTVCFVLCIRSFSANNRSLALSLSISFNGLSAAFYTLFGNALAPSSPAVYLLLNAILPFGVSVLALPAILLCHKNDGHLQSTPRHDRRVFLGLYILAFITGIYLVVFGSFTATSSTAWVILTGAMVLLALPLIIPACSSCSYVDTDGPDPASLLNHDDPHKPLLISNNRQMESNAMTQKPMEHQMQGNCCGTIVGKGRLVALSEEHSAKKLIRCVDFWLYYTAYFCGATVGLVYSNNLGQIAQSLHQQSQLTMLLAVYSSSSFFGRLLSALPDILHRKVPLARTGWLAAALVPMPMAFFLMWNQQDASTLVAGTALVGLSSGFIFAAAVSVTSELFGPNSVGVNHNILITNIPLGSLLYGQIAAMVYDGNGQKMTVMDNRTGIVETMIVCMGMKCYSTTFFLWACITFLGLASSIALFIRTKPAYAAAASRSS

SEQ ID NO: 2861 - DNA, 1701 bp, Sorghum bicolor
atggcgccggccaacaatgtttcaaatggtggcagcgaagaagaagcgaggtacccgctgaacgccgagtcgtaccgcctgctgtgcaagatcgggagcggcgtgagcgcggtggtgtacaaggccgtgtgcctgcctctgggctcctcgtcgtcgtcgtcggcggtggtggccatcaaggcgatcgacctggagcggtcgcgcgtcgacctcgacggcgtgcggcgggaggcgaaggccatggcgctgctgtcccaccgcaacgtgctccgcgcgcactgctccttcaccgtggggagccacctgtgggtggtgatgcccttcatgggcgccggctcgctgcactccatcctgcgccacggctttcccggcggcctgccggagccgtgcgtcgccgtcgtgctcgccgagacgctccgcgcgctgtgctacctccacgggcagggccgcatccaccgcgacatcaaggcgggcaacatcctggtggactcggacggcgccgtcaagctcgccgacttcggcgtctcggcgtccatctacgagaccatgcacgcgtcggcgtcggcgtcggcggcgacggcggcgctggggctcggctcgtcggcgtcctgctgcttcaacgacgtggcggggacgccgtactggatggcgcccgaggtgatccactcccacgtcggctacggcatcaaggccgacatctggtcgttcggcatcacggcgctggagctcgcgcacggccggccgccgctgtcgcacctgccgccgtccaagtcgatgctgatgaggatcaccagccgcgtccgcctcgaggacgaggagagcgccgccgcgagcagcagcagcaacaagttctccagggcgttcaaggacatggtgtccgcctgcctctgccaggagccggccaagcggccgtcggcggagaagctgctccgccacccgttcttcaaggcctgcagccgtcgctccaaggacttcctcgtccgcaacgtcctcgccgccgtcccgagcatcgaggagcggtgcagcaaggacgacgacgcggggaatgatctctgcgggtgtgtcgtcggcgccaggggcggcggcgcacgctgcgtgtcgccgtgccgtcgccacgccgccgacgacgacgtcgtcggcgtcaagaaccgacggatcagcggatggaacttcaacgaggacaacctggagcttgatccgacgacgaccgaggagccggcggcggagaagaggtgcgtcccgttcgagaacccggtagtagaactggacgacagtgactccaccggagatggagatcgacgacgacggccgtcgcatggggatgaagatcaggatcacgggaaggcggcagaggtggtagggtttaaggagcagcaggaagtggtgacacggaagctgatggccgtcctgcagagcctggagatgcaaagggacatggtgacgaacgtgttggaacgcaccgccggtagcttcgacggcggcggcaatggcggcgcctgtggtgagagcgtgacaggtccaaggcaggaggagagggaagagatgctgcttgggtacgtccggcagctggagcacagggtgggagacctgaggatggaggtcgaggaggagatggcatggaacgcccggctggagaagatgatgctgcaagagaaggagataaactcatctcaggcgtcggctgggaacagttttagttga

SEQ ID NO: 2862 - protein, 566 aa, Sorghum bicolor
MAPANNVSNGGSEEEARYPLNAESYRLLCKIGSGVSAVVYKAVCLPLGSSSSSSAVVAIKAIDLERSRVDLDGVRREAKAMALLSHRNVLRAHCSFTVGSHLWVVMPFMGAGSLHSILRHGFPGGLPEPCVAVVLAETLRALCYLHGQGRIHRDIKAGNILVDSDGAVKLADFGVSASIYETMHASASASAATAALGLGSSASCCFNDVAGTPYWMAPEVIHSHVGYGIKADIWSFGITALELAHGRPPLSHLPPSKSMLMRITSRVRLEDEESAAASSSSNKFSRAFKDMVSACLCQEPAKRPSAEKLLRHPFFKACSRRSKDFLVRNVLAAVPSIEERCSKDDDAGNDLCGCVVGARGGGARCVSPCRRHAADDDVVGVKNRRISGWNFNEDNLELDPTTTEEPAAEKRCVPFENPVVELDDSDSTGDGDRRRRPSHGDEDQDHGKAAEVVGFKEQQEVVTRKLMAVLQSLEMQRDMVTNVLERTAGSFDGGGNGGACGESVTGPRQEEREEMLLGYVRQLEHRVGDLRMEVEEEMAWNARLEKMMLQEKEINSSQASAGNSFS

SEQ ID NO: 2863 - DNA, 4077 bp, Sorghum bicolor
atggcccatgtttcgttcaaaagcaaagatgtggatggcggcatgtcccgatggtccgagtatctaagtgttgaagagccaattccttcggcattggcaacctggaggaacatgggtgttgatgggccgcaaggctcttctgccggtagccacaaacatcttcagatggagccggtggttcagctgtcaaaggttgcggcaggcttgcttgccaaaatgtaccgactgaacagcatcctggactatccagatccaaacacacacacattctcagattcattttggaaagctggtgtctttccgaatttcccaaaaatttgcatcacactgtcaaaaaagttccctgagcatccaaacaaactgcagctggaaagggtagataagtttgctcttgatgctttaaacgagaatgctgaaggttacatgcacaatcttgagcagtggatcctgttgcttcttgatttgctggcatttcgtgaacaagcgttgcgacttattttggatttgagcagcacagtcataacattgctgccacaccagaacactttaattcttcatgcttttatggatctgttttgttcatttgtccgagtgaatcttttctctgataagatgccaagaaagatgatcctccaggtttacaacatcttgcacgtaatgctaaagggtggtcgtgattgtgagttttatcaccgattggttcaatttgtggactcttatgatccacctatcaaggggttgcatgaagatcttaattttgtgagcccaagaattggagaggtcctggaagctgttggcccaattatctttctttcaactgatacaaaaaagttaaggaacgaaggtttcctcagtccatttcatccacgttatccagacatcctaacaaactccgcccatccaatgagggcccaagacttggctaatgttacatcataccgtgagtgggttcttctaggatatcttgtttgtcctgatgaactacttagggtgaccagcatagatgttgccatggttgttctgaaagaaaacttaatacttcctctgttcagagatgagtacatcttacttcatgaaaattatcaactttatgttcttccaaaagttctagaatcaaagagaatggctaaatctggccgaactaagcaaaaggaagctgatttggagtacaatgttgcaaagcaggttgagagaatgttaacggaagtgcatgagcaagcactagtctcatgtgatgctatgcatcgtgaaaggagaattcttcttaagcaggaaattggaaggatggttttatttttcacagatcaacctagcctcctagcacctaatattcagatggtcttttctgctcttgctttgtctcaatgcgaggtgatttggtacttccaacatgtgggggttgcagcatcaaaatctactcgagtgaaaactgttgacattgatgcgacagacccaactattggtttcttactagatggaataggcaaactttgttgcctggttcgtaaatacatagcagcaataaaaggttatgcattatcatatttgtcatccagtgctggaagaatacggttcttacttggtactccaggaatggttgctcttgacctagatgcgacactgaagggcctttttcagcaagtcctccattgtctggagaacattccaaaacctcagggggaaagtgttcctgccattactgctgacttgactgatttgcgtaagcactggctctccattttgatgatagtcacatcttcacgatcctcgataaacatcaagcacttggagaaggctactgtgtctactgggaaggagggtttggtgtcagaaggcaatgctgcatataattggtcaagatgtgtggatgaacttgagctccaactctccaaacatggaagccttaaaaaactctacttttatcatcagcatcttaccacagtcttcagaaatacaatgtttggcccagaaggtcgtccacaacattgttgtgcttggcttggaacagcttgcagttttccagaatgtgcttctgcaattattcctgaagaggttaacaaaattggcagagattctatctcttatgtggagtctcttattgagtctatcatgggtggattggaaggtttgataaatattctagattcagaaggtggatttggctcattagagatgcagctttccccagagcaagcagctcttcgcttaaataacacaacaagagcaaaaggtgtttcaagcttgttaactccaggacatgagagctatcctgataatagttcatcaattaagatgctggaagctgctatgcaaaggctgacaagtttgtgttctgttctaaatgacatggagcccatttgtgttctcaaccatgtttttgttctacgtgagtacatgagagactgcatcgtaggaaatttcaggagaagatttcatagtatgattagaactgagaactgcattcagcgaccatcagtcatagaatctcttctaagaagacatctgggcatcgtccatctagcagagcagcatattagtatggaccttactgaaggcatacgtgaagtgctgctagcagagagttatactggcccatttcccaatctgcaaatgtttgagactccagtggggacacaaggagggggatctgctgttgagatgatatgcaattggtatattgagaatgtagtaaaggatgcttctcgcattggagttgcttttgatgcaatccaaaattgcttcaggagctcacaacctattggtggtggatgtttagctgaagcatttacagataaaagagaacttaaatcacttgttcgtctttttggtggctatggaatagataaaatggataagatgctaagggagcatacatctgcgcttttaaattgtattgattcagcattgaggtcaaatcgtgatgccttagagggcctagctggaagtgtaaattctggcgataggattgaaagggatgcgaatctgaagcaaattattgatcttgaaacattggctgatctctgtattcaagcagggcaggcaataactttccgccggctgttggttgagtctgttggagcagttcttgaagagaaagtacctctcatatattctctgctcaaaggattagccttgcagttgccagacgaggtacctgataaaaatgagataattagattgagaaaggttgcaagcagtgttggtgttggtgacaaacatgatgctgagtgggtacactcaattctggcagaagctggtgcagctaatgataattcttggatcctacttccatacctttgtgctgcatttatggtgtccaacatttggaatggtgctgtttatgatgtcaatataggtggattcaataacaatttgcactgcctagcaaggtgtgtaagtgctatagttgggggaagcgaatacaccagggtcgaaagggagcagcgaataaattctctttcaaatggacatacagatgagctccaagaggctgagttaccaagccgtgtctcagcagaagcaaatattaaatcttctatgcagatctacgtcaaattgtctgcagggatcgtcctggattcatggaatgacactagcaggccacacatcgttccaaaactgatattcctggatcaactctgcgagctgtccccctacctcccaaggagcaccttagaagttcacataccatacaccatcctgcgctcaatataccaccagctatatggagcttcactgatgtcctcagaaccgatggagcaatccccaaggcagtcacctctgatctctcttgcgcacgcgtccccatccgcaagacaacatcgaccggagacaactcccaggtcgcacaccttcgagccaagctactatagctcgtcggggtcccagcacgatgatggctacgatgtggacaagaggaccggacagctgcggagcatgaggcgctccggaccgctcgacttcagtacgggcaggaaggtgaagttcgtcgagggctcaagctccgggagcagccatggtgctggctcgctgcagagattcgcagtgtcaagatctggccctctatcatacaaatag

SEQ ID NO: 2864 - protein, 1358 aa, Sorghum bicolor
MAHVSFKSKDVDGGMSRWSEYLSVEEPIPSALATWRNMGVDGPQGSSAGSHKHLQMEPVVQLSKVAAGLLAKMYRLNSILDYPDPNTHTFSDSFWKAGVFPNFPKICITLSKKFPEHPNKLQLERVDKFALDALNENAEGYMHNLEQWILLLLDLLAFREQALRLILDLSSTVITLLPHQNTLILHAFMDLFCSFVRVNLFSDKMPRKMILQVYNILHVMLKGGRDCEFYHRLVQFVDSYDPPIKGLHEDLNFVSPRIGEVLEAVGPIIFLSTDTKKLRNEGFLSPFHPRYPDILTNSAHPMRAQDLANVTSYREWVLLGYLVCPDELLRVTSIDVAMVVLKENLILPLFRDEYILLHENYQLYVLPKVLESKRMAKSGRTKQKEADLEYNVAKQVERMLTEVHEQALVSCDAMHRERRILLKQEIGRMVLFFTDQPSLLAPNIQMVFSALALSQCEVIWYFQHVGVAASKSTRVKTVDIDATDPTIGFLLDGIGKLCCLVRKYIAAIKGYALSYLSSSAGRIRFLLGTPGMVALDLDATLKGLFQQVLHCLENIPKPQGESVPAITADLTDLRKHWLSILMIVTSSRSSINIKHLEKATVSTGKEGLVSEGNAAYNWSRCVDELELQLSKHGSLKKLYFYHQHLTTVFRNTMFGPEGRPQHCCAWLGTACSFPECASAIIPEEVNKIGRDSISYVESLIESIMGGLEGLINILDSEGGFGSLEMQLSPEQAALRLNNTTRAKGVSSLLTPGHESYPDNSSSIKMLEAAMQRLTSLCSVLNDMEPICVLNHVFVLREYMRDCIVGNFRRRFHSMIRTENCIQRPSVIESLLRRHLGIVHLAEQHISMDLTEGIREVLLAESYTGPFPNLQMFETPVGTQGGGSAVEMICNWYIENVVKDASRIGVAFDAIQNCFRSSQPIGGGCLAEAFTDKRELKSLVRLFGGYGIDKMDKMLREHTSALLNCIDSALRSNRDALEGLAGSVNSGDRIERDANLKQIIDLETLADLCIQAGQAITFRRLLVESVGAVLEEKVPLIYSLLKGLALQLPDEVPDKNEIIRLRKVASSVGVGDKHDAEWVHSILAEAGAANDNSWILLPYLCAAFMVSNIWNGAVYDVNIGGFNNNLHCLARCVSAIVGGSEYTRVEREQRINSLSNGHTDELQEAELPSRVSAEANIKSSMQIYVKLSAGIVLDSWNDTSRPHIVPKLIFLDQLCELSPYLPRSTLEVHIPYTILRSIYHQLYGASLMSSEPMEQSPRQSPLISLAHASPSARQHRPETTPRSHTFEPSYYSSSGSQHDDGYDVDKRTGQLRSMRRSGPLDFSTGRKVKFVEGSSSGSSHGAGSLQRFAVSRSGPLSYK

SEQ ID NO: 2865 - DNA, 2076 bp, Sorghum bicolor
atggccgccgccgccaccgaggatgcgaaggagaaggagctcctgtcgtcggtggtgggcgacatccggagctactccggctccgaccctctccgcccgtggctccggtacggcacccgcacccaccgcttttgcttccttctgcctgttctctgctgcctccacgcatcgcttccttcgccccaccgaccggctgatccgcccgcctgcccgctgtctgctagggggttgcggaagatggagcgggcgctgctgccggcgacgctgcgggagaagctgcccaggttcctccagaagtgcgcccaggagttccaggatgacgcccgctaccgcgacgacccgcggtacctccgcgtctggatccagctgatggactacgtgacggatgcaaagccattgctcaagaagatggagaggaacggaataggcctcaaaagagcctcattctatatggcttatgcactatattatgagaagcacaagaggttcaatgatgcagagaagatgtactgtttgggaatccagaaccttgcagagcctattggggagttgcacagagcacatgaacagtttggttttcgcatggaatcatacaagaggaaaaataaagaaagaatgcccaggaaacctgggtctagcgctgcatctatgaaccaagtcaaaggtgaaagcagaaactctaaagaacagaaatccaatacaaagcaaacgtcaggaagtagttctaatccttcattaggctcttatcctccattagggccagctaaagttggtatgctctccagaggaaactcaggagcaaacaagaatctgtcccgttgtaatagtgatgatactgtagttgtacggtttataggctctgctttggttgggaaatcagagactgaagatgcctgtcaccatggcctagttgaaccaactacaaacactaaggaggctttggatgccatcaatggcatgtttatggagccactggaacctgaaactattctcaagaggcgatcaaagcgtgagaacccaaattataatcagcaaggaagtgcatttgatatctttgttgatggcgatgaacctagtggcaatgatacaaatatgctccagaacaacagtgtgaagcaagaccatacaaaattaagtcagcaaacaattggatttgagatctatgttgatgaggatggtcctaatggcaacgaccaaaatggaacacaaaacaggaactctagaaaggaaaacatgaagttaaatcaggaaccaagtgtgtttgagatttttgttgacgaggatggccctaatgacaacaaccaaaacgcagggcgaaacaggaactgtgggaaggaaaacatgaaggtaaatcaggacagcagtgggtttgaaatctttgttgatgaaaatgaggctaatggcactgtccggaatgctatgtgctacaagagtaataggtatcctccaagaccattatctgagtcatctaagcatcaaggcgaaagtgacttccagaagccatttgttggagggtttgcaatattgccaaatgatgaagaacaatgcgaggaaagttatggcggtgctaacataatttccagaactgtgcagcctactcatgacactagtactttgctctgtccagttcaaggtaattcaggaacaaggaatcgtgaaggtcctcatcctttgacttctgggattcgagaagacactgtcattcgtaggtttgttgggtccactattgatgatgagcccaaggtggaaaatgcatgccaccatgggttagttgatccaactgtcaatctaaaggaagcaatggatgatataaacaacatgtttggaaaaccactgaacttcaagggtgaaagaataaagagcaaaactaatgcacagtcagatggaaaagtagcttcagtttccggtttctccatattagctgatgatgacctaaaagagaactccaccagcaaatccagtcagagcaattcctgcaaatttgggtatgagaatggtctatttgaacccacaatcaccactcgtgatgtcatggcagagatcaacgatatgtttggaatgccactagacttgtaa

SEQ ID NO: 2866 - protein, 691 aa, Sorghum bicolor
MAAAATEDAKEKELLSSVVGDIRSYSGSDPLRPWLRYGTRTHRFCFLLPVLCCLHASLPSPHRPADPPACPLSARGLRKMERALLPATLREKLPRFLQKCAQEFQDDARYRDDPRYLRVWIQLMDYVTDAKPLLKKMERNGIGLKRASFYMAYALYYEKHKRFNDAEKMYCLGIQNLAEPIGELHRAHEQFGFRMESYKRKNKERMPRKPGSSAASMNQVKGESRNSKEQKSNTKQTSGSSSNPSLGSYPPLGPAKVGMLSRGNSGANKNLSRCNSDDTVVVRFIGSALVGKSETEDACHHGLVEPTTNTKEALDAINGMFMEPLEPETILKRRSKRENPNYNQQGSAFDIFVDGDEPSGNDTNMLQNNSVKQDHTKLSQQTIGFEIYVDEDGPNGNDQNGTQNRNSRKENMKLNQEPSVFEIFVDEDGPNDNNQNAGRNRNCGKENMKVNQDSSGFEIFVDENEANGTVRNAMCYKSNRYPPRPLSESSKHQGESDFQKPFVGGFAILPNDEEQCEESYGGANIISRTVQPTHDTSTLLCPVQGNSGTRNREGPHPLTSGIREDTVIRRFVGSTIDDEPKVENACHHGLVDPTVNLKEAMDDINNMFGKPLNFKGERIKSKTNAQSDGKVASVSGFSILADDDLKENSTSKSSQSNSCKFGYENGLFEPTITTRDVMAEINDMFGMPLDL

SEQ ID NO: 2867 - DNA, 1578 bp, Sorghum bicolor
atggagctgtccaccgtcgccgccgcagttgcctcggccgccgcgcgtccacacgggcatttctcctctccccgcgcggcctccgtctccgtctccgtctcgtggaacaacagtccctcgctcgcctccacctcacgacggcaaaggctgctgcggcggctccccgtcacctcggccgtcgtggagctccgccaagccgctgccgggggcggagactcgcttcgtgtcaccgagacgcggcagcctggatccagtgttaagttcagcgtggaggtgcctacttccatcattcacgactgttaccaaaccacgctacaggagtacgcgaaacgttttaaggttcctggatttcggcctgggaagatcattccagaaaacattcttataaactatgtaggaccgcaacatgtacaggatgccacaattgaagctgtcttgaaacatacacttcctcaagcattgtcctcggtagaggagagggcattagaagattctgttcgcattcttactcagtttgatgatatgagaaattctttctcactcgacaatgtgtttaggtatgatgttgctgtggatgttgtccctgaagtccgatggttatccgaagacaaatataagaacctcaaagttgtcgttgaaatagatgaagctgttgatgcagaaaaggcagcagaaaaagagcttcagcgacgtcataaagctctgggcttacttagagttgtggctgacagaggcctccagattggtgatctggtggtactagatatttttgcagacagcattaacagtgatggctctaaaggtgaaaaaatttcatctgccgagagtacaggtttccacttggacactgaggaaactaataaccttgttcctggatttcttggttcattaattgggattcgtcctggtgaagctagatcatttcctattcagttccctgagtcatttgagcaagaaagtctaagaggtgtccatgcacagtttactgttgtgtgtaaagagctcttctacagagagttgccagaaatgggtgactcacttgctgtaaagcttcttccaggatgcactacaatagacgaggttcgaggacgtattttggaaagatgtaaagaagtagagaaaatggccatagaacaagcaaccgataatgcaatccttgatcagctcgggaagttggttgaggttgatgttcctcgtgccttgtttcaagaacaaggccaacaactttacggagccaaacttctgcagcttcaggcagaaaggaagctagataaagaccagctagcatccttatcgacccagaggtcagttcaggcgtacctagaagatgagaaggagaatattacaagaatcattaaacagatgctggctgttggtgatgttttcaaatccgagaatttacagtactctactgaacagctcatcaaggaagttgaaaactccatagcagagttcaaacagtacaatcaagactatgatgaggacaacatcaggcaacaggtccaggatgttctagaggcagcgaaggtgcttgaatggctcaaggagaactgtacagtcgagtatatcaggcgatga

SEQ ID NO: 2868 - protein, 525 aa, Sorghum bicolor
MELSTVAAAVASAAARPHGHFSSPRAASVSVSVSWNNSPSLASTSRRQRLLRRLPVTSAVVELRQAAAGGGDSLRVTETRQPGSSVKFSVEVPTSIIHDCYQTTLQEYAKRFKVPGFRPGKIIPENILINYVGPQHVQDATIEAVLKHTLPQALSSVEERALEDSVRILTQFDDMRNSFSLDNVFRYDVAVDVVPEVRWLSEDKYKNLKVVVEIDEAVDAEKAAEKELQRRHKALGLLRVVADRGLQIGDLVVLDIFADSINSDGSKGEKISSAESTGFHLDTEETNNLVPGFLGSLIGIRPGEARSFPIQFPESFEQESLRGVHAQFTVVCKELFYRELPEMGDSLAVKLLPGCTTIDEVRGRILERCKEVEKMAIEQATDNAILDQLGKLVEVDVPRALFQEQGQQLYGAKLLQLQAERKLDKDQLASLSTQRSVQAYLEDEKENITRIIKQMLAVGDVFKSENLQYSTEQLIKEVENSIAEFKQYNQDYDEDNIRQQVQDVLEAAKVLEWLKENCTVEYIRR

SEQ ID NO: 2869 - DNA, 903 bp, Sorghum bicolor
atgctgcggcatctccagcgatccctccgcgccattcactgcctacccgccaccggccacgctgcctgctaccccgtccccctccaccggttctgggattcacatatagagcccgtatctggttcgtgtaacaagcatgctatcagagatttctctacttccaaaagagttacaagagactcaatatatcagcagaatgagttagaaccaactacgcctgtgaagggtactgacgtaataattgatcgcatacgaaagagcacaggaaaattggaggaaggccctgttggaaaaaatctgtcttcagcggagaaaaggaaatttcttgtcaacactcttcttagcctcgaagattcaagagaagctgtttatggcacccttgatgcctgggttgcctttgagcaggattttcctttggcttcactgaagcaagcgctttcagttcttgagaaggaggaacaatggcatagaattgtccaggtggtcaagtggatgctgagcaaagggcaaggaaatacaatgagaacatatgagctattagtgtgtgcacttgagaaggataacagagctgaggaagcacacagaatctggcagaagaaaataggccatgatctgcattcggttccttggcgtttctgccgacttatgttggctatctactaccgaaacaatagactagacaggctcatgaagctctttaaagaactagaagcctgtggtcgtaaacctccaagcaaagatattatacggaaagttgaagatgcatacgaaatgcttggattactagaagagaaaaaggtgttgcttgataaatacaaggatttatacaacaagccatctcgaaatgatcgaaagaaaagctccaaatccaaaaagattgagactgataaaacatctggttag

SEQ ID NO: 2870 - protein, 300 aa, Sorghum bicolor
MLRHLQRSLRAIHCLPATGHAACYPVPLHRFWDSHIEPVSGSCNKHAIRDFSTSKRVTRDSIYQQNELEPTTPVKGTDVIIDRIRKSTGKLEEGPVGKNLSSAEKRKFLVNTLLSLEDSREAVYGTLDAWVAFEQDFPLASLKQALSVLEKEEQWHRIVQVVKWMLSKGQGNTMRTYELLVCALEKDNRAEEAHRIWQKKIGHDLHSVPWRFCRLMLAIYYRNNRLDRLMKLFKELEACGRKPPSKDIIRKVEDAYEMLGLLEEKKVLLDKYKDLYNKPSRNDRKKSSKSKKIETDKTSG

SEQ ID NO: 2871 - DNA, 3120 bp, Sorghum bicolor
atggccggcctggcccccaagctgggcgacctgctcatgcaggagtacgtcgtgcagaagggcctgaagccggacatcgtgtccctctccagggagcttgtgacgatgaaagctggcctggaggacttgtctaaggttccaccggagcagctcactgaggtggaaaagctttgggcacgccacatccgggagctgtcgtatgacatggaggatgctgtcgatgactttgtcctgcgcgtggccggcggagagtgtgcagctgatgccaacgtcttcaagaagatccttggcaaggctgccgctgcggtgaagaaggtcaagcatcgccgtcagatctctgacaaggtcaaagacatcaagaaactctccaacgagctggctgggctccgtgccaagtacacagttagaggcgcaggggctgatctggccatgagcaccggcatcgacccccgtgtcctcaatctgtacaagaaagagtcagatcttgttggcattgaagagtcaaggaacaaagtcatcaagatgctgtctatagggaccaaagatgatgcttatactcatgcgtctgagctgaacctgaagatagtgtctatagttggggttggaggattgggtaagactactctagccaaaacagtgcatgatatgcttaagaatcaattcggttgttctgcttttatttcggttggtaggactcctagtttgactaggacatttgagaagatgttagtggaactcgataagaattataagcaagtcgacatggccagatgggatatagagcgatttggaaacgaactgcatgaattcttacaggacaagaggtacttcatcgttgttgatgacatatgggatgttgaatcatgggaagcgataagatatgccttgaaggacaacaattgtggaagtagaataatcattactactcgcaatttggaggttgccacaaaagcaggagaggtttacagactaaaacatctttctgatggaaactctagaatattattctacaaaagaatacagagtcaggaaggagaaagtcttgatggtgtatcaggtgaattgtctagtaaaatcatagataaatgcgatggcataccgttggctatcattgcaatagctagtttattggttgaaagaccatatgaggactggtcaatcgtgtatgattcaattggttttgggaatggagacaatacaacaaagatattgtcatacagttactatgatctaccttcttatctgaagccatgtctactgcatctaagcatacttactgaagactctatccgtgatagaaagagtgtgatttggatgtggataggtgaaggttttgtccatcctgggaaaaaggagggtagccaatttgaagttggagaaagatacttcaatgagcttgtcaatagaagcttgatacaaccaatggacaatgatttcacacaatgtttctgtattcatgatattgtgtttgatcttatccgtaagttatcaggcattgaaaactttgttactattttggacagcagtgatcaacatgcttctctggacagtttaagaaataggaagaaaacaggcatgactcatacggataacaaggtacgccggctggttgtccgaaatcaccatgtgcagtgcttccctgaagacaccatgccagaggtgctgaggtcatttaacattgaagatagtaagattgagattatggaccaacttcataggtttagagtttgccgtgtgctacatttacagggatgctatgtcccgatcagtctaaagcacatagggaggttgttgcatctcaagtacttaggtatatcttacatagcagttaatgagcttcctatggaacttgggcatctaaagtctctacaggcactagtattagtcgatattgggctagacgagctaccaccggctgtatgttcacttacacaactgatgtgcctgatagctgaggggttcaaaaggttcccagctgacaggatggggaacctaacatccctagaggagctacggttagagaccgtagctggtcggagtaccacggaggaccttgtggtagggcttggcaagctgacgaggttgaggatggtcaagatcaccttctccgagaaactagatgagagcttgcaaaaagctctggtgcgatctctttgcaatctgcgggagctccaggaactagtgcttgcttctacaggattatcccagcagggagccactatgtgggaaggctgggaaccacctatgcagctccggcgcctccttatatatggcatccgtttctcgcggctgcctgggtggatcaatcgctcccgcctgccacgcctctgcttcttatttttgggtgtgtacactattgaagttcaggacctagataacctagcgagcttgctagagctgagctacctcgacctaggtggttacagctggcctccagggtatactgttggtacggacggcttcaggaatctgaggttctgcaaagtgggcacagcgctcaagtttcatatgggcgccatgccaaggcttgaagagctgcagtttaaagtttatgcagggtattggagttgggtagaagatggcgtgccgttggagcagttcccaacaaaggaagtaatcgaagatcttgacttgggcctggataacctcctttcacttgagaaagtcatcgtccaagtggactgctcgggtgctactgccgcagaagtgcaggaggtggaggccatggtcacgcgtgcagtggaaaatcatcccaaccgcccaaccataaaaatggatcgagaatgtgaaggaaacatcttatctgacgaacgcagggtggctctggtgagttctcagcttcagcaacacattgaaagacatctcggtgtgctcgagtggaaggatgcacctgatgcgcaattcatcagctatctgcggaagtaccgacatcttcagaaagccgttaatttcatcgactgtgcgggcgccaggatgtgtgaggtggagaaagtggaagcagcttttaggcgtgcagccgagcttcatcctaaccatccgactatccaactgatcagaacaaacaccgatgaaatggtctcctcgtctgaccgtccggatacagaggtagctgcctcttcc

SEQ ID NO: 2872 - protein, 1040 aa, Sorghum bicolor
MAGLAPKLGDLLMQEYVVQKGLKPDIVSLSRELVTMKAGLEDLSKVPPEQLTEVEKLWARHIRELSYDMEDAVDDFVLRVAGGECAADANVFKKILGKAAAAVKKVKHRRQISDKVKDIKKLSNELAGLRAKYTVRGAGADLAMSTGIDPRVLNLYKKESDLVGIEESRNKVIKMLSIGTKDDAYTHASELNLKIVSIVGVGGLGKTTLAKTVHDMLKNQFGCSAFISVGRTPSLTRTFEKMLVELDKNYKQVDMARWDIERFGNELHEFLQDKRYFIVVDDIWDVESWEAIRYALKDNNCGSRIIITTRNLEVATKAGEVYRLKHLSDGNSRILFYKRIQSQEGESLDGVSGELSSKIIDKCDGIPLAIIAIASLLVERPYEDWSIVYDSIGFGNGDNTTKILSYSYYDLPSYLKPCLLHLSILTEDSIRDRKSVIWMWIGEGFVHPGKKEGSQFEVGERYFNELVNRSLIQPMDNDFTQCFCIHDIVFDLIRKLSGIENFVTILDSSDQHASLDSLRNRKKTGMTHTDNKVRRLVVRNHHVQCFPEDTMPEVLRSFNIEDSKIEIMDQLHRFRVCRVLHLQGCYVPISLKHIGRLLHLKYLGISYIAVNELPMELGHLKSLQALVLVDIGLDELPPAVCSLTQLMCLIAEGFKRFPADRMGNLTSLEELRLETVAGRSTTEDLVVGLGKLTRLRMVKITFSEKLDESLQKALVRSLCNLRELQELVLASTGLSQQGATMWEGWEPPMQLRRLLIYGIRFSRLPGWINRSRLPRLCFLFLGVYTIEVQDLDNLASLLELSYLDLGGYSWPPGYTVGTDGFRNLRFCKVGTALKFHMGAMPRLEELQFKVYAGYWSWVEDGVPLEQFPTKEVIEDLDLGLDNLLSLEKVIVQVDCSGATAAEVQEVEAMVTRAVENHPNRPTIKMDRECEGNILSDERRVALVSSQLQQHIERHLGVLEWKDAPDAQFISYLRKYRHLQKAVNFIDCAGARMCEVEKVEAAFRRAAELHPNHPTIQLIRTNTDEMVSSSDRPDTEVAASS

SEQ ID NO: 2873 - DNA, 927 bp, Sorghum bicolor
atggagatcaacatcgtggacaagtacgagaagctggagaaggtcggtgaggggacgtacgggaaggtgtacaaggcgcaggacaaggcgacggggcagctggtggcgctgaagaagacccggctcgagatggacgaggaagggatcccgcccaccgcgctccgcgagatctccctcctcaacctcctctcccactccatctacgtcgtccgactcctcgccgtcgagcaggccgccaagaacggcaagcccgtcctctacctcgtcttcgagttcctcgacaccgatctcaagaagtacctcgatgtctaccgtaggggacccgccgccaggccgctccccgctacactcatcaagaatttcctgtatcagttatgcaaaggagttgcacactgccatggccatggtgtccttcaccgggatttgaagccacaaaacctgctggtggacaaggataaagggatactcaagattgctgatcttggtcttggtagagctttcactgtgcctatgaaaagctacacccatgagattgtgacactttggtatagagctcctgaagttttgcttggagcaacacattactcaactggggttgatatgtggtctgttggatgcatctttgctgaaatggcccgacggcaggctctctttcccggtgactctgagttgcaacagttgcttcacatcttcaggttgctgggaacaccttctgaggagcagtggcctggagtgagtgaattgagggattggcatgaatttccacagtggaagcctcagagtttggcacgtgtcgtcccaacactggaacctgaaggcgttgacctgctatcgaaaatgcttcagcttgatccttcaaacaggatatcagctatagctgcgatggagcatccatactttgacagccttgacaagtcccagttctag

SEQ ID NO: 2874 - protein, 308 aa, Sorghum bicolor
MEINIVDKYEKLEKVGEGTYGKVYKAQDKATGQLVALKKTRLEMDEEGIPPTALREISLLNLLSHSIYVVRLLAVEQAAKNGKPVLYLVFEFLDTDLKKYLDVYRRGPAARPLPATLIKNFLYQLCKGVAHCHGHGVLHRDLKPQNLLVDKDKGILKIADLGLGRAFTVPMKSYTHEIVTLWYRAPEVLLGATHYSTGVDMWSVGCIFAEMARRQALFPGDSELQQLLHIFRLLGTPSEEQWPGVSELRDWHEFPQWKPQSLARVVPTLEPEGVDLLSKMLQLDPSNRISAIAAMEHPYFDSLDKSQF

SEQ ID NO: 2875 - DNA, 354 bp, Sorghum bicolor
atggagcggcaagctcgattcgtcgtcctgctcgtcttcgtcttctttgccgccggggcggtcctcgccagcagctccggcgccgccgccgcggccgccgacttgtcagctggtgctcatcgggccgccatgccgtcgtcgtccctgcacgcgctgcggcgcgtggaggacgacgcgagcagcttggtggaggaagaggaggcagcgtacccgcggaggagggcgctctacggtggcgggtccatcggctacgcggcgctcgccgcgagcaaggccgcctgctacgggccgtgccccgctcgtgggcaggcctatagccgcggctgcctggccatctaccagtgccgaggttag

SEQ ID NO: 2876 - protein, 117 aa, Sorghum bicolor
MERQARFVVLLVFVFFAAGAVLASSSGAAAAAADLSAGAHRAAMPSSSLHALRRVEDDASSLVEEEEAAYPRRRALYGGGSIGYAALAASKAACYGPCPARGQAYSRGCLAIYQCRG

SEQ ID NO: 2877 - DNA, 1638 bp, Sorghum bicolor
atggtggacgtcgctgagtgctcggcggcgcccgtgcccgtgcccgaggacgaggtcgagccggcgcacccggacccctcgtcgatcccgcccgacgcctggcggcgcttcgagagcgccgcgcttggtgtggtgaacaagatccagcccaccgtcgcctccgagaacttccgctccgccgtcatcgactacctcaagcgcctccttggatcccgcgcaggggttcagagttggttgttgccattcttgccatttcatttttatgtgttttttggcgcgaaaccggtgcgtgattatgagtataaatgtgtaacggtatggatatactttgtcggttgcgcacttgagtctctatgtgatttggtcttcccatttgggtctgttccactgaaaacatatcttcctgatggagatatcgacttgactgcattcagccctgcgatttctgatgagaatctagcaaatcaagtctatgctattctaagttcagaacagcataggaaggattctgaatttgatgtcaaggatgtccagtatatccatgctgaggttaaactggtaaaatgtcttgtacagaatattgttgtagatatatctgtgaatcaaattggtggactctctacgctctgttttctggagaaggtcgatgaaaattttggaaaaaaacacctgctcaaacgaagcatagtgcttattaaagactggtgttactacgaaagtcgcatccttggtgctcagaatggattgctatctacgtatgccttggaggttttagttctgtacgttttccttatcttccacaggtccttgggtggtcccttagctgtcctctataggtttctcgatttctatagtaaatttgattgggatagcaagggaatcagcttgtttggtcctgtttccttatcttcactacctaatctagttactgaccctcatctaccagctattgatgatgatttttttgttccacgggaaaagattcttagaaaatatgcagaagattttagtgcccctcctagaaactctgagagagacgcacaagtattttctcggaagtttctaaatattgttgatccactgaaacagagtaataatcttggacgcagtgtcaacaaagggaacttttaccgaatacgtagcgcatttgattttggtgctcgtaagcttgggaagattcttcaaatgcctgtctgttatactgtcaatgaagtgaatcagttcttctcgaacacattaaagagaaatcatactgggttcagaccagacgacggcagttcacctttatacagcaatccctatggtgatctgtcttatcagtttaataacatcttgaatgatctcactggagatttcgagataaacttccgtaatcttcagtatgcgcaagggttccagcaagttaatccagcaaactcattttactatggaaggcttgctccaccacccctgcaatatcagaacacgcacccttcagatagtcagggaagaaaaaatccacatgcatatgctagcatgaatggagcaatcccttgtcctccttacccatctggttgtcttgcgtggaggccatttattcaaccagatgatcctatggctatgagggcccgtggaataggcacctactttcctgaccca

SEQ ID NO: 2878 - protein, 546 aa, Sorghum bicolor
MVDVAECSAAPVPVPEDEVEPAHPDPSSIPPDAWRRFESAALGVVNKIQPTVASENFRSAVIDYLKRLLGSRAGVQSWLLPFLPFHFYVFFGAKPVRDYEYKCVTVWIYFVGCALESLCDLVFPFGSVPLKTYLPDGDIDLTAFSPAISDENLANQVYAILSSEQHRKDSEFDVKDVQYIHAEVKLVKCLVQNIVVDISVNQIGGLSTLCFLEKVDENFGKKHLLKRSIVLIKDWCYYESRILGAQNGLLSTYALEVLVLYVFLIFHRSLGGPLAVLYRFLDFYSKFDWDSKGISLFGPVSLSSLPNLVTDPHLPAIDDDFFVPREKILRKYAEDFSAPPRNSERDAQVFSRKFLNIVDPLKQSNNLGRSVNKGNFYRIRSAFDFGARKLGKILQMPVCYTVNEVNQFFSNTLKRNHTGFRPDDGSSPLYSNPYGDLSYQFNNILNDLTGDFEINFRNLQYAQGFQQVNPANSFYYGRLAPPPLQYQNTHPSDSQGRKNPHAYASMNGAIPCPPYPSGCLAWRPFIQPDDPMAMRARGIGTYFPDP

SEQ ID NO: 2879 - DNA, 2187 bp, Sorghum bicolor
atggatcttaatctaagactcctattggcaatgcttgttcttgcaagccttctaatctacaccacaccgacccatcatgtcaattctgaaatttctaaccgtcagaaatatattgtgcgtgtgcgccctccaccaaacttttccccagatatgagctcttctaaccttgagacatggtatagatcattcctcccaccatcatcgatgggtgcatctaggcctcatacaccattcatctatacctatagagaagccattctcggctttgctgtgaacctcacgaaagttgaggtagagtacgttacaaaaagagatggtgtccttaatgtatacgaggattaccttataccactcttgacaacccatacacctgaattcctagggctaaggtccaatggaggagcttggaatagcataggaatgggtgagggaaccatcataggcttgctagatacagggatagacatgtcacacccctcattccatgatgatggaatgaagccaccaccagcaaagtggcgtgggtcttgtgactttggagatgccaaatgcaacaaaaagttgattggtggcagatcattttctagaggtcatgtgcctccagtggataatgttggccatggcacacacactgcaagcacagctgccggacaattcgtagaaggtgcaagtgtgcttggaaatggaaatggtaccgctgctggcatggccccacatgcacaccttgctatgtatcgagtgtgcagcgtatggggatgttggaactcagatgtagtggctggactagatgcagccatttctgatggtgttgacatactgtctatatcacttggtggtcggtcacgacgattccatcaagaattactggcaattggcacattttctgccatgcggaaagggatatttgtcagttgttctgcaggaaattcaggtccatcatctggcacactaagcaacgaggcaccttgggtcctgacggttggtgcaagtacaatggaccgacagatgaaagctattgtcaagctaggtgatggccgctcatttgtcggtgagtcagcctaccaaccatctaaccttgtttctttgccattagcgtacaagctagattctgggaatgttaaagggaaggttgttgcttgtgatcttgatggttctggtagctctggtatccgaattggaaaaactgtcaagcaagctggcggagctgggatgatagtgtttggaaaacaagtgagtgggcacaatacttttgctgaaccacatgtcctcccagcatcttatgtgaatcccatagatgctgctatgattagagagtatgctaagaactctagcaacaagccaacagcctcaattgtctacgagggaacatcattgggaactactccagctcctgtagttgctttcttctcttcacgtggtccaagcacagcaagccctggtgttcttaagcctgacatcattggaccaggagtgaatgtcattgcagcttggccattcaaagttggaccaccaacaagtgcaaattttgtgaagtttaattccatttctggaacatcaatgtctgcacctcacctcagtggaatcgcagctgttatcaagagtgttcatccagattggtcacctgcagcaatcaaatcggcaatcatgacaacagcctatgcagtagatggtaacaagaagccaatcctagatgaaaaattcaatccagctggtcatttcagtataggtgctggacatgttaacccttctcgagctatcaatccaggtctaatctatgacaccgatgaggagcaatatattttgtacctatgcggacttggctacacagattctgaagttgagatagttacacatcagaaggatgcctgtaggaaaggaaggaaaatcactgaagctgagctgaattatccttcgattgcggtgaatgcgaaacttggcaaacttgtggtgaataggacggtcaccaatgtaggcgaggcaagttcaacctacactgtggacattgatatgccgaagggagtaacggcatcaatttcaccaaacaagctagaatttaccaaggcaaaagaggtgaaaacatttgttgtgagtttaagttgggatgccaataaaattaagcatgcggagggaagcttcacttgggtgtttgggaaacaagttgtgaggagccccattgtaatattctaa

SEQ ID NO: 2880 - protein, 728 aa, Sorghum bicolor
MDLNLRLLLAMLVLASLLIYTTPTHHVNSEISNRQKYIVRVRPPPNFSPDMSSSNLETWYRSFLPPSSMGASRPHTPFIYTYREAILGFAVNLTKVEVEYVTKRDGVLNVYEDYLIPLLTTHTPEFLGLRSNGGAWNSIGMGEGTIIGLLDTGIDMSHPSFHDDGMKPPPAKWRGSCDFGDAKCNKKLIGGRSFSRGHVPPVDNVGHGTHTASTAAGQFVEGASVLGNGNGTAAGMAPHAHLAMYRVCSVWGCWNSDVVAGLDAAISDGVDILSISLGGRSRRFHQELLAIGTFSAMRKGIFVSCSAGNSGPSSGTLSNEAPWVLTVGASTMDRQMKAIVKLGDGRSFVGESAYQPSNLVSLPLAYKLDSGNVKGKVVACDLDGSGSSGIRIGKTVKQAGGAGMIVFGKQVSGHNTFAEPHVLPASYVNPIDAAMIREYAKNSSNKPTASIVYEGTSLGTTPAPVVAFFSSRGPSTASPGVLKPDIIGPGVNVIAAWPFKVGPPTSANFVKFNSISGTSMSAPHLSGIAAVIKSVHPDWSPAAIKSAIMTTAYAVDGNKKPILDEKFNPAGHFSIGAGHVNPSRAINPGLIYDTDEEQYILYLCGLGYTDSEVEIVTHQKDACRKGRKITEAELNYPSIAVNAKLGKLVVNRTVTNVGEASSTYTVDIDMPKGVTASISPNKLEFTKAKEVKTFVVSLSWDANKIKHAEGSFTWVFGKQVVRSPIVIF

SEQ ID NO: 2881 - DNA, 3369 bp, Sorghum bicolor
atggacaggctccacacctcgctgcagcagctccaagtccaagtccaactccatgcagcggcggacaaggacgaggaccaggaccaggacggccagctgcaggctcctagtcctgcgccatggcaggcggtggacgtgcgcacgctgggtgcggcggagcggcgcgcggtggtggacaccctcgtcgccaacatccaccgggacaacctccggctgctccgcaagcagcgccagaggatggaccgcgtcggcgtccgcgcgcccacggtggaggtgcgctggcgcgacgtccaagtcgaggccgagtgccaggtggtgcacggcaagccgctccccaccctctggaacaccgtcgtctccaacctctcagtggtgagcaccatgctgggcctcaacgaccgccagcaagcgagggtgcgcatcctccacggcgtcagcggcgtggtcaagccttccaggctgacgcttctgcttggaccccctggctgcggcaagaccaccctcctcaaggcgctcgcagggaagctcagcaccagcggcctcaaggtgacgggagaggtagagtacaatggcgtggagctgagtggcttcgttccggagaagacggcggcttacatcgatcagtacgaccttcatgtccctgagatgactgtcagagaaaccatcgacttctctgcaagattccagggcgttggcaacagagcagagatcatgaaggaggtgattagaagggagaaggaggccgggattacccctgaccctgatgtcgacacctatatgaaggcgatatctgtggaaggtttagaaaggagcatgcaaacagactacattatgaagattatgggacttgacgtatgtgctgacataatggtgggagatgcaatgagaaggggtatttcaggcggtgagaagaggagacttaccacaggagaaatgatagtaggaccctcaaaagccctcttcatggatgaaatatcaactgggttggatagctccacaacatttcaaattgtttcttgcctccaacagttggctcatatctcagagtctaccatactagttgcacttcttcaaccagcaccagagacatatgagctttttgatgatgttatcttgatggctgaagggaaaattgtataccatggatctaagagtcgcattatgagtttctttgaatcatgtggattcaagtgccctgataggaaaggcgttgctgactttctccaagaggtcttatcaaaaaaggaccaacaacaatattggagccacagtggagaaacatacaattttgttaccgttgaccaattctgtgacaagtttagagtgtctcaaattggtcagaacctggccggggagatttcaaagccttataataaatcaaatgggcataaaaatgccttgtcctatagtatctactcgctatccaagtgggaactcctcaaagcatgtttttcaagagagcttctcctcatgaaacggaatgcgttcctctacacaacaaaagttgtgcagcttggactacttgctactattactgggacgatatttttgcgcacacatatgggaattgatagagttcttgctaaccattacatgggttcactcttctatgcactcctcatgttgatggtgaatggattccctgagatttccatggcagttaacagacttttagtcttctacaaacaaagagactactacttctatcctgcatgggcttatgcagtaccagcttttatcctaagggttcctatctctttagttgtgtcaatagtttggacatcactatcttacttcctcattggctatgctcctgaggcatctaggttcttacgtcaccttcttgtactcttcctaatccacaccggagcattatcaatgtttagatgtgtcgcctcttactaccaaacaatggtagctagtgtagtgggtggtacaatgttacttctactcatccttctgtttgggggtttcctcattcctcatccatccatgcctaactggttgaaatggggattttggctttctccattatcgtacgctcagatagggttaactgtaactgagttcttagcaccaagatggctaaagaagcatgatgtattttcttatgcaatatctgtagttttcagttttaccttgttagcagaacttgtaagcaagttcacaggatctggtgtgacacttggaaggaggacattaatggacagagggttgaacttctctagctatttctactggatttcagttggagcattgattgggtttattttgttatttaatataggttttgctattgggttgactattaaaaagcctctaggaacttctaaagctattatttctcatgataagcttaccaaaattaatagaagagaccagagtatgtctatgggcaccaaagatgggataaataagctggaagaaaattcgtctacacctaggactggaagggtggtattgcctttcatgccccttgcgatatcatttcaggatgtgaactactatgtggacacacctgtggaaatgaagcagcaaggttacatggagagaaaacttcaactactccacaacatcacaggagtcttccaaccaggagtcctttcagcaatcatgggagttactggggcagggaaaaccaccttgcttgatgttcttgctgggaggaaaactggtggtgtcattgaaggagatataagagtaggaggtcatccaaaagttcaacaaacttttgctaggatatctggttattgtgaacaaactgatattcactccccacaaatcacagtgggagagtcaattgcatattcagcctggttgcgccttccaacagaaattgactccaaaacacgagacgaatttgttgatcaagttcttgaaacaattgagttggataaaataagagatgctttggttggaatacctgggataaatggattatctacagagcagcgaaagcgtctcacaattgcagttgagcttgtatccaatccttcaatcatattcatggatgagccaacatcaggcttagatgcaagggcggctgctattgtcatgcgtgcagtgaagaacgtggcagacacaggtcgaacagttgtgtgcactattcaccaaccaagtatcgaaatttttgaggcatttgatgagctgatgctgatgaaaaggggtggacagttgatctatgctgggccacttggtcaccgttcgtgtatgctcctccaatatttccaggcaatacctggggtacccaagatcaaggacaactacaacccatcaacatggatgttggaagtaacatcaacatctttggaagctcaactaggagttgattttgcacaagtttacaaggactcatcaatgcacaagtaa

SEQ ID NO: 2882 - protein, 1122 aa, Sorghum bicolor
MDRLHTSLQQLQVQVQLHAAADKDEDQDQDGQLQAPSPAPWQAVDVRTLGAAERRAVVDTLVANIHRDNLRLLRKQRQRMDRVGVRAPTVEVRWRDVQVEAECQVVHGKPLPTLWNTVVSNLSVVSTMLGLNDRQQARVRILHGVSGVVKPSRLTLLLGPPGCGKTTLLKALAGKLSTSGLKVTGEVEYNGVELSGFVPEKTAAYIDQYDLHVPEMTVRETIDFSARFQGVGNRAEIMKEVIRREKEAGITPDPDVDTYMKAISVEGLERSMQTDYIMKIMGLDVCADIMVGDAMRRGISGGEKRRLTTGEMIVGPSKALFMDEISTGLDSSTTFQIVSCLQQLAHISESTILVALLQPAPETYELFDDVILMAEGKIVYHGSKSRIMSFFESCGFKCPDRKGVADFLQEVLSKKDQQQYWSHSGETYNFVTVDQFCDKFRVSQIGQNLAGEISKPYNKSNGHKNALSYSIYSLSKWELLKACFSRELLLMKRNAFLYTTKVVQLGLLATITGTIFLRTHMGIDRVLANHYMGSLFYALLMLMVNGFPEISMAVNRLLVFYKQRDYYFYPAWAYAVPAFILRVPISLVVSIVWTSLSYFLIGYAPEASRFLRHLLVLFLIHTGALSMFRCVASYYQTMVASVVGGTMLLLLILLFGGFLIPHPSMPNWLKWGFWLSPLSYAQIGLTVTEFLAPRWLKKHDVFSYAISVVFSFTLLAELVSKFTGSGVTLGRRTLMDRGLNFSSYFYWISVGALIGFILLFNIGFAIGLTIKKPLGTSKAIISHDKLTKINRRDQSMSMGTKDGINKLEENSSTPRTGRVVLPFMPLAISFQDVNYYVDTPVEMKQQGYMERKLQLLHNITGVFQPGVLSAIMGVTGAGKTTLLDVLAGRKTGGVIEGDIRVGGHPKVQQTFARISGYCEQTDIHSPQITVGESIAYSAWLRLPTEIDSKTRDEFVDQVLETIELDKIRDALVGIPGINGLSTEQRKRLTIAVELVSNPSIIFMDEPTSGLDARAAAIVMRAVKNVADTGRTVVCTIHQPSIEIFEAFDELMLMKRGGQLIYAGPLGHRSCMLLQYFQAIPGVPKIKDNYNPSTWMLEVTSTSLEAQLGVDFAQVYKDSSMHK

SEQ ID NO: 2883 - DNA, 1590 bp, Sorghum bicolor
atggcgaagggcgacgacgcgctggcgcggaagcgcaaccgggtgcgccgcaagcgcctccgcagcagcgagaacgctgtctccgcgcgggtcgcggcaatcatcgcctccaagcgccgccgcaagtcggggaagcgccgcggctgcgagggcatgtgcttctcgctccctacgcccgacgacccattcaacgagcgccacggcaagaagcgcaaggtcgatgacgagccgaccgaggacacagccgccgccaaggacggcgacgaccccaagaagaagggcgcgaacaccaaaaaggagcagccggtggcaaaggccggcgccgaggccaaggccaaggccaaggccaagtcgaaggcagttcgcgagagggcgacgggagcggatgagggccgcgtggacttggaccggccctccaagttcctggtggtctgcctcaacgccatccgggacacgctggcgcccgaggacggcggcggcagcattcacggcgccggcgactggggcgtggagctctggcggtgctgctccgcccaggcgccgtccgacgtgctcgacgctagcggcgcgtgcgccacggtggaccagaccgcgtggctcgtctccaccgcctgcgacatcgtcgctaggaaggagaggcttgggatggtcgtgtcctgccccttcctgctgtacctcgtcccgtcccaggagaaggccgcgcaggtgcgatcgatatgcaaacccctgaagcctcttgggattcattcagtgagcttgcatcctggcgcatccattgaacaccagatttctggactgaaaacttgtgagccggagtttcttatagctacccctgagaggcttcttgaacttgtttcgttaaaggcgattgacatatcaagtgtatcaatgctggtcattgatggactgaaatgtttcgtggaccacaatgccagtgacaaaatattttctattagagacgccatatcaaacaatcctcagattactatcttcaccgatccatctgataaaaaggttgcagcaatggctaaaagcctactccgtggaagaattacaaagctttctatcaatgattctgtttcttcacgaagtgcatttatagcccagcatgtacacttctgtccatcagaggagctgaaaacatcaaaggtcaaggaaattcttgaggggatattgcaaagtcatcctaaaaagacatcgaaggttcttctagtagtcgcaaacgatcaaaaagcgcgatacatgtcatcgtcacttaagctgaaaaattgcacagtgattgatgattcacatggcagctcttttacgatatgcagcagtttggggctgatgaatgtcattgtgaaagatcgggagaacatggcagtgacagatgcagaggaatttgaaacagtgctggtggtggatctgcctccttcagtcgacgaatatgttgagatcctcactggggttgctcttcatgtgattggaggcgaagtgcatagtatattctgtaacgctgatgcgtctattgcaaaacctctggcggagcttcttgcagattgccgtcaggtggtgcctgagtttttcaaaaacctggagtcttcatag

SEQ ID NO: 2884 - protein, 529 aa, Sorghum bicolor
MAKGDDALARKRNRVRRKRLRSSENAVSARVAAIIASKRRRKSGKRRGCEGMCFSLPTPDDPFNERHGKKRKVDDEPTEDTAAAKDGDDPKKKGANTKKEQPVAKAGAEAKAKAKAKSKAVRERATGADEGRVDLDRPSKFLVVCLNAIRDTLAPEDGGGSIHGAGDWGVELWRCCSAQAPSDVLDASGACATVDQTAWLVSTACDIVARKERLGMVVSCPFLLYLVPSQEKAAQVRSICKPLKPLGIHSVSLHPGASIEHQISGLKTCEPEFLIATPERLLELVSLKAIDISSVSMLVIDGLKCFVDHNASDKIFSIRDAISNNPQITIFTDPSDKKVAAMAKSLLRGRITKLSINDSVSSRSAFIAQHVHFCPSEELKTSKVKEILEGILQSHPKKTSKVLLVVANDQKARYMSSSLKLKNCTVIDDSHGSSFTICSSLGLMNVIVKDRENMAVTDAEEFETVLVVDLPPSVDEYVEILTGVALHVIGGEVHSIFCNADASIAKPLAELLADCRQVVPEFFKNLESS

SEQ ID NO: 2885 - DNA, 1512 bp, Sorghum bicolor
atgacggaggtggcgctcctccggggcccgaccaacctcgcttccaccgcaagccgcgcctccgccgcctcctcctcctcctcctccgcagcgctgcgctatttagccaatgccgacagcgacgtgctcccaggaagcggcagcccggagcgcgcagccggatctgcagggagccgacgactccttgaactgcgcgggcaagaggcggcggaggaggaagaggagcggtggtcgttcttggcgctgctctttgaactgctgcggaagtcgctgctcgggtgcagaacggtgagcggcggcagcggcgaaggcgaacacggcggctgcgggatggagattgggttgcccacggacgtgcagcacgtggcgcacgtcacgttcgataggttccatggattcctggggctgcccgttgaattcgagcctgaagtgccccgccgtgctcccagtgcgagtgcaagtgtcttcggtgtttcaacagaatcaatgcagtgttcctatgattccagaggaaacagtgtcccaacaatcctcttgatgatgcagagacgcctttatgaacagggtggtcttcaggcagaaggtatcttccgtataaatgcagagaatagccaggaggagtttgtgagagaccaattaaatagtggaattgttccagatggcattgatgtccactgtttggcaggtctaataaaagcctggtttagagaaatgccaaggggggtactggactctatcccacctgaacaggtgatgcaatgccaatctgaagaggactgtgctcgggtagcaaaatgccttccaccagctgaagcagctttgcttgactgggctgttaatctgatggctgatgtagtccaagaagaacagataaacaagatgaatgatcgaaatattgctatggtttttgcaccaaatatgactcagatggcagatcctttgactgcactgatgtatgcagtccaagtgatgaattttctcaagatgcttgtacagaagaccctcaaggatagagtggagtccactccagaggatgttttgctaccccagaaggacccatctgatgaaaatgggcatcagaaacccagcgtgacacttgattctctccttgaggaaggatccaggcgcccttcttttgccaaggaagagccccttctgagcagtcctgcccacagcactgatgataagtctaatgaaactaatacgactttaggagtcactgctgctttcactgcccagacaagtgaagtagtaacgagtgtggaggactccactagtggctcacaacctgcaactgctggcccagttgctattgctgatgcttcgggcgcgacggctacaaattctcttcaaggcaagggaagccgaagcctgaatcggaggaggactagaaagggcaagggccagagccagtctggtacacgcacaacacctgcagctgaaaaatcaagaggtgcgagcatcgtgagccggataaactccaaggttgagcggatcgaagcatggagatga

SEQ ID NO: 2886 - protein, 503 aa, Sorghum bicolor
MTEVALLRGPTNLASTASRASAASSSSSSAALRYLANADSDVLPGSGSPERAAGSAGSRRLLELRGQEAAEEEEERWSFLALLFELLRKSLLGCRTVSGGSGEGEHGGCGMEIGLPTDVQHVAHVTFDRFHGFLGLPVEFEPEVPRRAPSASASVFGVSTESMQCSYDSRGNSVPTILLMMQRRLYEQGGLQAEGIFRINAENSQEEFVRDQLNSGIVPDGIDVHCLAGLIKAWFREMPRGVLDSIPPEQVMQCQSEEDCARVAKCLPPAEAALLDWAVNLMADVVQEEQINKMNDRNIAMVFAPNMTQMADPLTALMYAVQVMNFLKMLVQKTLKDRVESTPEDVLLPQKDPSDENGHQKPSVTLDSLLEEGSRRPSFAKEEPLLSSPAHSTDDKSNETNTTLGVTAAFTAQTSEVVTSVEDSTSGSQPATAGPVAIADASGATATNSLQGKGSRSLNRRRTRKGKGQSQSGTRTTPAAEKSRGASIVSRINSKVERIEAWR

SEQ ID NO: 2887 - DNA, 2280 bp, Sorghum bicolor
atgcatcgtgttgggagtgctggtaacacagctggctcgactcgaccgagaaaggagaagcggttcacatatgtgctcaatgatgctgatgataaaaagcattgtgcagggatcaattgcttggcttatctaaatggttccacatttagtacaagtgactatctttttagcgggagtcgtgatggtaccttgaaaagatgggaattaaataatggggatgcaagcttctcagcaacttttgagtctcatgttgattggcttttctttattgtgcaggttaatgatgccattatagttggagaaaagcttgtttcctgttcctcagacaccacaataaaggtctggaattgcttctctgacggtgcctgtaccaggactctccgccagcattctgattacgtgatttgtcttgctgctgctgagaagaatagcaatattgtagcctctggtggccttggtggtgaggttttcgtttgggaccttgatgctgctcttgctcctgtagcaaaatctgtggatgcaaaagaggatgaggttcctaatggaaactctgggcctgctttgtcaacaatgtgcagcgcaaattctagtagcaatattgcttcctctaatggtcaatcacatgggtacaatccaattgccgccaaaggacacaaagactcagtttatgcactggctatgaatgatacgggaacacttcttctctctggtggcactgaaaaggttgtccgagtgtgggatccgagaacaggttcaaaaaacatgaaattgagagggcacactgacaatatcagagccttacttgttgattctacagggaggtattgcctatcaggatcatctgattccatgataagactatgggacctaggacagcaacgttgtgttcattcttatgctgtgcatactgattcagtttgggcgcttgcaagcactccttcatttggtcatgtctacagtggtggaagagaccaatctgtatatttaacagatttgtccacaagagagagtgttttactgtgcacaaatgaataccctattctacagttgtctctgcaagatgacacaatatgggtggcaacaactgattcttctgtttatggatggccagctgaagggcgcacaccccaaaaggtcttccaaaagggtggctcattcttagctgggaatttgtcattctcaagggcaagagcatctttagaaggatcagcacctgttcctgtatacaaagaaccatcatttgttatcccaggagttccagcaataattcaacatgagataatgaataataggaggcatgtactgacaaaggacaccactggttcagtcaaattgtgggagatcacccgcggtgctgttattgaagactttggcaaggtttctttcgaagataagaaaaaggagttatttgagatggtaagcatacctgcttggttcaccatggatgctcgattaggatgcttgtctgtccacctggatactccacaatgcttttctgcagaaatatatgcggttgatctaaatgttgctggagcacaagaagatctcaagattaatttggctcaagagacccttcggggtttgctagttcattggagtaaaaggaagcagaaatctagttcgcacagcttgcctaatggtgatagttcaatagggaaagatgttccgtcaaaagactcaccccggtcaagatctgaggtggatgatgccactgaaaatcatgcaactcatgtgcttccatcatttgagttttctacagtttcacctccctcaattatcacggaaggttctagtggagggccttggagaaagagaattaccgatttggatggaactgagggtgatcttccatggtggtgtgtggactgtgttactcacaatcgatatccaaaggagaatacaaaatgtggcttttatttacatcctgctgaaggctcgcctgcgccaaacataactcaagggaagcttagtgctccacggatattgcgaattcataaggtagctaactatgtggttgagaaacttgtgcttgacaaaccggatggaggctctgatagcgcgtttgttatgggattgagttctgctcaatcgcagctctcagcgctagatagttcttcgcggcttggactaaagtcatggcaaaaaacaaagccatgtattgagatattgtgcaataaccaggttctatcaccagagatgagtttggctacagtgcgaacatatatatggaagaagccagaagatttgattcttcattatagagtggtccagtcgagatga

SEQ ID NO: 2888 - protein, 759 aa, Sorghum bicolor
MHRVGSAGNTAGSTRPRKEKRFTYVLNDADDKKHCAGINCLAYLNGSTFSTSDYLFSGSRDGTLKRWELNNGDASFSATFESHVDWLFFIVQVNDAIIVGEKLVSCSSDTTIKVWNCFSDGACTRTLRQHSDYVICLAAAEKNSNIVASGGLGGEVFVWDLDAALAPVAKSVDAKEDEVPNGNSGPALSTMCSANSSSNIASSNGQSHGYNPIAAKGHKDSVYALAMNDTGTLLLSGGTEKVVRVWDPRTGSKNMKLRGHTDNIRALLVDSTGRYCLSGSSDSMIRLWDLGQQRCVHSYAVHTDSVWALASTPSFGHVYSGGRDQSVYLTDLSTRESVLLCTNEYPILQLSLQDDTIWVATTDSSVYGWPAEGRTPQKVFQKGGSFLAGNLSFSRARASLEGSAPVPVYKEPSFVIPGVPAIIQHEIMNNRRHVLTKDTTGSVKLWEITRGAVIEDFGKVSFEDKKKELFEMVSIPAWFTMDARLGCLSVHLDTPQCFSAEIYAVDLNVAGAQEDLKINLAQETLRGLLVHWSKRKQKSSSHSLPNGDSSIGKDVPSKDSPRSRSEVDDATENHATHVLPSFEFSTVSPPSIITEGSSGGPWRKRITDLDGTEGDLPWWCVDCVTHNRYPKENTKCGFYLHPAEGSPAPNITQGKLSAPRILRIHKVANYVVEKLVLDKPDGGSDSAFVMGLSSAQSQLSALDSSSRLGLKSWQKTKPCIEILCNNQVLSPEMSLATVRTYIWKKPEDLILHYRVVQSR

SEQ ID NO: 2889 - DNA, 3027 bp, Sorghum bicolor
atggccaccacctccgccgcctccgagtactccgtcgaccgcaagctctccgcgctcgtggagcaagctcggccgagcgcggcggccatgcgcgccgccgccgaggccgttgacgccgtcgcggagctcgtcaagagggtgccgcagcagcaagcgacgccggatgccgcgcgcgggttcgtgagggacctggggctgggagccgagaagctctcgttcaccttccggccgccggaggtggtgcggctggccgggagccacgcggctggcgcggtcgcgaggccagacgtcgctgctgaccttctcgtgcgcttgccaaaggaatgcttccacgagaaggatttcctgaatcaccggtaccatgcaaagaggtgtctttacctctgtgttgtcgagaaaaacttgaggtgctctaaattaatccacaaagtttcatggtctaccctccaagatgaggctcgaaagcctgtgcttcatgtatatccagcaatcgaaattgcagaccttcctggattctatgtaagaataatcccaactgcggattctttgttcaacgtttcaaagttgaatgtatcaacgagaaacaatgtccgggcatatacaaaagatggtgtaaacctacccacaccaaagtacaattgtagcatattggaagatatgtttttggaggaaaatgcagactttattagtagcacctttgctaactggaaagctttgcaggaggccttggtgttggtaaagttgaagcatatctgtattcttgtagcaacttccaaggtgtgggcaaagggattggtgattcaatcaatgaagaagcgtacaatcaccaaagaggacattgccacttgcctgaagacatttgatgttaccgtatttgatatatctggccacgtaaatttggcgtttcggatgacgaaatcggcttttttagagcttcaagatgaggcagcttgcgcgcttagttgccttgataaatgcagagatggtggacttgaagagctttttatgaccaaagttgacttttgtgctaagtttgactcatgcttgaggataaacttgaaagggaactctaaggttactgagttaaactattgtgtggatgacgagtcttggagaattcttgagaaagatgttcagtctttgctgcaacgaggacttacagatagaacaaagatgatccgagtcctgtggagaagcacaccttctgaatggaaaatagtggaaggtttctcagaatttggcagcagtccgcttctcgttggtatgatggttagctcattggaaaagagttttcgccttgttgatattggtccaaaccctgagaaccgcgttgaggctattaaatttaggaaattttggggagagaaagctgagcttagaagattcaaggatggaaatattgctgaaagcacagtttgggaatgccaatcttgggagaagcacacaattattaaaaggatagctgattatgtgcttatgaaacatctgtcactgcagaaggatgatttgattcatgttgttgatcagctggacttttgcctcttagttgatggccaagatccggtctcgtcttctggagctttgcttgaagcttttgatactatttctaagcagttacgtatcttagatgatattcctcttaaaatatctaccgtgcaacccctagactcagcttttaggcacacttctgtgtttcctcctgaacctcatccactagcatatggaaggaattctcagaggctaccgaaattcgcaacaacttgcataagatctttagaagttatgattcagctagagggatctggtaactggcccttggatcctgtggccatggagaagacaaaggctgcatttcttttaaaaattggtgaaagcttggaggatcgaggaatgtttgtttcagccagtgaagatgaggtgaatgtccttacatctggatattcatttttactcaaaatatttcatgaaagaggtttagcgctgcaaaagccagttggagatgacaagacacaaagtgctctatcagaagataagatgctttttcagcggagccaacactctagtatgattaatggtctgcatggccgttaccagatgtatggaccagtagttaggctagcaaaaagatggatttctgcacatctattttcttcatttatctcagaggaggcagttgagttggtagttgcgtacatatttttgaagccattcccgttccatgccccttcttctcgggttgctgggtttctcaggtttttgcggttgttatcaagttttgactggaccttttcacccatggttattgacataaataatgacttcaacctgaaggatgagaaggaaatcaatgataactttatgctgagcagaaaatcttatgaacaaagccctcatgatatagagcctgcaatgtttctcgctacgtcatatgataaagcatctgaagcatggacaaaacagtcaccaagcaagtcggtccttaaacggatggctgcttatgctaaaagcagtgcacagcttttaacaaatcttatacttcatggtcaatctggagaatatacatgggagtgcctgttccgaacacctatgagcaattatgatgctgttattctcctccatcaagagaagctttgttgtccccatcatgtactttttcctgccgaaactccagaaggtaagttggtggtctggggcaaaccaagtaaagatttctgcccctatatgccactcaacaaaggggcagtgaaaggttttcatgacgcaagagataagcttttggtgaactttgacccaactacatacttcttgcgagacttgaagtgtgaattctccaagactttcaagttgtggtatggttcaattggaggagacgctgtgggacttacttgggagaacccaaagaagcgtggcagagaggaggctgatgaaactgagccagagcccacatctatccttaaggaggttggagacgttggtaaaggtttagtgaggggtgtgtatcttgtcaaggcaccaaagcttcagtaa

SEQ ID NO: 2890 - protein, 1008 aa, Sorghum bicolor
MATTSAASEYSVDRKLSALVEQARPSAAAMRAAAEAVDAVAELVKRVPQQQATPDAARGFVRDLGLGAEKLSFTFRPPEVVRLAGSHAAGAVARPDVAADLLVRLPKECFHEKDFLNHRYHAKRCLYLCVVEKNLRCSKLIHKVSWSTLQDEARKPVLHVYPAIEIADLPGFYVRIIPTADSLFNVSKLNVSTRNNVRAYTKDGVNLPTPKYNCSILEDMFLEENADFISSTFANWKALQEALVLVKLKHICILVATSKVWAKGLVIQSMKKRTITKEDIATCLKTFDVTVFDISGHVNLAFRMTKSAFLELQDEAACALSCLDKCRDGGLEELFMTKVDFCAKFDSCLRINLKGNSKVTELNYCVDDESWRILEKDVQSLLQRGLTDRTKMIRVLWRSTPSEWKIVEGFSEFGSSPLLVGMMVSSLEKSFRLVDIGPNPENRVEAIKFRKFWGEKAELRRFKDGNIAESTVWECQSWEKHTIIKRIADYVLMKHLSLQKDDLIHVVDQLDFCLLVDGQDPVSSSGALLEAFDTISKQLRILDDIPLKISTVQPLDSAFRHTSVFPPEPHPLAYGRNSQRLPKFATTCIRSLEVMIQLEGSGNWPLDPVAMEKTKAAFLLKIGESLEDRGMFVSASEDEVNVLTSGYSFLLKIFHERGLALQKPVGDDKTQSALSEDKMLFQRSQHSSMINGLHGRYQMYGPVVRLAKRWISAHLFSSFISEEAVELVVAYIFLKPFPFHAPSSRVAGFLRFLRLLSSFDWTFSPMVIDINNDFNLKDEKEINDNFMLSRKSYEQSPHDIEPAMFLATSYDKASEAWTKQSPSKSVLKRMAAYAKSSAQLLTNLILHGQSGEYTWECLFRTPMSNYDAVILLHQEKLCCPHHVLFPAETPEGKLVVWGKPSKDFCPYMPLNKGAVKGFHDARDKLLVNFDPTTYFLRDLKCEFSKTFKLWYGSIGGDAVGLTWENPKKRGREEADETEPEPTSILKEVGDVGKGLVRGVYLVKAPKLQ

SEQ ID NO: 2891 - DNA, 438 bp, Sorghum bicolor
atggcggaggagaagcaccaccaccaccacctgttccaccacaagaaggacgaggagcagctggagcagcccgtcgccggcggcgggtacgggtacggcgaggccgccgagtacacggagaccacggtgacggaggtggtgtccaccggcggcgaggacgagtacgacacgtacaagaaggaggagaaggagcacaagcacaagcagcacctcggcgaggccggcgccatcgccgccggcgccttcgcactctacgagaagcacgaggcgaagaaggacccggagcacgcgcaccggcacaagatcgaggaggagatcgcggcggcggcggccgtgggatccggcggcttcgccttccacgagcaccacgagaagaagaaggaccacaaggaggccgaggaggccgccggcgagaagaagcaccacttcttcggctga

SEQ ID NO: 2892 - protein, 145 aa, Sorghum bicolor
MAEEKHHHHHLFHHKKDEEQLEQPVAGGGYGYGEAAEYTETTVTEVVSTGGEDEYDTYKKEEKEHKHKQHLGEAGAIAAGAFALYEKHEAKKDPEHAHRHKIEEEIAAAAAVGSGGFAFHEHHEKKKDHKEAEEAAGEKKHHFFG

SEQ ID NO: 2893 - DNA, 552 bp, Sorghum bicolor
atggccctggagacgtgcttcagagcgtgggcgctgcacgccgcccctgccgctggtggcaaggacagcaggctcctcgtcgtcggcagcagcagcggcagcggcagtaacctggttctgccgtcgaagcgggccgccgccgccgcggtcgtcgcgccgctgtccgtcggccgcgtcgccacgcgccggccgcggcatgtctgccagtccaagaacgccgtcgacgaagtgctggtggcggacgagaagaattgggacgggatggtgatggcgtgcgagacgccggtgctggtggagttctgggcgccgtggtgcgggccgtgcaggatgatcgcgccggtgatcgacgagctggccaaggactacgccggcaagatcacgtgctgcaaggtgaacacggacgagagccccaacgtggcgtccacctacggcatccgcagcatccccaccgtgctcatcttcaaggccggcgagaagaaggagagcgtcatcggcgccgtcccaaagtccacgctcaccacactcatcgacaagtacatcggcacctcatga

SEQ ID NO: 2894 - protein, 183 aa, Sorghum bicolor
MALETCFRAWALHAAPAAGGKDSRLLVVGSSSGSGSNLVLPSKRAAAAAVVAPLSVGRVATRRPRHVCQSKNAVDEVLVADEKNWDGMVMACETPVLVEFWAPWCGPCRMIAPVIDELAKDYAGKITCCKVNTDESPNVASTYGIRSIPTVLIFKAGEKKESVIGAVPKSTLTTLIDKYIGTS

SEQ ID NO: 2895 - DNA, 456 bp, Sorghum bicolor
atggccggcgtgaactccagcgtcgtcggactcaagcccgccgcggcagtgccccaggccgccgccgccgccgcctcgtcgcaggcgaagcgggtgcagctggtcgcgcccgagggccgccgcgccgcgctgctcggcctggcggccgtcttcgccgtcaccgccaccaccggatcggccaaggccgggatcatcgacgagtaccttgagaagagcaaggccaacaaggagctgaatgacaagaagaggctggccaccagcggcgccaactttgcgcgcgcctacaccgtcgagttcggcagctgcacgttcccctacaacttcactgggtgccaggacctcgccaagcagaagaaagtgcccttcatcaccgacgacctcgagatcgagtgcgaggggaaggagaagttcaagtgcggctccaacgttttctggaagtggggtgaagcaaaatga

SEQ ID NO: 2896 - protein, 151 aa, Sorghum bicolor
MAGVNSSVVGLKPAAAVPQAAAAAASSQAKRVQLVAPEGRRAALLGLAAVFAVTATTGSAKAGIIDEYLEKSKANKELNDKKRLATSGANFARAYTVEFGSCTFPYNFTGCQDLAKQKKVPFITDDLEIECEGKEKFKCGSNVFWKWGEAK

SEQ ID NO: 2897 - DNA, 237 bp, Sorghum bicolor
atgaagcaagagtgcaagaagttcgaggtgttccccgcgaacccaaagttgcaaccgtcgccggcatgctgcgctgtgtggcagagggcagacatcccatgcctatgcaaaagggtcaccccggaagtagagaaggtgtggtgcatggagaaggtcgtgtatgtcgccaactactgcaagaagccttttacacctggctacaagtgcgggagttatacggttcctaaaagcctctaa

SEQ ID NO: 2898 - protein, 78 aa, Sorghum bicolor
MKQECKKFEVFPANPKLQPSPACCAVWQRADIPCLCKRVTPEVEKVWCMEKVVYVANYCKKPFTPGYKCGSYTVPKSL

SEQ ID NO: 2899 - DNA, 462 bp, Sorghum bicolor
atggatctaagtgccattcatcaaatcctagttacaagagattacagagatgatgaagggagcactgagctgtcttttgaaggatggacacagcaggcgagggatgtgttggatgcaaggaaacgtggagactctgccttcgaatgcagaagatatgaaattgctatcaatggttacagatctgtcatgagcattgaataccggacaggccccctctccccgcgtcttccgtacatgcgactcagggggcgactcctccaggccgatccactccgctgccactactcaccggctagcggcggcggcggccagctgtggcgcccaacaagacatagccacaacagcttcccctacctctcctcctctcccttccccactccacctcttctccatttgacctctgaagttcatggcgcaagatccgacccaaggcggttgcaagggcacggcggccagcggtag

SEQ ID NO: 2900 - protein, 153 aa, Sorghum bicolor
MDLSAIHQILVTRDYRDDEGSTELSFEGWTQQARDVLDARKRGDSAFECRRYEIAINGYRSVMSIEYRTGPLSPRLPYMRLRGRLLQADPLRCHYSPASGGGGQLWRPTRHSHNSFPYLSSSPFPTPPLLHLTSEVHGARSDPRRLQGHGGQR

SEQ ID NO: 2901 - DNA, 1554 bp, Sorghum bicolor
atggcaatggcatgcttttctgcgagcaccaaggtttcgctcaagttcggagctaaggcgttcgcgaagaaccgcttgcctggctacctggactctgtggtatcttttcctgtttctcggacattggatggtggtctttgttctcccatcagggtggagaatgagaatcgcgcctatggttcaaacgtgattgttggggctctcaagggcagacacctcaacacaacactctcttcgactaatggtcacgtgaaggttcctgagagggtaactgtactggtcattggtggaggaggtagggaacatgctctttgttatgccttggaacgctctccgtcttgtgatgcagttttctgtgctcctggtaattctggcattgctcagtctggagatgccacatgtataccggacatggacataacaaatagtgaaaatgtcatctcattctgtcgtaattggggtgttggattagtcgtagttggacctgaagcacctcttgttgctggtcttgcaaatgaccttgtcaaagctggaattcctacttttggtccttcatcagaggctgcagcattagaaggatcaaaggatttcatgaagaaactatgtgataagtacaacattcccacagcaaagtatcaaacattcacaaaccctgctgatgctaaacaatatgtaaaggatcaagaagcccccatagttgttaaagctgatggattggctgctgggaaggatgaggcgtttgaagccatagacactatgctgatagaaggctcttttggttctgctggatcacgtgtcatcattgaagaatttttagagggagaagaagcttctttctttgcattagtagatggagaaactgctttgcctcttgaatcggcccaggaccataaaagagttggtgatggtgatgttggtccaaatacaggtggtatgggtgcatactcgccagctccaatagtgacagaagaactgaaggaaaaagtaatggaaagtataatcctccctactgttaaaggtatggcagctgaaggatgtaaatttgttggtgtgttatatgctgggcttatgattgagaagaagtcagggcttcctaagcttattgaatataatgtacgatttggagatccagaatgccaggttctgatgatgaggttagagtccgacttggcacaggttctgcttgctgcttgtcggggagaactaggcaaggtttcgctaaactggtcgcctgagttggcaacagttgttgtgatggcaagtgaaggctatcctgggccttacaagaaggggactgtaataaaaaatattgatgaagccgagcaggtttctcctgcagtaaagatattccatgcaggaacagcctttgatacagatggaaactttgtagcagctggaggccgtgtgctcggtgttactgcaaagggcaaggacattgaggaagcaagggctaaagtgtatgatgcgcttgacgttgttgactggccagaaggattctacaggcatgacattggttggagggcactcaaatattgccatttggctgcacactga

SEQ ID NO: 2902 - protein, 517 aa, Sorghum bicolor
MAMACFSASTKVSLKFGAKAFAKNRLPGYLDSVVSFPVSRTLDGGLCSPIRVENENRAYGSNVIVGALKGRHLNTTLSSTNGHVKVPERVTVLVIGGGGREHALCYALERSPSCDAVFCAPGNSGIAQSGDATCIPDMDITNSENVISFCRNWGVGLVVVGPEAPLVAGLANDLVKAGIPTFGPSSEAAALEGSKDFMKKLCDKYNIPTAKYQTFTNPADAKQYVKDQEAPIVVKADGLAAGKDEAFEAIDTMLIEGSFGSAGSRVIIEEFLEGEEASFFALVDGETALPLESAQDHKRVGDGDVGPNTGGMGAYSPAPIVTEELKEKVMESIILPTVKGMAAEGCKFVGVLYAGLMIEKKSGLPKLIEYNVRFGDPECQVLMMRLESDLAQVLLAACRGELGKVSLNWSPELATVVVMASEGYPGPYKKGTVIKNIDEAEQVSPAVKIFHAGTAFDTDGNFVAAGGRVLGVTAKGKDIEEARAKVYDALDVVDWPEGFYRHDIGWRALKYCHLAAH

SEQ ID NO: 2903 - DNA, 810 bp, Sorghum bicolor
atggggcggggaaggattgagatcaagaggatcgagaacaacacgagccggcaggtcaccttctgcaagcgccgcaacgggctcctcaagaaggcgtacgagctctccgtcctgtgcgacgccgaggtggccctcatcgtcttctccagccgcggccgcctctacgagtacgccaacaacagcgtgaaggctacgattgagaggtacaagaaggtacacaccgttgggtcttcctctgggcccccactcttagagcacaatgcccagcaattctaccagcaagaatccgcaaaactgcgcaaccagattcagatgctgcaaaacactaacaggcacttggtcggtgattctgtgggaaacctgacactcaaggagctgaagcagctggagagccgccttgagaaaggcatctctaaggtcagggccaggaagaatgagctgctggctgcggagatcaattacatggccaaaagggagactgaacttcagaatgaccacatgaacctcaggaccaagattgaggagggagagcaacagctgcagcaggtgaccgtggcccggtctgtcgcagcagcagcagcagccaccaacgtggagctgaacccattcttggagatggataccaaatgcttcttccctggcggccccttcgcgacgctggacatgaagtgcttcttccctggcggctatcagatgctggaagcgacggcggcacagcaccgccagatgctcaccactgagctaaacctcggctaccaactggcgctgcctaactctgacgctgccaacaataaccctcatcagttctaa

SEQ ID NO: 2904 - protein, 269 aa, Sorghum bicolor
MGRGRIEIKRIENNTSRQVTFCKRRNGLLKKAYELSVLCDAEVALIVFSSRGRLYEYANNSVKATIERYKKVHTVGSSSGPPLLEHNAQQFYQQESAKLRNQIQMLQNTNRHLVGDSVGNLTLKELKQLESRLEKGISKVRARKNELLAAEINYMAKRETELQNDHMNLRTKIEEGEQQLQQVTVARSVAAAAAATNVELNPFLEMDTKCFFPGGPFATLDMKCFFPGGYQMLEATAAQHRQMLTTELNLGYQLALPNSDAANNNPHQF

SEQ ID NO: 2905 - DNA, 1497 bp, Sorghum bicolor
atggcctgctctgccgccgcagcagcccttctcctgctggcctccatggtctgctgctgccgctcggcgccgccggcgggtgcgctcgtgacgcgtctccccgggttcgacggcgctcagctgccgtcgaagcactacgccgggtacgtgacggtgaacgagcatgtcgggagcaggctcttctactacctggtggagtcggagcgcgacccggcccgggaccccgtcgtgctctggctcaacggcggtcctggctgctccagcatggacggcttcgtctacgagcacggaccattcaactttgagtcaggagggtcggctggaagtttgccaaagcttcatctcaacccttatagctggtccaaggtgtctagtgtattatacttggactccccttctggtgttgggctgtcatactcaaagaatgtttcagattatgaaactggcgatcttaagacagctgctgattcacatacttttcttctcaagtggttccagctctatccggagttcctaaaaaatccattttacatagctggagagtcttatgccggagtttatatccctacccttgcaaatgaagtggtcaaaggaatccacaaaggagataatccagttataaacttcaagggctacatggtcgggaatggtgtatgtgacagcgcctttgatggtaatgctcttgtaccgtttgcacatggaatgggcctaatttcaaatgatatatacaagcaagcgaatacggcatgtcaaggaaactactggaattattctgacagtggagaatgcaccgaggcagtatcaaaagtcgatacggtaatcaatggattaaatatttataacattcttgagccatgctaccatggcacaaataccaaggaagtgatctcagaaaataacagaatacctcaaagttttaaagatcttggtgtaactagcaggccccttccagtaagaacaagaatgattggccgggcatggcctctgagagctcctgtaagagatgggcgcgttccatcatggcaagagctagccgctggcactggatcatcagttatgtgtatgagtgatgaagttgcaacagcatggctaaacaatgatagcgtcagatctgcaattcatgcagaaccagtcagttcaattggaccttgggtcctatgcacagacaaattgacatttcaccatgatgctgggagcatgataatttaccacaaaaaccttacaagccagggttaccgtgctctcatttacagtggtgaccatgatatgtgtgtaccttacactgggagcctagcatggaccacatctttaggctatggagtcatcgattcgtggcgagcgtggttggttaatgaacaagtttctgggtacacccaaggatatgaaaatgacctcacttttgctactattaagggttctggacatacagttcctgagtataaaccaaaggaagcatttgctttctacagccgttggcttgctggttctaaactgtga

SEQ ID NO: 2906 - protein, 498 aa, Sorghum bicolor
MACSAAAAALLLLASMVCCCRSAPPAGALVTRLPGFDGAQLPSKHYAGYVTVNEHVGSRLFYYLVESERDPARDPVVLWLNGGPGCSSMDGFVYEHGPFNFESGGSAGSLPKLHLNPYSWSKVSSVLYLDSPSGVGLSYSKNVSDYETGDLKTAADSHTFLLKWFQLYPEFLKNPFYIAGESYAGVYIPTLANEVVKGIHKGDNPVINFKGYMVGNGVCDSAFDGNALVPFAHGMGLISNDIYKQANTACQGNYWNYSDSGECTEAVSKVDTVINGLNIYNILEPCYHGTNTKEVISENNRIPQSFKDLGVTSRPLPVRTRMIGRAWPLRAPVRDGRVPSWQELAAGTGSSVMCMSDEVATAWLNNDSVRSAIHAEPVSSIGPWVLCTDKLTFHHDAGSMIIYHKNLTSQGYRALIYSGDHDMCVPYTGSLAWTTSLGYGVIDSWRAWLVNEQVSGYTQGYENDLTFATIKGSGHTVPEYKPKEAFAFYSRWLAGSKL

SEQ ID NO: 2907 - DNA, 1539 bp, Sorghum bicolor
atggcacgcggcggctctaccgcggctcctccacccctcccgccgctgctgctgctgctggtggtagtagtggtgtcctcggcctttttcgctcgctgctgccacgccgcgccgccgggtgcactggtgacgagcgtcccggggtacacggcgggcagcggcgcgctgccgtcgaagcactacgccgggtacgtgacggtggacgaggcgcacggcaggaggctcttctactacctggtggagtccgagcgtgaccccgccaaggaccccgtcgtgctgtggctcaacggcgggcctggctgctccagcttcgacggcttcgtctacgagcacggaccattcaactttgaggcaggagggtcagctggaagcttgccaaagcttcatctcaacccttatagctggtctaaggtgtctagtgtgatatacttggactcccctgctggtgttgggctgtcttactccaagaatgtttcagattatgaaactggtgatcttaagactgctgctgattcgcatacttttcttctcaagtggttccaactctaccctgagttcttgaaaaatccattttatatagctggagagtcatatgctggagtttatgtccctaccctttcacatgaagttgtcaaaggaatccacaaaggagataagccaactataaactttaagggctacatggttggcaatggtgtatgcgacaccgtctttgatggtaacgctcttgtgccatttgcacacggaatggctctaatttcagagagtatatacaaggaagccaacactgcatgtcaaggaagttactggaattctagtagtgcaaaatgcgacgatgcgctgtcaaaagtcgatacggcacttgatggattaaatatttatgacattcttgagccatgctaccatggtacaaacaccaaagaaggtatcccacaaagtaacaaacttcctccaagtttcaaagatcttggtgtaactagcaagccccttccagtaagaaatagaatgcatggacgggcctggcctttgagagctcctgtaagagatgggcgtgttccatcatggcaggagctagctgcatcagttccccgtggagttccatgtatgagtgatgaagttgcaacagcatggctaaacaatgataacgtcagatctgcgattcatgctgaaccagtcagttcaattggaccctggcaattatgcacagataaaatagattttgatcatgatgctgggagtatgataatttatcacaagaaccttacaagccagggttatcgtgctttgatttacagcggtgaccatgatatgtgcgtacctcacactgggactgaagcatggactgcatctttaggctacggcatcattgattcatggcgacaatggattgttaatgaacaagtagctgggtacacccaaggatatgaaaacggccttactttcaccacgattaagggttctgggcacacagttcctgagtataaaccacaggaatcattggctttctatagccgttggcttaatggtactaagctgtga

SEQ ID NO: 2908 - protein, 512 aa, Sorghum bicolor
MARGGSTAAPPPLPPLLLLLVVVVVSSAFFARCCHAAPPGALVTSVPGYTAGSGALPSKHYAGYVTVDEAHGRRLFYYLVESERDPAKDPVVLWLNGGPGCSSFDGFVYEHGPFNFEAGGSAGSLPKLHLNPYSWSKVSSVIYLDSPAGVGLSYSKNVSDYETGDLKTAADSHTFLLKWFQLYPEFLKNPFYIAGESYAGVYVPTLSHEVVKGIHKGDKPTINFKGYMVGNGVCDTVFDGNALVPFAHGMALISESIYKEANTACQGSYWNSSSAKCDDALSKVDTALDGLNIYDILEPCYHGTNTKEGIPQSNKLPPSFKDLGVTSKPLPVRNRMHGRAWPLRAPVRDGRVPSWQELAASVPRGVPCMSDEVATAWLNNDNVRSAIHAEPVSSIGPWQLCTDKIDFDHDAGSMIIYHKNLTSQGYRALIYSGDHDMCVPHTGTEAWTASLGYGIIDSWRQWIVNEQVAGYTQGYENGLTFTTIKGSGHTVPEYKPQESLAFYSRWLNGTKL

SEQ ID NO: 2909 - DNA, 639 bp, Sorghum bicolor
atggcgacggcgaagcccatcctgtacaacgcttggatcagctcctgctcccaccgtgttcgcatcgcgctaaacctcaaaggtgtggattacgagtataagtcggtaaatcccaggacagatccagattatgaaaaaatcaatccaatcaaatatattccagcattagtagatggggacatagtcgtttctgattctctcgctatctcattgtatttggaagataaatatcctgagcatcctctcctgcctaaagatctcaagaggaaagctcttaatcttcagattgcaaacattgtttgttcaagcattcaacctcttcaaggctatgccgttattggtctgcatgagggtaggatgagcccagatgagggccttcatattgttcaaacttatattgacaagggattcagagcgatcgaaaagctcttggaaggatgtgagagtaaatatgctactggagatgatgtccaattgggagatgtgtttcttgaaccacagatacatgctggcataaatcgcttccaaatcgatatgtcgaagtacccaatcttggagaggctccatgatgcatacatgcaaaatccagcattcgaatctgcgcttcccaaaaatcagccagacgcaccttcatcataa

SEQ ID NO: 2910 - protein, 212 aa, Sorghum bicolor
MATAKPILYNAWISSCSHRVRIALNLKGVDYEYKSVNPRTDPDYEKINPIKYIPALVDGDIVVSDSLAISLYLEDKYPEHPLLPKDLKRKALNLQIANIVCSSIQPLQGYAVIGLHEGRMSPDEGLHIVQTYIDKGFRAIEKLLEGCESKYATGDDVQLGDVFLEPQIHAGINRFQIDMSKYPILERLHDAYMQNPAFESALPKNQPDAPSS

SEQ ID NO: 2911 - DNA, 666 bp, Sorghum bicolor
atgccgccggtgacggtgttcggtacggccaacttcgcgaacgcggcgagggtcatggcgtgcctagagaaggtgggcgtcgagtatgatgtcgtccaggtcgactacatggctaaggagcacaagggcgccgagcacctcgccagaaacccgttcggccaaatcccggcgtttcaggatggggacatcatgctcttcgagtcgcgagctatcgcaaagtacgtgcttcgcaaatactccaagtcagcagatatcgacctgctgcgagaaggcaacccggaggaagctgcgatggtagacatgtggacggaggttgaggcgcacacatattttccagccatggcgcccatcttctacgagtgtgtcgtgtaccctgccatgcatggcaccccgaccaaccagaaggtggtggaggagagcctggagaagctcaggaaggtgctcgacgtctacgaggcgcacctgtcgaggagcaagtatctatatctcgccggtgacttcttcagcttcgccgacctcaaccacttcccgttcacgttccatgtcatgacgacgccgcacgcatcgctcttcgactcgtaccctcatgtgaaggcgtggtgggagagagtaatggcacggccgtcgctaaagaagatctgccccgatatggtgatccgggcctga

SEQ ID NO: 2912 - protein, 221 aa, Sorghum bicolor
MPPVTVFGTANFANAARVMACLEKVGVEYDVVQVDYMAKEHKGAEHLARNPFGQIPAFQDGDIMLFESRAIAKYVLRKYSKSADIDLLREGNPEEAAMVDMWTEVEAHTYFPAMAPIFYECVVYPAMHGTPTNQKVVEESLEKLRKVLDVYEAHLSRSKYLYLAGDFFSFADLNHFPFTFHVMTTPHASLFDSYPHVKAWWERVMARPSLKKICPDMVIRA

SEQ ID NO: 2913 - DNA, 1698 bp, Sorghum bicolor
atggctctacttcttgcttctgccatgaatcacactgcccatccagcaggccttagaagccatcccaataatgagagtttctcacggcaccacctatgttcttcaccacaaaacatcagtaagcgaaggtctaaccttagctttaggccacgagctcaaacgataagcagtgagtctgctggaatccacaggctgagcccctgggaaatccctaggagggactggttccctcctagctttctcttcggtgccgccacttcagcataccaaattgaaggtgcttggaatgaagatgggaaggggccaagcacatgggatcacttctgccacaattttccggaatggatagtggacaggagcaatggggatgttgcagcggattcgtaccatatgtacgctgaggatgtcaggttgctgaaggaaatgggcatggacgcctataggttctccatctcttggcccagaatactgccgaaggggacgctcgctggaggtattaacgagaaaggtgtcgagtactacaacaagttgatcgacttgttgttagagaacggcatagagccatatataacaattttccactgggacacgcctcaagcgctggtagacgcgtatggcggcttcttagatgagaggattataaaagattacacagacttcgctaaagtgtgctttgaaaagtttggtaagaaggtgaaaaactggttgacctttaatgagccggagacattctgttctgtttcctatggaactggagtccttgccccggggcggtgctcaccgggagtaagttgtgccgttccaactggaaactcactcagcgagccatacattgttgcccacaaccttctccgagctcatgctgagactgttgatatttacaacaagtatcacaagggtgcggacggccgtatagggcttgcgttaaatgtatttggccgtgtgccatacacaaatacgtttcttgatcaacaggcccaagaaaggtccatggacaaatgcctaggatggttcttggagccagtggttcgtggtgactaccccttctccatgagagtgtcagcgagggaccgggtgccctacttcaaagaaaaagagcaagagaagctagttggttcttacgatatgatcgggataaactactacacctcaacgttctccaagcacatcgacctctcaccaaacaactcgccagtgctcaacactgacgacgcctatgccagtcaagaaaccaaagggcctgacgggaatgctattggtcctcctactggaaatgcgtggatcaatatgtaccctaaaggcctacacgatatccttatgaccatgaagaacaagtatggaaacccaccaatgtacatcactgagaacgggatgggggacattgacaagggcgatctacccaaaccagttgcgttggaagaccacacaaggctagattacatccagcgccacctctcagttcttaaacaatcaatagacttgggagcagacgtgcgcggctacttcgcgtggtctctgctggacaacttcgaatggtccagcggctacaccgagcgtttcggcatcgtctacgtcgatcgcgagaatggctgcgagcgcaccatgaagcgatcagccaggtggttgcaggagttcaatggagctgccaagaaggttgaaaataacaagattcttacgccggccggccagcttaactaa

SEQ ID NO: 2914 - protein, 565 aa, Sorghum bicolor
MALLLASAMNHTAHPAGLRSHPNNESFSRHHLCSSPQNISKRRSNLSFRPRAQTISSESAGIHRLSPWEIPRRDWFPPSFLFGAATSAYQIEGAWNEDGKGPSTWDHFCHNFPEWIVDRSNGDVAADSYHMYAEDVRLLKEMGMDAYRFSISWPRILPKGTLAGGINEKGVEYYNKLIDLLLENGIEPYITIFHWDTPQALVDAYGGFLDERIIKDYTDFAKVCFEKFGKKVKNWLTFNEPETFCSVSYGTGVLAPGRCSPGVSCAVPTGNSLSEPYIVAHNLLRAHAETVDIYNKYHKGADGRIGLALNVFGRVPYTNTFLDQQAQERSMDKCLGWFLEPVVRGDYPFSMRVSARDRVPYFKEKEQEKLVGSYDMIGINYYTSTFSKHIDLSPNNSPVLNTDDAYASQETKGPDGNAIGPPTGNAWINMYPKGLHDILMTMKNKYGNPPMYITENGMGDIDKGDLPKPVALEDHTRLDYIQRHLSVLKQSIDLGADVRGYFAWSLLDNFEWSSGYTERFGIVYVDRENGCERTMKRSARWLQEFNGAAKKVENNKILTPAGQLN

SEQ ID NO: 2915 - DNA, 534 bp, Sorghum bicolor
atgtcgtcgagggatccgctagtggttggaagcatcgtgggcgacatcgtggactacttctcagcgtcggcgctgctccgagttatgtacggcgggcgcgagatcacctgcgggtcggagctcaggccgtcccaggtcgccggcgagccgacggtgcacatcaccggaggccgccgcgacgggacgccggcgttctacacactgctgatgctggaccctgatgcgcccagcccaagcaacccgaccaaacgggagtatctccattggttggtgactgatataccagaaggagctggtgccaatcatgggaacgaggtggtggcgtacgagagcccccggccatcggcggggatccaccggttcgtgttcatcgtgttccggcaggcgatccggcagtcgatctacgcgccggggtggcgcgccaacttcaacaccagggacttcgccgcctgctacagcctcggaccgcctgtcgccgccacctacttcaactgccagagggagggcggctgcggtggccggaggtacaggtga

SEQ ID NO: 2916 - protein, 177 aa, Sorghum bicolor
MSSRDPLVVGSIVGDIVDYFSASALLRVMYGGREITCGSELRPSQVAGEPTVHITGGRRDGTPAFYTLLMLDPDAPSPSNPTKREYLHWLVTDIPEGAGANHGNEVVAYESPRPSAGIHRFVFIVFRQAIRQSIYAPGWRANFNTRDFAACYSLGPPVAATYFNCQREGGCGGRRYR

SEQ ID NO: 2917 - DNA, 153 bp, Sorghum bicolor
caggaaaattttccaaagatgaattgttgtaatcatatcagtattgttactgaaaaacacttccctcatttgaaacagagattatccagacagttcccgagcttgtcaaagcttgtgataaaatggtgcatatttgcacaaaaaggatgctga

SEQ ID NO: 2918 - protein, 50 aa, Sorghum bicolor
QENFPKMNCCNHISIVTEKHFPHLKQRLSRQFPSLSKLVIKWCIFAQKGC

SEQ ID NO: 2919 - DNA, 522 bp, Sorghum bicolor
ggggttcctcgcaaagcatccgaggctgctcccgttgccgtccatcttctccctggcggcggccgcggccaccccgccgcacctgctgatctggagggtgtccctaagggtcggggaggcgggggaggaagagagcggcggcagggtggagctctcgttgaggaggatgtgctccgatcccgatccgtgtattgcgaccagtgcagagtcgtgggttggagtgggcacccggtctgcgtgaagctgtaccatttcatcatggatagcctttctgatccccggcgcacctgctgcctctgctgcgaaacacccatggcagctggagaatcaaggtgtgctctgtgcaatttctatatggatggtgaggaggtcgaagagtgtgcatatctgcatctggatgactcatctgacttgctgcacgctgtagtgcatgcaaatggttatgggcaccttctcagggtaaatgggcgtgaaggtggctcaagattcctcactggccgtgagaggttttccttcatatag

SEQ ID NO: 2920 - protein, 173 aa, Sorghum bicolor
GVPRKASEAAPVAVHLLPGGGRGHPAAPADLEGVPKGRGGGGGRERRQGGALVEEDVLRSRSVYCDQCRVVGWSGHPVCVKLYHFIMDSLSDPRRTCCLCCETPMAAGESRCALCNFYMDGEEVEECAYLHLDDSSDLLHAVVHANGYGHLLRVNGREGGSRFLTGRERFSFI

SEQ ID NO: 2921 - DNA, 969 bp, Sorghum bicolor
atgggtattgtcactcaatgcattgctcccagtaataagatgaatgatcaatatttcaccaatgttcttctgaaaattaatgctaagcttggtggaatgaactctaaactggcattggaacatcgtcaaatgataccagttgtgactcaaataccaacattaattcttggcatggatgtttcgcatggttctccaggtcgagcagatataccatcaattgctgcggttgtgggatctagatgctggccattgatatcacggtatagagcatcagtgcgtacccagtctccaaaggtagagatgattgattctctatttaaaccactggatgatgggaaggatgatggcataatgagggaacttctactagacttctaccaaaccagccagcaaagaaagcctaagcagataatcatcttcagggatggtgttagcgagtctcagtttagccaagtactgaacgttgagcttaatcaaatcataaaggcatatcagagtatgggacagggggaccttccaaagttcacagtgatcattgctcaaaagaatcaccacacaaaactcttccaagctgattcaccagagaacgttccacctgggactgttgtagactccggcattgttcatccaagacagtatgatttctacatgtgcgctcatgctggaccaattggtacttcaaggccaacccattaccatgtgttgcttgatgagatcggcttctccgcagataatctccagaagctagttctttcactttcatatgtgtaccagaggagcaccactgctatttctgtggtggcacctatctgttatgcccacctcgcagcagctcagatgggccagttcatgaaattcgaagagtttgcagatacatcgtcagggagtgtcaattcatcatcgtcagcatcaataccagaactgccacggctgcatgctgatgtctgcagttccatgttcttctgttga

SEQ ID NO: 2922 - protein, 322 aa, Sorghum bicolor
MGIVTQCIAPSNKMNDQYFTNVLLKINAKLGGMNSKLALEHRQMIPVVTQIPTLILGMDVSHGSPGRADIPSIAAVVGSRCWPLISRYRASVRTQSPKVEMIDSLFKPLDDGKDDGIMRELLLDFYQTSQQRKPKQIIIFRDGVSESQFSQVLNVELNQIIKAYQSMGQGDLPKFTVIIAQKNHHTKLFQADSPENVPPGTVVDSGIVHPRQYDFYMCAHAGPIGTSRPTHYHVLLDEIGFSADNLQKLVLSLSYVYQRSTTAISVVAPICYAHLAAAQMGQFMKFEEFADTSSGSVNSSSSASIPELPRLHADVCSSMFFC

SEQ ID NO: 2923 - DNA, 1407 bp, Sorghum bicolor
atggccaactctatgtggctgtttcacggtcgacttctagagatgggagataggctgattcctggccttatgcctggaaactgcagtgagactatatgtgtgcgtgcctctaggttccggaacttctatgatccacatgatgaatcaaagttgctgcacaatgacctggttttgattgatgaggagggaaactgcatgcatgcacagatttacccaccagaccatgagcaattcaagcctttgataaaggaaggctatgtcattggtgtagtcactacgctctcgaatgtttcatcgatgcggagcagaacacgccaaaatgaagtgctaaagaggacggtccatagagatggagaggccaccccacagaccgtgatatttgttgggactcttgtgaagtgctttgcagatgtagtgtcattgtctgggggatcgtcatgcaagtggtacataaatcttgaagtgcctgaggcaaaggcccttgcagcaagtgtggcagacatctatcaaccagtcaaatgggatcagcatatggcttccagtgagcctgtggcttttgctgctgctgaacataaaaaggtccccgacatcaagatgctccatccattcaagtacaaggtagaaaagtttttgctaattgatcctgcctttgctcataggtacaagttgtgcatagttgctggagatgagacaggtgaaactgagtttgtcattttcggacggattgcacagcgtctcaccagaaaaccagttgatactctgatcgcagataatccaactggtttcattccagatgaggtcacaaagctactggaaaaggtgtttgtgtggaatgtcaccttcatagaaaacacaattactactgcgattgtctcttttcaagtcaatactatcgtggctcaactagatggtgacaatgctctttcagtgacgccaacagggtcacagtcatcatctctcatgctctctaaggatgctagcagtagcatgcagaaaactcctcagaaaagtttcaccagtgttctacctttgccaccagctacctcagaagctagccatgcatccagtgacacaccaatcaaaatgcctttgttgatccctggagcaccagctacaccggacagttgcaaggccactgctgaggatgagaatgctatacatgatggcaacatacttgctttaacttcagggatggctactccaaatcctactgatgctccaacaactcgtcttgtttcacctatgcctaaggctgttgatggttctagcattaacaaagatagtcttgacaattctgaaatcaagacacagaaaagtgtgaataagaaaaggacccgcccatcacccaaaaggactgcaaagaaacttttctcggatcaagataccatggatgactatagagcctag

SEQ ID NO: 2924 - protein, 468 aa, Sorghum bicolor
MANSMWLFHGRLLEMGDRLIPGLMPGNCSETICVRASRFRNFYDPHDESKLLHNDLVLIDEEGNCMHAQIYPPDHEQFKPLIKEGYVIGVVTTLSNVSSMRSRTRQNEVLKRTVHRDGEATPQTVIFVGTLVKCFADVVSLSGGSSCKWYINLEVPEAKALAASVADIYQPVKWDQHMASSEPVAFAAAEHKKVPDIKMLHPFKYKVEKFLLIDPAFAHRYKLCIVAGDETGETEFVIFGRIAQRLTRKPVDTLIADNPTGFIPDEVTKLLEKVFVWNVTFIENTITTAIVSFQVNTIVAQLDGDNALSVTPTGSQSSSLMLSKDASSSMQKTPQKSFTSVLPLPPATSEASHASSDTPIKMPLLIPGAPATPDSCKATAEDENAIHDGNILALTSGMATPNPTDAPTTRLVSPMPKAVDGSSINKDSLDNSEIKTQKSVNKKRTRPSPKRTAKKLFSDQDTMDDYRA

SEQ ID NO: 2925 - DNA, 10947 bp, Sorghum bicolor
atggcggcggcggcggcggcgatggccgcacatagagccagcttccctctgcgcctgcagcagatccttgccgggagccgcgccgtctcacctgcgatcaaggtcgagtctgagccgcctgcaaacgtcaaagcatttattgatcgagtcatcaatattccactacatgacattgccataccgctatcaggcttccgttgggagttcaataagggaaatttccaccattggaagcctttatttattcattttgacacatatttcaagacatacatttcttatcggaaggatcttcttttatctgatgatatgactgaggctgaccctatgccaaagaatgccatcttgaaaattttaagagttacgcagattgttttggagaactgccagaacagaagttcttttactggtcttgagcatcttaagcttctcctggcatcgtcagaccctgagatagttgtagcagctttggaaactcttgttgccttggtcaaaataaatccttcaaagttgcatatgaatggaaagctaattaactgcggatctataaacacccatcttctatcattggcccaaggatggggcagcaaggaggaaggtctaggcatatattcttgtgttgtggcaaatgaaggaaaccagcaggggggcctgtccttgttcccaggagacttggagaacaaatatggtggcacacagcatcgtcttggttcaactcttcattttgagtataatttgggtcctgcacagtatcctgaccaaactagtgacaagggcaagccatctaatttgtgcgtgatacatattccagacatgcatcttcagaagggggatgacttgagcatactgaagcaatgtgtggacaagttcaatgtgcccccagagcacaggtttgctttgcttacaaggataagatatgcccgtgccttcaactctgcacggacttgtaggatctatagccgcataagtcttctttcgttcattgttcttgtgcaatccggtgatgctcacgatgaacttacatacttctttacaaatgaaccagagtacataaacgagttaatcaggcttgttcggtcagaagattctgttcctgggcccattcgtgcactggctatgctagcactgggagcacaactggcagcatatgcatcatctcatgagcgtgctaggatattgagtggctcaagtatcatctctgctggtggaaatcgtatggtcttgctcagtgtcttgcagaaagcaatatcctcactcaatagcccgaatgatacctcatctcctctaattgtcgatgcccttcttcagttttttctgctccatgtactgtcttcatcaagttcagggactacggttagaggctcagggatggtccctcctctcttgcctcttctgcgagataatgatccttatcatatgcatcttgtctgcttggcagtgaagactctccaaaagcttatggagtacagcagccctgctgtttctctgttcaaagacttgggtggcgtagagcttttgtctcagaggttacatgtagaggtgcagcgtgttattggtactgctgatggacataattcaatggttactgatgcagttaaatcagaagaggaccacctgtactcccagaagcgattgattaaagctttgctcaaggctttggggtctgctacttattcccctgggaatcctgctcgttctcaaagctcccaagataattcattacctgtctcactttctcttatatttcagaatgtagaaaagtttgggggtgacatttatttttcagtagttactgttatgagcgaaataatccataaagatcctacatgctttcctgctttgaaagaacttggtcttccagatgcttttctctcatcagtgattgctggggtagtaccatcttgtaaagcccttatctgtgttcctaacggcctgggtgcaatatgcctcaataaccaaggacttgaggctgtcagggaaacttcagcattacgatttcttgtagataccttcactagcaggaaatacttgataccaatgaatgagggcgtggtccttctagctaatgcagtggaagagcttcttcgtcatgtgcaatccctgagaagtattggtgttgacatcattattgaaataatcaataaactaaattcatctcaggaagatagaaacaatgaaacagccatcttggaagaaaaaacagatatggacactgatattgaaggtcgtgatttggtaagtgttatggactccagtgtggatggcagtaatgatgaacagttttctcatctgagcattttccatgtgatggtattggtacaccggacaatggaaaactctgaaacctgccggttatttgtagaaaagggaggtctacatgctcttttgacactcttgttgaggcctagcattacacagtcatctggagggatgcctattgctttgcatagcacgatggtgttcaagggatttactcagcatcactctactccacttgcacgtgcattttgctcgtctttaagggagcatttgaagagtgcgttgggggaacttaataaagtttccaactcatttgagatgaccaatattgaaaaaggagtgatcccatctttgtttgttgttgaatttttgctattcctagctgcctcaaaagacaatcgctggatgaatgcgttgctctcagaatttggcgatgccagcagggaggtcctggaagatattgggcgagttcaccgggaagtgctttggaaaatttcgctttttgaagaaaacaagatcgatgctgaaaccagttcatcttcttccacatctgaagcccagcagcctgacttgtctgccagcgacattggtgatagcagatacacttctttcaggcaatatcttgatccaattttaaggagaaggggttctgggtggaacatagagtctcaagtgtctgatctcattaatatttatcgagacattggccgtgcagctagtgactctcagagagttggttctgatagatattctagcctgggtttgtcctcaagttcccaggaccagtcttccagttcatctgatgcaaatgccagcacaagatcagaagaggacaagaaaaaatctgagcattcctcctgctttgacatgatgagatctctctcgtaccatatcaaccatctttttatggagcttggtaaagcaatgcttcttacatctcgtcgggagaatagtcctgtaaacctatccccatctgttatatctgttgctaacaatattgcttctattgtgttggagcacctcaactttgaaggacattcggtaagttccgagagggagatgactgttaccacaaaatgcagatatcttgggaaggcagttgaatttgttgatgggatattattagaccgtccagaatcctgtaatccaattatggcgaattcattttattgtcgtggtgtcattcaggccatcctgaccacatttcaggccaccagtgagttgctcttcacaatgagcaggtcaccgtcttcaccgtcttcacctatggagatggatagtaaaaccggaaaggatggaaaggagatggattcttcatggatctatggtcccctcaccagctatggagcaattatggatcatcttgtgacctcatcttttattctctcttcatcaactagacaattacttgagcagcctatttttaatggatctgtaaggtttcctcaagatgctgagaggttcatgaagttacttcagtcaaaggtgttgaagacagttcttcccatctgggcccatccccagtttccagaatgcaacattgagttgattagttcagtcatgtccatcatgaggcatgtttgctctggggtggaagtgaaaaacactattggcaacggtggtgctcgtttagctggtccacctcctgatgagagtgcaatttcactgatcgtagagatgggtttttctcgtgccagggctgaagaagcattaagacaagttggaacaaacagtgttgaaatagcaactgattggttattctcacaccccgaggaaccacaagaggaggatgatgaacttgctcgggcgcttgcaatgtctcttgggaattctgatacacctgcacaagagggagatagtaggtccaatgatcttgagctggaagaagtaacagttcagctgcctcctatagatgagatgttacattcatgtcttaagctacttcagacaaaggaagcattagctttccctgtcagggatatgcttgttactatcagctcacagaatgatggccaaaaccgagtaaaggtgcttacatatttgattgataatctgaaacaatgtgtggtggcatctgagccttcaaatgatactgcattgtctgctcttttacatgttcttgctttgattctccatggagatactgctgcccgtgaagttgcctcaaaggcaggatttgtgaaggttgctttggatctgcttcgcagctgggagttggaacctagggaaagtggcatgaatgaggttcctaattgggtaatttcctgtttcctttctgttgaccagatgctacagttggaaccaaagttgccagatgttacagagctatatgtcctgaaaatggataactcaaatacaaaaacatcacttgtgattgatgacaacaagaaaaaagatccagaatccttgtctagtgttgggttactagacatggaggaccagtatgaacttttgaagatctgttgcaagtgcatagaaaaacagttgccttctgcttccatgcatgctattcttcagctctctgcaacactgacaaaagtccatgcagctgctatatgttttcttgagtctggtggtctgaatgcattgctatcattgccgacaagtagcttgttttctgggttcaacaatgtggcttctacaataattcgtcatattttggaggaccctcacacccttcagcaagcaatggaattagagatacgtcacagtcttgtcacagctgctaatcgacatgcaaatcccagggttaccccacgcaattttgtccagaatttggcatttgtcgtgtatagggatccagtgatatttatgaaagctgcccagtctgtgtgccagattgagatggttggagatagaccatatgttgttctgttaaaggaccgtgagaaagaaaggagcaaggagaaagataaggacaagtcagttgataaagataaagcaacaggtgcagtcactaaggtagtttctggggacacagctgcaggatctcctgcaaatgctcaggggaaacaatctgatttgaattcaagaaacatgaaatctcaccgcaagccaccaccaagttttgtcacagttatagagcatctcttagatctggtgatgtcctttgttccgcaacctcgtctagaggatcaagctgatgttgtctctggtaccgccttatcttcagacatggatattgactgcagttctgcaaaagggaaagggaaagctgtgtctgtcccacctgaagagagcaagcatgctatccaagagtctactgcatcccttgccaaaactgcatttttccttaagttgctgacagatgtattgttaacttacgcatcatccattcaagttgttcttcgtcatgatgctgatctgagcaacatgcatggtccaaatcgaacaaatgctggtctaattagtggtggaatctttaaccatatcctgcagcatttccttcctcatgctacaaggcaaaagaaagagagaaaaagtgatggagattggatgtataaattggcaacaagggctaatcagttcttggtggcttcatctattcgttctgcagaggcccgaaaaaggattttctctgaaatctgcagtatatttcttgatttcaccgactcgtctgcagcttacaaagccccagtaccaaggatgaatgtgtatgttgatttgctgaatgatattctgtcagcgcgatcaccaactggctcctcgctgtcagcagaatccacagttacatttgttgaagttggtcttgttcattcattatcgacaatgcttcaagttcttgatttggatcaccctgattctgcaaagattgttactgctattattaaggccctggaactcgttagtaaggaacatgttcatttagcagataatgcaaaaggagataactcgtcaaagattgcttccgacggcaaccatgtgaattcatcatctaatagattccaggctcttgacatgacttctcagcacacagagatggttactgatcacagacaaacgtttaatgctgtccaaacttcacaaagttcagattcagtggcagatgagatggatcatgatcgtgatatggatggtggctttgctcgtgatggtgaagatgattttatgcatgagatggctgaagatggaactggtaatgaatctacaatggaaatcagatttgaaattccgcgcaacagagaggatgatatggctgatgatgacgaggacactgatgatgatatgtctgcagaggatggtgaggaggttgatgaagatgatgaagatgaagatgaggagaataacaatttggaggaagatgatgcccatcagatgtctcatcctgacacagatcaggaagaccgtgaaatggatgaagaagaatttgatgaggatttgctagaagataatgatgaagatgaggacgaggaaggagtcatccttcgcctggaggaggggattaatggcattaatgtgtttgaccacattgaagtttttggtgggagcaacaatttgtctggggatacaatgcgtgtgatgcctctggacatttttggtacaagaaggcaaggccgaagtacctccatatacaatcttcttggcagggctagtgaccatggtgttcttgatcacccacttcttgaagagccttcttcaacattgaatttttcacaccaagggcaaccagagaatcttgttgagatggctttctctgatcgaaaccatgagagtagctcctcccgtttggatgctatattccgcagcctgcgaagtggacgtaatggacaccgctttaatatgtggctagatgatggtccacaacgcaatggatctgctgcccctgcagtacctgaaggcattgaagaattgctgatctctcatttgaggcggcccactcctcaacaacctgatggccagacaacacctgttggtggtactcaaggaaatgaccagcccaaccatgaatcagatgctgaggcaagggaagtagcaccagctcagcaaaatgagaactgtgaaaatatagtgaatcctgtaggtctgtcagaaagtgctggccttgcacctgacagtgatgcacttcaaagagatgtgtccaatgcaagtgagcatgctacagagatgcagtatgaacgtagtgacgctgtagcacgtgatgttgaagcagtgagccaagcaagcagtggcagtggtgctactttaggggagagcctcagaagtttagaggttgaaataggaagtgttgaagggcatgatgatggtgaccggcatggaacttcaggggcctcagaacgattaccttcgggtgatattcaagcagctgctcgatcacggaggctgtctggaaatgctgtgccagtaagcagtagagatatgtctctggagagtgttagtgaggttcctcaaattccagaccaagaacctgaccagactgctagtgaggggaatcaggagcctatcagagcggcaggtgctgactcaattgatcctacatttttggaggcccttccagaggacttgcgagctgaagttctttcttcgcggcaaaatcaagtaactcagacttctaatgaccaacctcagaatgatggtgatattgatcctgaatttcttgctgcacttccccctgatataagggaggaggtgctagctcaacaacgtactcaaaggatacaacaacaatcacaagaattagaaggacagccagttgaaatggatgctgtttcaattattgcaacattcccttcagaaattcgggaagaggtgcttttgacatctcctgacactctactagctacactcacgcctgcactagttgctgaggctaacatgttaagggagagatttgctcatcggtatcacagtagctccctttttggtatgaactccaggaacaggagaggtgagtcctcccgacatgacataatggcagcaggacttggtagaaacacaggtgatccctctagatcaactagcaagccaattgagactgaaggtgctcctcttgttgatgaagatgcccttaaagctcttattcggttacttcgagttgttcagcctctatacaagggtcagctgcagaggcttcttgtgaacctttgtactcatcgggatagcagacaggccttggttcgaattctggtggacatgcttatgcttgatctgcagggcttttcaaagaaatcaatagatgcacctgagtcaccctttaggttgtatggatgccatgcaaatatcacatattcacgtcctcaatcttcagatggtgttcctccattagtctcacgtcgtgtgcttgaaacgctgacaaacttggcaagaagccatccaagtgttgctaaactcttgctctttcttgaattcccttgcccatcaagatgtcgcccagaagcacatgatcataggcgtggcaaggctcttctcctagaagatggtgaagaacggaaagcctttgcgcttgttcttctgttaactctgttgaatcagccactttatatgagaagtgtagctcatcttgaacagttactaaaccttcttgaagttgtcatgcataacgctgagaatgaaattaatcaagctaagctagaagcatcatctgagaagccatctgcacctgagaatgcagtgcaagatggtaaagataactccatttctgaatcatatggatcaaagtcgaatcccgaggatggtagcaaagcccctgctgttgacaacaaaagtaacttgcaagctgttttgcaaagtcttccccaaccagagcttagattgctatgttcattgcttgcgcatgatggattgtcggacagcgcttatctccttgtaggtgaagtgttgaaaaagattgtggctctggcccctttcttctgttgccatttcataaacgagctggcacgttcaatgcaaaacttgacacttagtgcaatgaaggagcttcgtttgtacgagaattctgaaaaggctcttcttagctcttcatcagccaatggtactgcaattcttagagttttgcaggctttgagctctcttgtcactactcttaaagagagaaaggatccagaacagcctgctgagaaggaacattcagatgcggtttcccagatttctgaaattaacacagcattggatgctttgtggttcgaattgagcaactgcataagcaagatagaaagctcttcagagtatgcatcaaatcttagtcctgcttctgcaagtgcagctacattaacaacaggagtagcacctccattgcctgctggaactcaaaacatattaccatatatagaatcattttttgtgacatgtgagaagttgcgtcctgggcaacctgatgctgtacaagaggcttctacttctgatatggaagatgcttcaacatctagtggtgggcagaggtcatctgctcaagccagtcttgatgagaagcaaaatgcttttgtgaaattctcagagaagcacagaagattgctgaatgcattcatccgtcaaaaccctggattgctggaaaagtcattctcactgatgttgaaaattcctcgcctgattgattttgacaataaacgtgcatatttccggtctaaaatcaagcaccagtatgatcatcatcatcatagtcctgttagaatttctgtgcgtcgtgcatatattcttgaggactcctacaatcagcttaggatgcgctctcctcaggaattaaagggtagactcactgtccattttcaagcggaagaaggaattgatgctggtgggttgacaagggaatggtaccagtcactatcacgggtcatttttgacaagggtgcccttctgtttacgacagtcgggaatgatttgacgtttcaaccgaatcctaattctgtgtatcaaactgagcacctctcatacttcaaatttgttggacgagtggttggcaaagctctcttcgatggtcagcttttagatgcccattttactagatctttctacaaacacatacttggagtcaaggttacataccatgacattgaagccatcgatcctgcgtactacaaaaatttgaaatggatgctcgagaatgacataagtgatgttttggatctcacctttagcatggatgcagacgaagaaaaactgatattgtatgagaaggcagaggtcactgattgtgagttgattcctggagggcgtaacatcagggttactgaggagaataagcatgaatatgtcgaccgggtagcagagcatcgattgaccactgcaatcagacctcagattaatgccttcatggaagggtttaatgaactcattccacgggagctgatatctatcttcaacgacaaagagcttgaacttctgattagtggtcttccagatattgacttggacgatttgaaagcaaatacagaatattctggctacagcatagcctctccagtaatccagtggttctgggaaatcgttcaggggttcagcaaggaagacaaagctcggttcctccagttcgtcactggcacctcaaaggtaccgttggaaggttttagtgcacttcaagggatctctgggccccaaaggtttcagatacacaaggcctacggcagcacgaatcatctgccttcagctcatacttgctttaaccaactagacttgcccgagtacacatccaaagagcagctccaggagaggttactgttggcaatccacgaagcaaatgaaggtttcggatttggctaa

SEQ ID NO: 2926 - protein, 3648 aa, Sorghum bicolor
MAAAAAAMAAHRASFPLRLQQILAGSRAVSPAIKVESEPPANVKAFIDRVINIPLHDIAIPLSGFRWEFNKGNFHHWKPLFIHFDTYFKTYISYRKDLLLSDDMTEADPMPKNAILKILRVTQIVLENCQNRSSFTGLEHLKLLLASSDPEIVVAALETLVALVKINPSKLHMNGKLINCGSINTHLLSLAQGWGSKEEGLGIYSCVVANEGNQQGGLSLFPGDLENKYGGTQHRLGSTLHFEYNLGPAQYPDQTSDKGKPSNLCVIHIPDMHLQKGDDLSILKQCVDKFNVPPEHRFALLTRIRYARAFNSARTCRIYSRISLLSFIVLVQSGDAHDELTYFFTNEPEYINELIRLVRSEDSVPGPIRALAMLALGAQLAAYASSHERARILSGSSIISAGGNRMVLLSVLQKAISSLNSPNDTSSPLIVDALLQFFLLHVLSSSSSGTTVRGSGMVPPLLPLLRDNDPYHMHLVCLAVKTLQKLMEYSSPAVSLFKDLGGVELLSQRLHVEVQRVIGTADGHNSMVTDAVKSEEDHLYSQKRLIKALLKALGSATYSPGNPARSQSSQDNSLPVSLSLIFQNVEKFGGDIYFSVVTVMSEIIHKDPTCFPALKELGLPDAFLSSVIAGVVPSCKALICVPNGLGAICLNNQGLEAVRETSALRFLVDTFTSRKYLIPMNEGVVLLANAVEELLRHVQSLRSIGVDIIIEIINKLNSSQEDRNNETAILEEKTDMDTDIEGRDLVSVMDSSVDGSNDEQFSHLSIFHVMVLVHRTMENSETCRLFVEKGGLHALLTLLLRPSITQSSGGMPIALHSTMVFKGFTQHHSTPLARAFCSSLREHLKSALGELNKVSNSFEMTNIEKGVIPSLFVVEFLLFLAASKDNRWMNALLSEFGDASREVLEDIGRVHREVLWKISLFEENKIDAETSSSSSTSEAQQPDLSASDIGDSRYTSFRQYLDPILRRRGSGWNIESQVSDLINIYRDIGRAASDSQRVGSDRYSSLGLSSSSQDQSSSSSDANASTRSEEDKKKSEHSSCFDMMRSLSYHINHLFMELGKAMLLTSRRENSPVNLSPSVISVANNIASIVLEHLNFEGHSVSSEREMTVTTKCRYLGKAVEFVDGILLDRPESCNPIMANSFYCRGVIQAILTTFQATSELLFTMSRSPSSPSSPMEMDSKTGKDGKEMDSSWIYGPLTSYGAIMDHLVTSSFILSSSTRQLLEQPIFNGSVRFPQDAERFMKLLQSKVLKTVLPIWAHPQFPECNIELISSVMSIMRHVCSGVEVKNTIGNGGARLAGPPPDESAISLIVEMGFSRARAEEALRQVGTNSVEIATDWLFSHPEEPQEEDDELARALAMSLGNSDTPAQEGDSRSNDLELEEVTVQLPPIDEMLHSCLKLLQTKEALAFPVRDMLVTISSQNDGQNRVKVLTYLIDNLKQCVVASEPSNDTALSALLHVLALILHGDTAAREVASKAGFVKVALDLLRSWELEPRESGMNEVPNWVISCFLSVDQMLQLEPKLPDVTELYVLKMDNSNTKTSLVIDDNKKKDPESLSSVGLLDMEDQYELLKICCKCIEKQLPSASMHAILQLSATLTKVHAAAICFLESGGLNALLSLPTSSLFSGFNNVASTIIRHILEDPHTLQQAMELEIRHSLVTAANRHANPRVTPRNFVQNLAFVVYRDPVIFMKAAQSVCQIEMVGDRPYVVLLKDREKERSKEKDKDKSVDKDKATGAVTKVVSGDTAAGSPANAQGKQSDLNSRNMKSHRKPPPSFVTVIEHLLDLVMSFVPQPRLEDQADVVSGTALSSDMDIDCSSAKGKGKAVSVPPEESKHAIQESTASLAKTAFFLKLLTDVLLTYASSIQVVLRHDADLSNMHGPNRTNAGLISGGIFNHILQHFLPHATRQKKERKSDGDWMYKLATRANQFLVASSIRSAEARKRIFSEICSIFLDFTDSSAAYKAPVPRMNVYVDLLNDILSARSPTGSSLSAESTVTFVEVGLVHSLSTMLQVLDLDHPDSAKIVTAIIKALELVSKEHVHLADNAKGDNSSKIASDGNHVNSSSNRFQALDMTSQHTEMVTDHRQTFNAVQTSQSSDSVADEMDHDRDMDGGFARDGEDDFMHEMAEDGTGNESTMEIRFEIPRNREDDMADDDEDTDDDMSAEDGEEVDEDDEDEDEENNNLEEDDAHQMSHPDTDQEDREMDEEEFDEDLLEDNDEDEDEEGVILRLEEGINGINVFDHIEVFGGSNNLSGDTMRVMPLDIFGTRRQGRSTSIYNLLGRASDHGVLDHPLLEEPSSTLNFSHQGQPENLVEMAFSDRNHESSSSRLDAIFRSLRSGRNGHRFNMWLDDGPQRNGSAAPAVPEGIEELLISHLRRPTPQQPDGQTTPVGGTQGNDQPNHESDAEAREVAPAQQNENCENIVNPVGLSESAGLAPDSDALQRDVSNASEHATEMQYERSDAVARDVEAVSQASSGSGATLGESLRSLEVEIGSVEGHDDGDRHGTSGASERLPSGDIQAAARSRRLSGNAVPVSSRDMSLESVSEVPQIPDQEPDQTASEGNQEPIRAAGADSIDPTFLEALPEDLRAEVLSSRQNQVTQTSNDQPQNDGDIDPEFLAALPPDIREEVLAQQRTQRIQQQSQELEGQPVEMDAVSIIATFPSEIREEVLLTSPDTLLATLTPALVAEANMLRERFAHRYHSSSLFGMNSRNRRGESSRHDIMAAGLGRNTGDPSRSTSKPIETEGAPLVDEDALKALIRLLRVVQPLYKGQLQRLLVNLCTHRDSRQALVRILVDMLMLDLQGFSKKSIDAPESPFRLYGCHANITYSRPQSSDGVPPLVSRRVLETLTNLARSHPSVAKLLLFLEFPCPSRCRPEAHDHRRGKALLLEDGEERKAFALVLLLTLLNQPLYMRSVAHLEQLLNLLEVVMHNAENEINQAKLEASSEKPSAPENAVQDGKDNSISESYGSKSNPEDGSKAPAVDNKSNLQAVLQSLPQPELRLLCSLLAHDGLSDSAYLLVGEVLKKIVALAPFFCCHFINELARSMQNLTLSAMKELRLYENSEKALLSSSSANGTAILRVLQALSSLVTTLKERKDPEQPAEKEHSDAVSQISEINTALDALWFELSNCISKIESSSEYASNLSPASASAATLTTGVAPPLPAGTQNILPYIESFFVTCEKLRPGQPDAVQEASTSDMEDASTSSGGQRSSAQASLDEKQNAFVKFSEKHRRLLNAFIRQNPGLLEKSFSLMLKIPRLIDFDNKRAYFRSKIKHQYDHHHHSPVRISVRRAYILEDSYNQLRMRSPQELKGRLTVHFQAEEGIDAGGLTREWYQSLSRVIFDKGALLFTTVGNDLTFQPNPNSVYQTEHLSYFKFVGRVVGKALFDGQLLDAHFTRSFYKHILGVKVTYHDIEAIDPAYYKNLKWMLENDISDVLDLTFSMDADEEKLILYEKAEVTDCELIPGGRNIRVTEENKHEYVDRVAEHRLTTAIRPQINAFMEGFNELIPRELISIFNDKELELLISGLPDIDLDDLKANTEYSGYSIASPVIQWFWEIVQGFSKEDKARFLQFVTGTSKVPLEGFSALQGISGPQRFQIHKAYGSTNHLPSAHTCFNQLDLPEYTSKEQLQERLLLAIHEANEGFGFG

SEQ ID NO: 2927 - DNA, 2037 bp, Sorghum bicolor
atggacgaagtgccgggtaatcaggacaatcagccatttcttggcaacatcactggagccatgtttgcaaatcctggggaacaatctgcagggtgttcttccctcgaggcagggtgggttcctatgagtgaaagaagccctgctcggaatggtctgggcaccatttacaatgccaatttgtttgatgatcagtcattggcatctgcatttgagaacatgagcttgagcttcactggtagtgctgctgactcttctgctaactctggtaatgttggatccagggatgggctccgttttccagactatttgtttgcatcagctgacaacccaacaaatctgccacttcagtcagcatttggtcaggatgagtttgtgccttcatgtttgatggtcaacaatgctggacacatgagaccaaagtttggtgcacaaaatcctccaatgtacacagggatgcatggcacagataatgcttttttggttagaaccaatttatcacaagctttgcctttccagcaacatctcattatcgataggcagccacaagcatatgcaccttattatcagcagcagatgaactctacattcaagcggcatgatattgatgtcgagatgaaatttatcatgcagccacagtgttcttatcagcaaattccacaggctcctgatgttcgttggatcaatagcaatcaatatggtgttatcaactcatcaaccaagtatgcagctgcacctcaccttagagtgcccactgttcgtcatctaggacatggcagtcctgatatctactggaatggtgctataattcctaatggaagtatccgacagagtttgacacgtatgaataattgtccttgtacaagttatcctgattgcttatgtgaaacctgtgaatactgtcagattcagctatctaaaaagctcaaacattcatttgggctcaggcattcacccaaaggtttgttagaagattgcatctctcataaagtgaaaagttcaccatcatccttggatcctgaagtggccatgaaatctgcccaactgaactataattcagttgatgaagttgttggagaattgtaccacttggcgaaggatcagaatggttgccgtttcctccaaaggatatttacagaaggttctcaagaggatgcccaaaaggtttttgatggtgtaattgagcatatcgatgaacttatgattgatccatttggaaattacttgatacaaaaactactcgagcagtgcaatgataatcaaaagatgcatatactttatgaaataactaaaatacctggccagctagtcaaagttgcatgcaacatgcatgggacacgtgtggtgcaaaaggtgatagaaacagttagtacctcagatgaagtgtccatggtagtatctgctctgagccatggtgccattactctgatgatggatgccaatggcagtcacgttgcacaccgttgcttgcagaagctatcaccaaagtgcaaagcattccttctcaatgcggccacaaaatattgcgttgagctagcaaaggatcggcaaggctgttgtatcatccagaaatgtattattcatgcaaataaggaacagaagaacaagttgttgtacagtatcacaggtcgggctctcaatctcgcagaacaccagtatgggaactatgtaatacagttcatactcgacctcaaggttacttgggcaatgaatgaaattctggacaagcttgagggtagctatggatacctgtcgatgcaaaagtgcagcagcaacgtagttgagaaatgcctgaaagaagcacgggggccaaaacgtgcaaagatcatccttgagcttatcaacgaccccaagctgcagaatatcttgcttgatcagtatgggaattatgtgatccaaacagcattccgggagtgcggggatgctgcggttgaggctgcattggtccgagccatcaagccacacatcagcgctcttcgaaacaacatgtttgggaagagaatcctgtcgaaaacctgcctgaggagcaggaagctctaa

SEQ ID NO: 2928 - protein, 678 aa, Sorghum bicolor
MDEVPGNQDNQPFLGNITGAMFANPGEQSAGCSSLEAGWVPMSERSPARNGLGTIYNANLFDDQSLASAFENMSLSFTGSAADSSANSGNVGSRDGLRFPDYLFASADNPTNLPLQSAFGQDEFVPSCLMVNNAGHMRPKFGAQNPPMYTGMHGTDNAFLVRTNLSQALPFQQHLIIDRQPQAYAPYYQQQMNSTFKRHDIDVEMKFIMQPQCSYQQIPQAPDVRWINSNQYGVINSSTKYAAAPHLRVPTVRHLGHGSPDIYWNGAIIPNGSIRQSLTRMNNCPCTSYPDCLCETCEYCQIQLSKKLKHSFGLRHSPKGLLEDCISHKVKSSPSSLDPEVAMKSAQLNYNSVDEVVGELYHLAKDQNGCRFLQRIFTEGSQEDAQKVFDGVIEHIDELMIDPFGNYLIQKLLEQCNDNQKMHILYEITKIPGQLVKVACNMHGTRVVQKVIETVSTSDEVSMVVSALSHGAITLMMDANGSHVAHRCLQKLSPKCKAFLLNAATKYCVELAKDRQGCCIIQKCIIHANKEQKNKLLYSITGRALNLAEHQYGNYVIQFILDLKVTWAMNEILDKLEGSYGYLSMQKCSSNVVEKCLKEARGPKRAKIILELINDPKLQNILLDQYGNYVIQTAFRECGDAAVEAALVRAIKPHISALRNNMFGKRILSKTCLRSRKL

SEQ ID NO: 2929 - DNA, 483 bp, Sorghum bicolor
gggcaaggagggaggaggcggcagatcccggcgttcgggaggtggaaccagcacagcgacgacgacgacgtgcccatcacgcactacttcgagtccgcggtgcaggccggcctcctcgtcaggcccggtggccactgctaccacgccgccgccgccggcgagctggtgctgttcaggtcctccgcctcgccgcctccacacaagccggccaagaaggtgcggagcacgacgacgatggagagtaacggtcaccaccagcagcttgaggcggggagcaggaggcaaccgcagcggcaggaggcgttcgtggccggcgacggcgggtcccgcgcggcggcgaggccgaggaggccgcgggtcgttagggcggcggtggacgaggacctgtacaaggtgccttccgatatgctgcgcaagaagaaagggaggaagcatgtgaggagcatgtggatgggctgcgtgggcctcaactgcgtcgcctga

SEQ ID NO: 2930 - protein, 160 aa, Sorghum bicolor
GQGGRRRQIPAFGRWNQHSDDDDVPITHYFESAVQAGLLVRPGGHCYHAAAAGELVLFRSSASPPPHKPAKKVRSTTTMESNGHHQQLEAGSRRQPQRQEAFVAGDGGSRAAARPRRPRVVRAAVDEDLYKVPSDMLRKKKGRKHVRSMWMGCVGLNCVA

SEQ ID NO: 2931 - DNA, 360 bp, Sorghum bicolor
atgggtcgcggtcgcggcaaggtggaggtgcgtcggatcgacaacagcgtgagccggcaggtgactttctcgaagcggcggcgcgggctggccaagaaggcgcgggagctggccgtgctctgcgacgccgacgtcgcgctgctcatcttctccgacaagggcacgctccaccacttcgccgcgtacgccaggtacgggaacatgagctatgaccacgtcaagatgaggtccaaacttgaagctctacagaagagccaaaggaatctcatgggggagcaacttgagtccctgacattcagagaggtacagcagcttgagcaccagatagacagcgctctgaggaacatcagatcgaggaag

SEQ ID NO: 2932 - protein, 120 aa, Sorghum bicolor
MGRGRGKVEVRRIDNSVSRQVTFSKRRRGLAKKARELAVLCDADVALLIFSDKGTLHHFAAYARYGNMSYDHVKMRSKLEALQKSQRNLMGEQLESLTFREVQQLEHQIDSALRNIRSRK

SEQ ID NO: 2933 - DNA, 1014 bp, Sorghum bicolor
atggaaaacttgctccacgtgaccccgtcccacctatcgctcccgaatagttatgctgtcccgcagctcccgcaggcgaaggcgacccccacagacatcagcctgcccgttatcgacctgtcccgtagccgcgacgaggtttgccgcgctatcctcgacgccggcaaggagtttggcttcttccaggttatcaaccatggaatcccggagcaggtgttgcaggacatggagtcggtgagtgaagagttcttccagctgccggctgcggataaggcacatttctactcggaggatacaaacaggcccaaccggctcttctccggctccacgtacaagaccagcaaaaggttgtactggatggactgcctccgccttgcgcgcaccttccctggcagcgactgcaagaaagaatggcctgaaaagcccgaggagctccgcaatgtttttgaaaactacactgcactaatgagaggcctggggatggagatgctgcatatgctctgtcagagcctggggctcccgtctgactatttcgatgaagaccagagtgccggcgatatgattctcagtgtcatccgataccctccgtgcccgacccctgacgttacgcttggtctgccaccgcactgcgaccggaacctcatcacacttgtcctctccggctccgtgcctggcctccaggttttctacaaaggtgactggatcatggtcaagcccatacgccattccttcgtcatcaactttggcctgcatctcgaggttgtgaccaatgggatcataaagagcgttgagcaccgcgtgataaccaactcggtgcgagcaaggacgtctgtggtgataaccataaacggcaccgaagattgcctcattggacctgccgacgagctccttggtgaaaacaagcccccacgctaccgcaccgtcacgctccgcgatttcatgcgcatctataacaaatcccttgagaaccctgatgccgctatcaaagaacgcatgaagcccttcatgatatga

SEQ ID NO: 2934 - protein, 337 aa, Sorghum bicolor
MENLLHVTPSHLSLPNSYAVPQLPQAKATPTDISLPVIDLSRSRDEVCRAILDAGKEFGFFQVINHGIPEQVLQDMESVSEEFFQLPAADKAHFYSEDTNRPNRLFSGSTYKTSKRLYWMDCLRLARTFPGSDCKKEWPEKPEELRNVFENYTALMRGLGMEMLHMLCQSLGLPSDYFDEDQSAGDMILSVIRYPPCPTPDVTLGLPPHCDRNLITLVLSGSVPGLQVFYKGDWIMVKPIRHSFVINFGLHLEVVTNGIIKSVEHRVITNSVRARTSVVITINGTEDCLIGPADELLGENKPPRYRTVTLRDFMRIYNKSLENPDAAIKERMKPFMI

SEQ ID NO: 2935 - DNA, 1035 bp, Sorghum bicolor
atgagctcctcgccggtgaccaccgccgccgcgtcggcggccgtggtggcgctggccgtcgccaaccgcgtgctctacaagctcgcgctcgtgccgctcaaggcgtaccctttcttcctggcccagctcaccaccttcggatacgtcgccgtctacttctccatactctacgcgaggtgccgctcgggggtggtgactagagacatgctggcgctccccaagcaccggttcgtcgcgatcggtttgctggaggcacttggagtcgcttctggcatgtctgctggagctatgctaccagggcctgctattcctatactgtcccagtcattcttggtgtggcagcttatattctctgccctgcttttagggaggacgtattcagccagacaaatcattggttgcttcctagtaatttctggcgtgattcttgcggttgcaagtggggcgaatgagggccagcttctttcagaagtcaagttaatttggccagcattgatgatcgcttcatcagcatttcaagctggtgcatctattctgaaggaagctgttttcattgatggtgcaaaacgtcttaaggggaagcgaccggacatctttgtagtcaattcatttggatctggatttcaggctctttttgtctttcttcttcttccatttctttctaatttgaggggaattaagtttgctgagcttcctgcttatttaaatggtggtgctgagtgcttcttaaatgttgcagaaagtccaattgattgtggaggagctccattcctgcctttgctgtttatagtggtgaatatggcattcaatatctcactcctcaatttggtgaagatgtcatctgcccttgtggcttcccttacagcaacatcagcagtgccaatatcaatctatattctttcacttcctttgccctacattcctcatggcgcggaattaagtacgtctttcatcattggtgctgcggtattgctgatgggcctgattctgtataaccttccccaattgtcattgaaacaatcgaaggctgattga

SEQ ID NO: 2936 - protein, 344 aa, Sorghum bicolor
MSSSPVTTAAASAAVVALAVANRVLYKLALVPLKAYPFFLAQLTTFGYVAVYFSILYARCRSGVVTRDMLALPKHRFVAIGLLEALGVASGMSAGAMLPGPAIPILSQSFLVWQLIFSALLLGRTYSARQIIGCFLVISGVILAVASGANEGQLLSEVKLIWPALMIASSAFQAGASILKEAVFIDGAKRLKGKRPDIFVVNSFGSGFQALFVFLLLPFLSNLRGIKFAELPAYLNGGAECFLNVAESPIDCGGAPFLPLLFIVVNMAFNISLLNLVKMSSALVASLTATSAVPISIYILSLPLPYIPHGAELSTSFIIGAAVLLMGLILYNLPQLSLKQSKAD

SEQ ID NO: 2937 - DNA, 1485 bp, Sorghum bicolor
atgcaggccgcggccgggagcgtctcttgggtcaccgcgcagccgtccgtcctcggccgctgcggcggcgcgccgtccgcttcgctcaaggggagtgcttgcggcgtcggaggaggagggtgcaggatccggggccgggacgtcgccgtgccgcggtgctgcgcgcgcgcgcaggagaagcgcccgccgcgagtgcgcaaatccaaggaggagaggcgggagatggtggagtccttcatcaacggttaccgactttcaaatgaaggtaaattcccatcagttaaccttacccataaggaagttggagggtcatattatattgttcgtgaaatcgtgagggatatcatccaagagaatagagtccttggtcctggtggcttggatgctatggcgctgagttttgaagatcgtgatgattcttcagagtcatccatgaagcatgaattgggtcaagacaatatagagatcttagatacgtctggtagtgaagtcagtaagggttatgtacctgaaatatccagcactgatgaatcgattccattgcaagacaatgccatcagcactcagacactgctgggttcatcaaatatcttagaggctggtgttctgaatagtgtggtccaaaatgggagtgcggcagatgcaatattgatggaaacaaatcttgagaaacaagatgaagttccatctggaggatccattgagtttgacttgaatagttctgaagagcaagctcgtttgtttgctcaggtttctgattcagatgaagacattgtactaaacagtcaggcagatgcacaggatggaacagccagtagtgctaccgatggagttattcttcccttagagtcttctgctgtttatgaaagcaatgctgcacttttaagagatcatgagacattacctaatgataatcatgatggatcaactgatggtgccgtggatgatgcaaacctccttgcagcgatcaatggtgttcaagcaaagcaagcttctttacatgagcatgatgcatcaactggaagtgtgtcgattgacaatgctcagagctttgatagtcagtatagtactactgtatctactgatcctataaatggttctaaatcggaggctgaagttgcaaccaagacagttgaagcatctaaagtacacaggctgcaagatgagtttgagcaaccattggttgatgctagctgtgacgggcaagaaaactctgacagccctgtttctcatccagcattagatacaaaggggctgttgcacacagaagatcagcacagtgttgtacagatagatgaaagtgaattcaagatctcaacacctgggatcacaaaggaagaggtccaggcagctgatttcaggcatgaacaaggaattaacaccagaacagcgatcagcaggcatgcactttgcctcctaactttgcgttgcatgcttaccgtttataatttccttcacacatcacaaaaggcagcagtatattag

SEQ ID NO: 2938 - protein, 494 aa, Sorghum bicolor
MQAAAGSVSWVTAQPSVLGRCGGAPSASLKGSACGVGGGGCRIRGRDVAVPRCCARAQEKRPPRVRKSKEERREMVESFINGYRLSNEGKFPSVNLTHKEVGGSYYIVREIVRDIIQENRVLGPGGLDAMALSFEDRDDSSESSMKHELGQDNIEILDTSGSEVSKGYVPEISSTDESIPLQDNAISTQTLLGSSNILEAGVLNSVVQNGSAADAILMETNLEKQDEVPSGGSIEFDLNSSEEQARLFAQVSDSDEDIVLNSQADAQDGTASSATDGVILPLESSAVYESNAALLRDHETLPNDNHDGSTDGAVDDANLLAAINGVQAKQASLHEHDASTGSVSIDNAQSFDSQYSTTVSTDPINGSKSEAEVATKTVEASKVHRLQDEFEQPLVDASCDGQENSDSPVSHPALDTKGLLHTEDQHSVVQIDESEFKISTPGITKEEVQAADFRHEQGINTRTAISRHALCLLTLRCMLTVYNFLHTSQKAAVY

SEQ ID NO: 2939 - DNA, 1863 bp, Sorghum bicolor
atgtttggtttctcgcggcgacggggaaaacttggaaggtcgaagggtgacccaagtgattctttgaacagctctaggagtcctgttggccccagtaaacacctcagcctgcccaatgtatatgatgcagttatgacatcagtgagtggcggtgcagatgatctttccaaccgctgctcgtccgatacctttgatcctgatggacgcactttcaatatttcagaaaattggactgtgctgtccacagaggggaataaacctactcctcgtttctatgttccatggggaaatagtgtcattcttgttggggtatggactttcaatacagaaacggagctttggtcacttatagaagccaagggtgatatccctgcagctcgaagtggccacaccgtgattagagctggtgctacattgatactttttggcggtgaggacacaaaaggaaagaaacggcatgacctgcacatgtttgatctaaagtcatcaacctggcttccattgaactataaaggcactggaccttctccaagatccaatcatgtcgctacactgtatgatgataagatccttctaatttttggaggccactcaaaatccaagacacttaatgacttgtattccttagattttgatacaatggtatggtcaagagtgaagactcatggtcctcacccatcacctcgagctggttgcagcggaactctctgtggaactaagtggtacatagctggcggtgcaagcaagaaaaaacgacatgctgaaacctgggcttttgatgttctacaatctaagtggtctgtttgtgtagtaccccctagttcatcaattactacaaaaaaaggtttcagcatggttcctttctaccacagggacaagattgctcttattgcatttggagggaacaaaaaagagccatccaacaaggttgaagtattagtggtactgcaaaatgagcattcttttagttggcgttcagccccaccagaagtggaccgcgtgctgtatgagtattctccaagcaataaggagcttgctgatcatctcaacaaatgtgcccccttgtactctaacagttccatcgcaaggcatagtctcacttctgtgatagaacacccacctagaagggaacccctctctgagtcattgttgaagcagtccagtttgggcacttcactccatgggcagttggatcaagtagaagagtgcagcttaggtcagaaactgcagaaaccaatggatgatgacagatacgatgacgtcgatgactcttcttcatgtcaagatagaactccaaaagggcatcggagcaaaaggacaggacctggtattcagaatgacatagcagaaaatatagtgactggaggatcaaatgtgagaaggatagctagatgctcttcagatgttagtcagagccacttatacaacacaaaaatagcagacttaatcagaagaaacaccacgctcgaagaccagctttcgaccgcgctggcaagcaaagaccagctagagaagagcttatcgtcggtcattcacagcagagaacagctggagaagatgcttgccaacaaagacaaggaggctgagatgctgaaagagaagatagcatgcttagagctggcgcaggaagagtcgaacagcctctcgaacacggtgcacgctgataatgtgcgccttgaacgtgaagtggcattcctgaaggccgtcacagatgaaacccagaaggagctgcattccactcgtagggttttagcaggagaacagtcacgcgcgttccagctccaggttgaagtgttccatctcaagcagaggctgcaaatactggaggggagatcaggaacacccaccaaacaacctctatag

SEQ ID NO: 2940 - protein, 620 aa, Sorghum bicolor
MFGFSRRRGKLGRSKGDPSDSLNSSRSPVGPSKHLSLPNVYDAVMTSVSGGADDLSNRCSSDTFDPDGRTFNISENWTVLSTEGNKPTPRFYVPWGNSVILVGVWTFNTETELWSLIEAKGDIPAARSGHTVIRAGATLILFGGEDTKGKKRHDLHMFDLKSSTWLPLNYKGTGPSPRSNHVATLYDDKILLIFGGHSKSKTLNDLYSLDFDTMVWSRVKTHGPHPSPRAGCSGTLCGTKWYIAGGASKKKRHAETWAFDVLQSKWSVCVVPPSSSITTKKGFSMVPFYHRDKIALIAFGGNKKEPSNKVEVLVVLQNEHSFSWRSAPPEVDRVLYEYSPSNKELADHLNKCAPLYSNSSIARHSLTSVIEHPPRREPLSESLLKQSSLGTSLHGQLDQVEECSLGQKLQKPMDDDRYDDVDDSSSCQDRTPKGHRSKRTGPGIQNDIAENIVTGGSNVRRIARCSSDVSQSHLYNTKIADLIRRNTTLEDQLSTALASKDQLEKSLSSVIHSREQLEKMLANKDKEAEMLKEKIACLELAQEESNSLSNTVHADNVRLEREVAFLKAVTDETQKELHSTRRVLAGEQSRAFQLQVEVFHLKQRLQILEGRSGTPTKQPL

SEQ ID NO: 2941 - DNA, 1620 bp, Sorghum bicolor
atggcggccgcaaaaggaccagtggccgtcggatccgctatccccagcagcattgcccccgaggagcctaaagtcgtcgcgccggaagaggagaacggggagatggctgatatccaggacaaggaagtcagcatggaagggctatgctccataggcgcctatgatcagtggacgccgctctctgtttctggccagctcccgaaaccacgctataagcatggagctgcggtggttcagcagaagatgtatgtctttggtggaaatcacaatggccgttaccttggcgacattcaggttctggacttcaaaacgttttcatggtcaaagctggaagctaaatcacaagcaggaccatcagaatcagccggagaagttccattttctgcatgtgctggtcattcagtgattcagtggggaaataagatcctatgtcttgcaggacatactagagaacctgcagaaagtctcagtgtcaaggagtttgatccacaaacctgtacttggtctaccttgcgtacttatggaaggtcaccgagctcacgtggtggtcagtcagtgactcttgttggagaaactctagttgtgtttggcggtgaaggtcatgggagatctcttctgaatgatctgcacattcttgatcttgagagcatgacttgggatgaatttgagaccacaggcactcccccttctccgaggtcagagcacgctgctgcttgctttgcagaaaggtatcttctgatatttggcgggggatctcattctacatgtttcagtgacctacacctccttgacactcagacaatggaatggtcaagaccaaagcagcaaggtgttactccagaaccaagagcagggcatgcaggtgtaactattggagaatattggtttattactgggggtggaaatagtaggaaaggtgtctcggttacccttgtactcaacatgtctacttatgaatggtcagttctcactgatcttgaggcccatgcaccccctacaagtgagggctcaagtttagtaatgtacacaattaatggagagaattttctggtgtcatttggaggatatagtgggcgttatagtaatcaggcttatgctctcaaggcaagtctcaaaccaagtgtcccgtctcaacaaattgatgaagcagagtcaaatggttttgccccgttatctgtagcagaaaattctagcaggaaagtcatatttgaaattgaggaacttaaagatgtaaagcctggcaatagggcagataacagcaaaaccttgggacaagtagctacggatgaacaaaaccaaatagaagacagacttaatcatgagcgcttgcagagtctccgcctgaagcaggaactagctgatgtggagaacagaaatgcagaacttactgaggaactccacttagttcgagataaactttctatcgagcaaactagggcttcccaactcgagaatgaagtttcagagattcaacaacgactacagaagatggatatcctagaaaaggagtttgaatcacttcgcagtgaactggacagtactgtatccgaagaagcagcttcaagtggcaaccagctgcaccgcagtcgcagtcggggcttctggaggtggaatgggtga

SEQ ID NO: 2942 - protein, 539 aa, Sorghum bicolor
MAAAKGPVAVGSAIPSSIAPEEPKVVAPEEENGEMADIQDKEVSMEGLCSIGAYDQWTPLSVSGQLPKPRYKHGAAVVQQKMYVFGGNHNGRYLGDIQVLDFKTFSWSKLEAKSQAGPSESAGEVPFSACAGHSVIQWGNKILCLAGHTREPAESLSVKEFDPQTCTWSTLRTYGRSPSSRGGQSVTLVGETLVVFGGEGHGRSLLNDLHILDLESMTWDEFETTGTPPSPRSEHAAACFAERYLLIFGGGSHSTCFSDLHLLDTQTMEWSRPKQQGVTPEPRAGHAGVTIGEYWFITGGGNSRKGVSVTLVLNMSTYEWSVLTDLEAHAPPTSEGSSLVMYTINGENFLVSFGGYSGRYSNQAYALKASLKPSVPSQQIDEAESNGFAPLSVAENSSRKVIFEIEELKDVKPGNRADNSKTLGQVATDEQNQIEDRLNHERLQSLRLKQELADVENRNAELTEELHLVRDKLSIEQTRASQLENEVSEIQQRLQKMDILEKEFESLRSELDSTVSEEAASSGNQLHRSRSRGFWRWNG

SEQ ID NO: 2943 - DNA, 3720 bp, Sorghum bicolor
atggcgaactacctcgcgcagttccagaccatcaagtccacctgcgaccgcatcgtcatcgccgtcgaagatgttagtgacttgtggctaaatgtcaaggaaagttttgaacaacgagtgccagtgaagaaggcctgtctcaacaacaaggcaaggaaccctgtttttgttgacaatctaccagctgagtttatacaaactactgattcaagactacggagtcgattcccacaagaacaatacttgttctggttccgggagccatatgcaactgttgttcttgttacttgtgaggatcttgatgaattcaagaccattcttaagcctcgcctcaaattaattgtgcaaaatgatgaacgagaatggttcattgtgtttgtgtcgaaggcccatcctagcaatgatcaagcaactaagatggcaaagaaagtatatgctaggctggaggctgatttcaacaccaaaaagagagagagatgctgcaagtttgatctccatggagcagacaaggaattctgggatgattttgactctaaaatggtggactgcatcagaaacactttggataggcgggttcagttttatgaagaggaaatacggaggttaagtgagcaacggttcactccaatatggaacttctgcaacttcttcattctgaaggaaagcttggcattcatgtttgagatgagtaatcttcatgaagattcactccgtgaatatgatgaacttgaactatgctattcagaatcagtgaactctccagggaaacatcgtgaatttggtgggctagatactggggatgaccaggctgcactgctaaatccaggagccaaagcacttacccaaattgttcaggatgacgtattcagagaatttgagtttaggcaatacatatttgcttgccaggctaagctattgtttaaactgtctcgcccaattgaggttgctgccagaggatatgcttttgttgttggcttttccaagacactagccttgcacgaaaatgctctaccattttgcttccgtgaagtatgggtgataactgcatgcttgggtttgataaagtctacgagttcgcattatggtgatggatctgttgctattgactcagagaaagagttctatcgtcttcagggtgatctttattccctctgtcgtgttaagtttatgaggcttgcttacttgattggttatggggttgagatagaaaagagtccagtcaacagtgcatctttaagcatgttaccatggccaaagccagctacatggccttcaatccctcctgattcatcagcagaaataatggaaaaggagaagatggttcttcaagtcaaatcaagagaaaagctcttcagcattcacaggaaacctctgccattagaaccttctttacttctacgtgaggctaataggcgcagggcttttctctctgttggaaatctatccgagctgtatgattcatctgatgcttcaggtttagatgcaaattcaaaacttcctcccaacagacctgcttctaacttaatgacaagaacaatgtcaggtccagcaacgtccgagacttcactgccagttgatcgtcccatgaggttgtcagaaattcatgttgcagctgagcatgcactgaaacaaacgatatcagatcctgattttatgacatcactttcatcactagaagaatttgagaaaagatatatggagcttactaaaggtgctgctgacaattaccaccgctcttggtggaaaagacatggagttgttcttgatggagagattgcagctctgttctttaagcatggaaattatgacctagctgtgaaatcctatgagaaagtttgtgctctctattctgcagagggctgggaagagctgttggcagatgttcttcctgatcttgcagaatgccagaagattcttaatgatgaagctggttatttgtcttcttgtgtaaagttactttctctggacagtggcttgttttcatctaaagagcggcaagctttccagtcagaagttgttcgacttgctcacagtgaaatgaaacatcttgtgccccttgatgtctcatcactaattacatttgctggaaatgctggtccaccactagaattatgtgatggagatcctggtacactatctgtagcagtttggagtggcttcccagatgacatcacactggagtctctcagtttaagattgtcagcttcttctagtgcagatgaaggtatcaaggcaattaaaagttcagattctcatgttctcgtaccaggtagaaatatcatctcttttaacattcctcctcaaaagcctggctcctatgtgttgggtgctctcactggacagattggcaaactgtcattcagatcgcatggattttctcaagatggtccagttgaaactgatgaatttatgagctttgagaagccaacaagacctgttttgaaggtgagaaaaccaagggctttagttgatattacacctgctgtgtcctctgcattgcttatgaatgagctccaatggattggattaattgttaagccaatagactattctttaaaaggtggcatattgcatatcgatgctggtgctgaactgaaaattgaggagtctcagatgattgaaatagaaatttacggaagtgatgtggagtgtgctaattctgccaacggctccattgaagctggaaaggttgaaaagatccctattgaaaatggaaagataaaacttccagattgggctagtgatgtgactactcttgtttggtttcctgttcgtgctattgatgatacaattgccagaggcgaatccccagtgtctcagaaacagagcgttgtagatgggatgagaatgattgctctcaagcttgagtttggagttttccataatcaagtgtttgaaaggaccattgcagtccattttactaacccattccatgtaagcacacgcgttgtggacaagtgcaatgatggagctctacttctacaggtgatattgtgttctgaagtgaaggccacactgcatgtaaaggatgtacggttagatcttcaatctggatttgagcacttgggcaaaggagatggacggccagctttgagtttattccctctggttattgctccttcttccaaagctggaattttattcatgatacggttaagtggtacaaaggatgcagatgaggcagaaaatgcagacagcatgctgaatatcacttatgggatatctggtgacagaacaactggagcacattctcctgtacctgtcaaatctggtgactctgaagagcttctgttcaagattgcacttagactgaagcgacctgtcctggatccatgtctagcagttggattccttccattttctactgactgcctgagggttgggcaattagttaatatgaggtggagggtcgaaaggctgaaaaccccggaggatgcatccatatctgtcgacgaactactttatcaggttgaggcaaacccgcagaactggatggttgctgggaggaaatgtggtcacgtatcgttgtcaaatgagcaaggttcaaggatggagatcatggtgacatgtgtgccgctggtgtctgggtacgtccacccaccgcagctgggcctgccggaggtgggcgaggcaaatattagctgcaacccagcagggcctcacctggtgtgcgtccttcctccagccctcagcacctcctactgtatacctgcggcatga

SEQ ID NO: 2944 - protein, 1239 aa, Sorghum bicolor
MANYLAQFQTIKSTCDRIVIAVEDVSDLWLNVKESFEQRVPVKKACLNNKARNPVFVDNLPAEFIQTTDSRLRSRFPQEQYLFWFREPYATVVLVTCEDLDEFKTILKPRLKLIVQNDEREWFIVFVSKAHPSNDQATKMAKKVYARLEADFNTKKRERCCKFDLHGADKEFWDDFDSKMVDCIRNTLDRRVQFYEEEIRRLSEQRFTPIWNFCNFFILKESLAFMFEMSNLHEDSLREYDELELCYSESVNSPGKHREFGGLDTGDDQAALLNPGAKALTQIVQDDVFREFEFRQYIFACQAKLLFKLSRPIEVAARGYAFVVGFSKTLALHENALPFCFREVWVITACLGLIKSTSSHYGDGSVAIDSEKEFYRLQGDLYSLCRVKFMRLAYLIGYGVEIEKSPVNSASLSMLPWPKPATWPSIPPDSSAEIMEKEKMVLQVKSREKLFSIHRKPLPLEPSLLLREANRRRAFLSVGNLSELYDSSDASGLDANSKLPPNRPASNLMTRTMSGPATSETSLPVDRPMRLSEIHVAAEHALKQTISDPDFMTSLSSLEEFEKRYMELTKGAADNYHRSWWKRHGVVLDGEIAALFFKHGNYDLAVKSYEKVCALYSAEGWEELLADVLPDLAECQKILNDEAGYLSSCVKLLSLDSGLFSSKERQAFQSEVVRLAHSEMKHLVPLDVSSLITFAGNAGPPLELCDGDPGTLSVAVWSGFPDDITLESLSLRLSASSSADEGIKAIKSSDSHVLVPGRNIISFNIPPQKPGSYVLGALTGQIGKLSFRSHGFSQDGPVETDEFMSFEKPTRPVLKVRKPRALVDITPAVSSALLMNELQWIGLIVKPIDYSLKGGILHIDAGAELKIEESQMIEIEIYGSDVECANSANGSIEAGKVEKIPIENGKIKLPDWASDVTTLVWFPVRAIDDTIARGESPVSQKQSVVDGMRMIALKLEFGVFHNQVFERTIAVHFTNPFHVSTRVVDKCNDGALLLQVILCSEVKATLHVKDVRLDLQSGFEHLGKGDGRPALSLFPLVIAPSSKAGILFMIRLSGTKDADEAENADSMLNITYGISGDRTTGAHSPVPVKSGDSEELLFKIALRLKRPVLDPCLAVGFLPFSTDCLRVGQLVNMRWRVERLKTPEDASISVDELLYQVEANPQNWMVAGRKCGHVSLSNEQGSRMEIMVTCVPLVSGYVHPPQLGLPEVGEANISCNPAGPHLVCVLPPALSTSYCIPAA

SEQ ID NO: 2945 - DNA, 1740 bp, Sorghum bicolor
atgtcttcgccggcgccggcggaagaggacggccgtgcgccgaccaagtacgtgctgatcacgggcggcgtcgtcagcggcctcggcaagggcgtcaccgccagcagcatcggcgtcgtcctcaaggcctgtgggctccgcgtcacctgcatcaagatcgatccatacttgaacacagatgctggtacaatgtccccctttgagcatggtgaggtgtttgttcttgatgatggtggagaggttgatttggatttggggaattatgagcgtttcatagatgtaactctgacgagggataacaacattaccactggaaagatataccagtctgtcattgagaaggagagaaggggtgattatcttggaaagactgtacaggttgttcctcatgtcactgatgaaataaaacagtggatacagtccgtgtcttcagttcctgtggatgggcagactcgtccagctgatgtttgtgttattgaattgggaggcactgtaggtgatattgagtcaatgccattcattgaagctttgcgccaattatccttttctcttggcaaggagaatttctgcctcatacacgttagccttgttccagtattgggtgtagttggtgagcagaaaactaaaccaacacaacacagtgtacgagaactgagagcgttgggtctgactcctgatcttctagcatgccggtcagcacagccactaataggatctgttaaggagaagctgtcacaattttgccatgtcccggttgagaacatactcaacatccatgatgttccaaatttatggcatgtcccacttattcttagaaaccaaaaggctcatgaagctataatcaaacaactgaaccttgctaggtccgctggaccacctgagttacgagattggacagatatggctgagtcgtatgataacctcaagaactctgttaaagttgctttggttgggaagtatactaatctgacagattcttacctatcagtggtgaaggctctcctacatgccagtgttgcctgttcgttaaagccatctatccagtggattgcagcttcggatcttgaagatgcaactgcaatatctgcaccagatgcccatgctgaagcctgggaaactcttaaaggttcatcatgcattttgatacctggaggattcggggatcgtggaatctcagggatgatattggctgcaaaatatgctcgtgagaataaagttccatatcttggtatttgcttgggcatgcagatatcagtgattgagatgtccagacatgtcctgggcctgggagatgcagacagtgaagagtttaacaaggatacaccaaatcatattgttatgtacatgcctgaggtttcaaaaacacatatgggaaacacaatgaggttgggctgcaggagaacattcttcaggaaacctgattgccttacatcaaaactgtatggaagtcctccacatgtagatgagcgtcatcgtcatagatacgaggtcaatccctcttttgttcccatgcttgaaagtgctggtcttcattttgttggttgtgacgaaagtcgaaagcggatggagattgtggagctacaagatcatccattctatgtaggtgttcagttccatccagagttcaaatcaaggccccgaagaccttcacctccttttacaggtctaataatggcagccactaaacaactgggaacaatttcgaatagctcgaatggctatgttggagcttctggctaa

SEQ ID NO: 2946 - protein, 579 aa, Sorghum bicolor
MSSPAPAEEDGRAPTKYVLITGGVVSGLGKGVTASSIGVVLKACGLRVTCIKIDPYLNTDAGTMSPFEHGEVFVLDDGGEVDLDLGNYERFIDVTLTRDNNITTGKIYQSVIEKERRGDYLGKTVQVVPHVTDEIKQWIQSVSSVPVDGQTRPADVCVIELGGTVGDIESMPFIEALRQLSFSLGKENFCLIHVSLVPVLGVVGEQKTKPTQHSVRELRALGLTPDLLACRSAQPLIGSVKEKLSQFCHVPVENILNIHDVPNLWHVPLILRNQKAHEAIIKQLNLARSAGPPELRDWTDMAESYDNLKNSVKVALVGKYTNLTDSYLSVVKALLHASVACSLKPSIQWIAASDLEDATAISAPDAHAEAWETLKGSSCILIPGGFGDRGISGMILAAKYARENKVPYLGICLGMQISVIEMSRHVLGLGDADSEEFNKDTPNHIVMYMPEVSKTHMGNTMRLGCRRTFFRKPDCLTSKLYGSPPHVDERHRHRYEVNPSFVPMLESAGLHFVGCDESRKRMEIVELQDHPFYVGVQFHPEFKSRPRRPSPPFTGLIMAATKQLGTISNSSNGYVGASG

SEQ ID NO: 2947 - DNA, 2124 bp, Sorghum bicolor
atgaagaaccccgacttcgccgcagacaaagcgctcgccaaggacttcctgtccaacttcgccggccctcacggcgagcccaagtacctgaacatcctgcaagatgtcgccaataggaagatacgcgcggtccagatcgagctggacgacatgttccattataaggatatcgacgaggagttcttgcagcgtgtcactgagaacacgcggcgctacatcggcgtcttcgcggaggccatggacgagatcatgccggagcccacggaggcgtacaccgtcgacgaggaccgggacatcctcatgacgcagcgtgtggatgagggtgccgacggcggcgccgacggcacagacccgctacagaggatgccaccagagatcaaacggttctttgaggtttacatcaagacattctcaaaggcgactccgctcaccattaggcaagtaaaggcatccaacattgggcagcttgtgaaaatatctgggattgttacccgctgctcggatgtgaagcccttgatgcaggttgctgtttatacatgtgaagaatgtggctttgagatataccaggaagtgacggctagagtgtttatgcctctcattgagtgtccatctcaacgatgcaagctgaacaaagcaaaggggaatctaatccttcaactgcgtgcatcaaagtttttgaaatttcaggaggtgaagcttcaagagttagcagagcatgtaccaaagggccacattcctcgttctctgactgttcatctaagaggagagctgactagaaaggttgcacctggagatgtggttgagatgtcgggcatttttctccctatgccatactatgggtttagagcgatgcgcgcaggattagttgctgatacttacttggaagcaatgtctgtcacccatttcaagaaaaaatatgaggactgtctgatagcgattgcaaaactgttgcagttggcaaggtcattggcaccagaaatatttggccatgaagatgtcaaaaaagcactgctgttactacttgttggtgcaccccatcggaagcttgcagatggcatgaagatcagaggagacctgcatatatgcatgatgggagatcctggtgttgcaaagagtcaacttctgaagcatattatcaatgttgcaccaagaggagtgtacaccactggacgtgggagcagtggtgttggtcttactgctgctgtccagaaagatccagtaacaaatgagtttgtccttgagggtggagcactggtgctggcagatatgggcatttgtgctatagatgagtttgataagatggaagagtcagacaggaccgcaattcatgaggtaatggagcagcaaacagttagcattgccaaggctggcatcaccacctctctcaatgcgagaaccgcaattctggctgctgcaaatccagcatggggaaggtacgatatgaggaggaccccagcagaaaatataaatctacctccagcacttttgtctcgtttcgacctcctttggttgatcctggatcgtgcagacatggaaactgatcttgaaatggcaagacacgttgttcatgtgcatcaaaatcttgaatcaccagcactggggttcacaccacttgagccatctgtactcagagcatacatatctgctgctagaagagtcattccttctgttcctagagagcttgaggaatacattgcaactgcatattccagcatccgccaagaggaggcaaagtcaaatgcaccaacctcctacacaactatcagaacacttttgagcatactccgtatttctattgccttggcaagacttaggttttcagaaactgtggctcagagtgatgttgacgaagcactgcgactgatgcaaatgtccaaatactcgttatactcagatgaccgccagcggtctggccttgatgcaatatctgacatatattccatcctgagagacgaagctgctaggacgagcagcatggatgtgagatatgctcatgctcttaacttgatctccagaaagggatacagtgaggctcaattgaaggagtgcttggaggaatacgcttccctgaacgtgtggcaaatccatccaagcacctttgacatccacttcatcgatgcttga

SEQ ID NO: 2948 - protein, 707 aa, Sorghum bicolor
MKNPDFAADKALAKDFLSNFAGPHGEPKYLNILQDVANRKIRAVQIELDDMFHYKDIDEEFLQRVTENTRRYIGVFAEAMDEIMPEPTEAYTVDEDRDILMTQRVDEGADGGADGTDPLQRMPPEIKRFFEVYIKTFSKATPLTIRQVKASNIGQLVKISGIVTRCSDVKPLMQVAVYTCEECGFEIYQEVTARVFMPLIECPSQRCKLNKAKGNLILQLRASKFLKFQEVKLQELAEHVPKGHIPRSLTVHLRGELTRKVAPGDVVEMSGIFLPMPYYGFRAMRAGLVADTYLEAMSVTHFKKKYEDCLIAIAKLLQLARSLAPEIFGHEDVKKALLLLLVGAPHRKLADGMKIRGDLHICMMGDPGVAKSQLLKHIINVAPRGVYTTGRGSSGVGLTAAVQKDPVTNEFVLEGGALVLADMGICAIDEFDKMEESDRTAIHEVMEQQTVSIAKAGITTSLNARTAILAAANPAWGRYDMRRTPAENINLPPALLSRFDLLWLILDRADMETDLEMARHVVHVHQNLESPALGFTPLEPSVLRAYISAARRVIPSVPRELEEYIATAYSSIRQEEAKSNAPTSYTTIRTLLSILRISIALARLRFSETVAQSDVDEALRLMQMSKYSLYSDDRQRSGLDAISDIYSILRDEAARTSSMDVRYAHALNLISRKGYSEAQLKECLEEYASLNVWQIHPSTFDIHFIDA

SEQ ID NO: 2949 - DNA, 123 bp, Sorghum bicolor
ttaacttcgtgctactgttggctgttaatgttgttctacatcagctataactataacaagcaacgattaaacagatcaaatatgtgctatacaggtggggagatcaatgagtatacaaattga

SEQ ID NO: 2950 - protein, 40 aa, Sorghum bicolor
LTSCYCWLLMLFYISYNYNKQRLNRSNMCYTGGEINEYTN

SEQ ID NO: 2951 - DNA, 5034 bp, Sorghum bicolor
cccaaacccgcgcccgccgcctcgcagaaccctagcgcggccccgcctcgccctcctcctcctcctccgcctccgccgccgccgccggtgacggcggttgcgagggcgcgcgaggaaggcgagctctcctccggcgccgacgacgacgagactctgcaaactcggctaggtgctacatccattcttgggaagtttgtggaggctggatctcaagtgccatcggcaactctccttggtaaaggcagtaacaccttgattgtctcgaatgctctgaatcataaagtgtctgctccaagttacaagaagatcatgagggcgaatcaggggcaattcaaaccgggtactaatcggaatctttcatggcagaagcctgtgtcaagtgataaccttgtgataactttctcagatgatgatggcgagacagactctggaaagacaagacaaggtaaagttaggaaggccagctctcaaggtacacagagaacagggaacagtatgcaaactaggatcatgagagaggaagtatctcagcagaaaacccttggtacaaaagtaggtcctgcacacttgcctgcttttccattcacacacagaaatgtaggggctggcaggggatcaggtaatacctttgtcaggaaagagccacctgtccgccaagttaatcctctgaagtctaaacagaaaattcaaaatggggtaggagtacattctgaagatgataggttagaaatcttgcgccataaaatagctgctagagaaaatgaactaaaaggtcaaaaaagacctttgtccgctgttgctacaaagaatacagaattgtcttccaatcagccaaggctgccatcagaaaagatagggcttgaagcttccaacagtggtgaatattcacgctttaatagtctgtctgaacataatggaggaccaaataaaaggttgaagctcaatcagcagaattcgaacagccaatttcgcagtgacctggtaacattcgcacctattggttctacatcagggaaaaacaatgtgcaatcttcagaagtgacaaatcagtttgaaaatggaatttctatgaaccttaatgtcaatgaaacagataccacagccacaacagaacattcagatcaaatacaacaaggtggggcaactaagagccttcatcaccacaaagatgctggaggtgctggtaaccatgctatgcttgagttgcacgatgggcttgcagcacaaccaccatttactgacacacaaactgtaccagaagatactagtgctttggcgcctgtcacgtctgcccaagctaggcaacaggtactgcctgttggtactccacctgtgttagatggaatgccacaattgcaacctggaaattatgttttactgtgtcaaatttcattgtgtaaggtaaggtcaattccccttttctattttttgcagaacgccgtatgtttgaactgcagtgtccagataggcgtagacacacggaacacaacattgttctctctacttgagatggaagaactacaagacaaggaattggaggatgctcaggagcatagacaaaaatgtgaagctgaagaaagagaagctcttagagcttatcgcaaagcacaaagagctttactcgaggcaaatgaaagatgtgcaattcttcgtagaaaaagagagatttgctcttcacaagtccatggtttaattgcagagaattcttctttggtgcagtctttgagttttcggaatcctgaagatggccttgcaatgccatcactgctcaattctcagattcatgcagatagtcagatgcctgaaaatcagggtggtaggcacaggctttctgaagaacattctgagcagccagttgataagcatgaggcacggccacactatcatgataatagcgtcctttcagattacatggaggatgatcttctcttccccactagacaggcaagatcagaatgcactttggatctggagaatcaaatggaagaaactatacatgtatattctgaggaaaacagacaagtttctggtgacagtgctcaggattatgaacttttagaagcttctttgaggtctagattggttgaaagatttgggaagaaatcatgcttgaatgtcaccattgatgaaggcactgaagaacttgctcttggaaaagtagctgcaggacatggcaagcagtcaatgtatgttggacatcagttacaggaagcagagcagaatattatgacaactactcctggtacaatggagctggaaaacgatggtgctgaaaaaactggcggcctctctaattctagtagtggtccttcaatgggcaactgtgatcctgaggacaacatttcttctctcaaagagttatgcatgccattggctatggacactctcatttttccttcttcagctccactaaatgccgctagacaaatcaagcgagcattacctgggatttgcaaggacccttcagattacaaaaatgactatctgaccagtgatgcagcgtctgaagttacagaaagtgtacaagatatgatgcatgaccttgttggagaaaatatgaagattctcccaactacccaaaaggataataatatggtacacagtgtgattgatcctttctggcccttctgcatgtttgagcttcgaggaaaatgcaatgacgaagagtgccagtggcaacatgttgagcatcatgcttggagaaagccaaagcttaaaaaacattctatgacctctgtttcaggccagattccttatggtttgtctcagcatattcttcctgtgccagtgtatcttgtcggttcaaatcttattaaagctgatctgaacttgacacagtcagttttggctagcagtttatggcaatattggcaaagggggttttgtgcttcctttcctttacctttatctgttcaaagagttcttccatcagatgcaccgttcttacaggctggtgatggctggattgctgattttgataggaacagacaactattaaaatttcgaatgctggatagcaggaagaataagattgtacagggtcctgttgatattgaattattcttggaggcagctcttgatttatattgtggaaaaggaaacaagcctgaaaggatcaaggctctttcatttctggcgcggtctattgaggctgatccaagtacagttatcctgtgggtgttttatctccatatttactatcaaaaggatgaaggacttggaaaagatgacatgttttttcatgcggtgcaacacaatttttgttcctatgaattatggcttatgtatataaatagtaggttacgtgttgatgatcgattggatacttataacgatgctttgagcatgctctgccaaatgacagctgacagtgacaaggatctacaagaaagaagtgctttcatactagacatcttcttacagatgatttacttcctgtgcatgtctggaaatgtagagaaggcaatttctaggattattggaatacttccaactgcaatgcctgataattgtggtgacaagttgcttgctgatgtcatttctagcttgaccatgtccgacagatgcatattttggatttcctgcctatatatctcaatttacaggaaccttccagaggaaattattgatcagctagagttccagaaagctttgcctcgtgccttaaaatggccttctattgatcccagcgtagctaacagagataagattatagaacttttaaattatgctgcttataagatggctgaagatattagtgagtgtgttaaaaacggggatccatcttacctgatgttatcgcaattcctcactgttaaccacattagttgtctagcggctgttgaaggttttaaatcttctgctgatatgctggtgacgtacatgaaggagtacccaatgtgtcctcagattctgcttatctcagctcggttagacagaaagcatggtacatgtcctggtctgaaaagctttgatgagttgatcttgaattggcctaaagaggcacaaggaattcaatatatgtggaatcaatatgttgagcatgttctggccactgataccgagttagctgagaaggtactgacttgctggtttgatgaacacggaaaagattgtgatatccaaaccaattctgctatttgtatagaactgagcagcgaagagcctggaacatcatcacttgtttctccccaggaagttggctctggtccatctacatcagaagatctcatctttcggttattaaacctctcattgtacaagatactagagaacaacctacaggaagcacaaattgctgtggataaagcattgaaattggctcatggggagtggtacgagcactgtataagagaacatgctgcaattcatgcactggagctggagaaatcatcgtcttcgacagatgctcaaactcaggctacattcagtttaatcattggttaccttgcagataatcgcaacttgccaacaagggagctgctgtcacgaaggttttgccaaaatgttaagaaacataggcttaggcagcttatagatgacactattggttctgttcctgcagattcttctctgataaactctgcccttgaagtgtgctttggtccgtctctccttccaaaaagaattggcgatgtgaagtacctggtagattttgttgaaacggtcatggaggctcttcctgcaaactatcgcctaggtttagcagttggtggatttgtagctaagcacttcagtggttctgatgcaacctccactgggaccaggttctgggcaagttctgttctgatcaacgccatcttccgagctgtacctgtcgcaccagaatcagtatggctagaaggcgcagatctcctgcagaagttgcatgtcacagagattgtaaagaggttctaccagcaggcagcatcggtctaccccttctccttcaagctgtggcacgcgcatctgaattactgcaaagccagtgggagcaacactgagagcatcgtggagaatgcgaggcagcgtggcattgagctgaatccgacacca

SEQ ID NO: 2952 - protein, 1678 aa, Sorghum bicolor
PKPAPAASQNPSAAPPRPPPPPPPPPPPPVTAVARAREEGELSSGADDDETLQTRLGATSILGKFVEAGSQVPSATLLGKGSNTLIVSNALNHKVSAPSYKKIMRANQGQFKPGTNRNLSWQKPVSSDNLVITFSDDDGETDSGKTRQGKVRKASSQGTQRTGNSMQTRIMREEVSQQKTLGTKVGPAHLPAFPFTHRNVGAGRGSGNTFVRKEPPVRQVNPLKSKQKIQNGVGVHSEDDRLEILRHKIAARENELKGQKRPLSAVATKNTELSSNQPRLPSEKIGLEASNSGEYSRFNSLSEHNGGPNKRLKLNQQNSNSQFRSDLVTFAPIGSTSGKNNVQSSEVTNQFENGISMNLNVNETDTTATTEHSDQIQQGGATKSLHHHKDAGGAGNHAMLELHDGLAAQPPFTDTQTVPEDTSALAPVTSAQARQQVLPVGTPPVLDGMPQLQPGNYVLLCQISLCKVRSIPLFYFLQNAVCLNCSVQIGVDTRNTTLFSLLEMEELQDKELEDAQEHRQKCEAEEREALRAYRKAQRALLEANERCAILRRKREICSSQVHGLIAENSSLVQSLSFRNPEDGLAMPSLLNSQIHADSQMPENQGGRHRLSEEHSEQPVDKHEARPHYHDNSVLSDYMEDDLLFPTRQARSECTLDLENQMEETIHVYSEENRQVSGDSAQDYELLEASLRSRLVERFGKKSCLNVTIDEGTEELALGKVAAGHGKQSMYVGHQLQEAEQNIMTTTPGTMELENDGAEKTGGLSNSSSGPSMGNCDPEDNISSLKELCMPLAMDTLIFPSSAPLNAARQIKRALPGICKDPSDYKNDYLTSDAASEVTESVQDMMHDLVGENMKILPTTQKDNNMVHSVIDPFWPFCMFELRGKCNDEECQWQHVEHHAWRKPKLKKHSMTSVSGQIPYGLSQHILPVPVYLVGSNLIKADLNLTQSVLASSLWQYWQRGFCASFPLPLSVQRVLPSDAPFLQAGDGWIADFDRNRQLLKFRMLDSRKNKIVQGPVDIELFLEAALDLYCGKGNKPERIKALSFLARSIEADPSTVILWVFYLHIYYQKDEGLGKDDMFFHAVQHNFCSYELWLMYINSRLRVDDRLDTYNDALSMLCQMTADSDKDLQERSAFILDIFLQMIYFLCMSGNVEKAISRIIGILPTAMPDNCGDKLLADVISSLTMSDRCIFWISCLYISIYRNLPEEIIDQLEFQKALPRALKWPSIDPSVANRDKIIELLNYAAYKMAEDISECVKNGDPSYLMLSQFLTVNHISCLAAVEGFKSSADMLVTYMKEYPMCPQILLISARLDRKHGTCPGLKSFDELILNWPKEAQGIQYMWNQYVEHVLATDTELAEKVLTCWFDEHGKDCDIQTNSAICIELSSEEPGTSSLVSPQEVGSGPSTSEDLIFRLLNLSLYKILENNLQEAQIAVDKALKLAHGEWYEHCIREHAAIHALELEKSSSSTDAQTQATFSLIIGYLADNRNLPTRELLSRRFCQNVKKHRLRQLIDDTIGSVPADSSLINSALEVCFGPSLLPKRIGDVKYLVDFVETVMEALPANYRLGLAVGGFVAKHFSGSDATSTGTRFWASSVLINAIFRAVPVAPESVWLEGADLLQKLHVTEIVKRFYQQAASVYPFSFKLWHAHLNYCKASGSNTESIVENARQRGIELNPTP

SEQ ID NO: 2953 - DNA, 1086 bp, Sorghum bicolor
atgagcagccatgtttccatctcagtggttgtcatcgtccttgtccctgttgtcctcctgctcaattcccatgtagggttgtgcagctgctacaagcgcatcttcagttttggcgatgatagtatggatactggcaattttgtgcatttgattgggaagaatgcatctaagtacaaggaagccccctatggcaatacattttttaggcacccaactggccgcatgtccgatggccgtgtcctcattgatttctatgcgcaagcactgaagctgccattgataccaccaattttacctaagaaggactctggacattttccacacggtgccaactttgctgtgtttggtgccacggcacgtgagcaactcttctactcaggcagcccctggtgtctaggcacacaaatgggatggttccataatatggtggatcgtatagctcctagagacgctgccaagaagcaatttctaagtgattctcttgtcgtgatgggtggaattggtggcaatgactactactcatatttcatcgccggtaaacctagcaaggatggaaatatcattccagatgtcatcgcatacatagaacatttcatcgaggagcttatttgcagtacaggtgcgaaagcgttcctgatccccaataacttccccattggttgcttcgcatcatacctaagtaggttccatagtgacaaccctgaggactatgatgagcatgggtgccttaggtggttcaacgagttctcgcagacgcacaatgaacaactttattctgccatcggacggatcaacatcacttaccctgatgtgaagctaatatatgctgactactacaatgccaccatggaattcatcaagaaccccggcagatttggtattggtaatcctctagtcgcatgttgtggcggtgatggaccataccacaccagcatggagtgcaatggcacggcaaaactttggggtgacccacaccactttgccaattgggatggcatgcacatgacagagaaggcatacaacatcatcgtggaaggggtgctaaatggaccatttgctgatcctccatttccacggagttgctag

SEQ ID NO: 2954 - protein, 361 aa, Sorghum bicolor
MSSHVSISVVVIVLVPVVLLLNSHVGLCSCYKRIFSFGDDSMDTGNFVHLIGKNASKYKEAPYGNTFFRHPTGRMSDGRVLIDFYAQALKLPLIPPILPKKDSGHFPHGANFAVFGATAREQLFYSGSPWCLGTQMGWFHNMVDRIAPRDAAKKQFLSDSLVVMGGIGGNDYYSYFIAGKPSKDGNIIPDVIAYIEHFIEELICSTGAKAFLIPNNFPIGCFASYLSRFHSDNPEDYDEHGCLRWFNEFSQTHNEQLYSAIGRINITYPDVKLIYADYYNATMEFIKNPGRFGIGNPLVACCGGDGPYHTSMECNGTAKLWGDPHHFANWDGMHMTEKAYNIIVEGVLNGPFADPPFPRSC

SEQ ID NO: 2955 - DNA, 3252 bp, Sorghum bicolor
atggagcgcgtgaagcacgacaacttttgccgcgccgtcgcggaggacaacacagccctcctcctctcggcggtggggaacttcaggaaggaggccatgtgccgcatccgcaagggctccgacgcctcaagggtgctggacaaggagatgtccacgaggctgctccacctcgcctgcaagcacgacgcggtggagtgcgcgaggctgctcctagagggtggcagcgggatcatggcggcccccattgatgcaagggaccagctcacgcggacgccgctccacgtcgcagctgagacacactcggccaggtgcatacagctgctactctccaagaacgcccgcactgatctcagggtggttgacgggagaccacttctcccgcttgagatcgcgctaatgagtaggagagttcaaactaactggtcggtggagaacccaattgaggatcttctgtcttttcttaaacaaagggatctcgatgcagtaaggctcctggcagagaaaaccagagtggtcggggagcttgcttacagatacgccatggaaggaagtatccctgcattggcaatgctgcttctggtggttgaagagaagatatcgtcacatgtgagtgtggtgatagagggagtcagaacaaagcgctcaatctacaactccattgtggatgaggctttatcaatgggagatgcttcagctcgtgatggaaatgaaaggaaaaaggccctgctctgtgagattcagctgcttaaccaatttggatcggcatcatggagggaccacaatgacaggagaacactaccccctctattgagagctgctaaggttggagatatggatgtcataaagatgctcctgatggggaatgttgatgtcaatgaagctgactctgaagggaacacagcacttcactggtgccttagtggtgcttcatgtaccaaggagccaaggattgtgtggcttctgctgaagaatggtgcaagagttttccaggggaacaaattaggactcacaccagtacacagcgctgcagctaagggcaattacaaagctcttcagtcacttctgcttcatgctcaagattgtgttgatatacctaccaagaccaaagaaaccccattattctttgcagtgaagaatggttctgtggattgtgtaaaacttcttttgcgttttggggctgataccaaagcccgaaacctgagaaagcaaagaccaattgacgtggcaacatcccaagacatgcgtttcattcttagctctgcaaatgtgttaccatggaaccatagctcacctcaaaagaaccgtgtgatgagaaaggaaatttacaaagaacttcttggtgatgaatttgacgatcttgataaggattactgtgatgaaagctacactgggctgaagacatcagtaggccaacgtgatttccgttccagtaatcgttctgcacaagggcctaagagtaagagccaatatgttccaaaacaagcacaaggttcaaagtttgtgcctcggaacaatcattggccgaagcatgactacactcgcaaaatttttgttgggggcctcccaccttcagttgactctgattaccttattgaattcttcaatgctgaatttggtcctgtggaggaagcagtagtcatcgggataccaattggcaaccgagttcagtctcgaggttttggctttgtaaaatttgagagagaggaggatatgataagtgcaaaggaagctcatcatgtttacatgcttgggaagagagtggaggtaaaggatgctgttgctagagcatacttgcctttagaagaccaaagatatacttctttgagggaatgcatcaaggagcgcccaaaggtacacagggtgctggatggtgaactgactgaggaacacaacctccagaagcggcaaccattgccagaaaagtgtcttccatcttggttctttatattcaggaagtggttgccaggatttcttgaggatgaaacagcacgacttggaggagagaggtatccgttgagctctctgaagggtgatttcagagcaacttgcaggatggagcttgatcacaccgcacttggttatcctaagctaagtgactttatgcgctccctccctggaatctgcagaatgtgtgtagttcctgttggaagtggacctgcaacgcacatggtcctccttccaccactctcacgaccgaagtatgtacccttgctagagccttgctcctttgatcgtgatgagcttgcagaatcagtgtcagatcatcactccccaagatcaccgcttaatgccaacatcgcggatgactccccacataacactgacagccagcagggtgatgatgcatgcagtgagaccaatgttcagatcctgcaagttgatgatgcatgcagtgagacttgtgttcagagtcagcatggccatgagagcagcaggagcagtgctgaaagccagcaggatggaagttcctctgacaatggtagcttactggacgatgttcctgtcagtactacaaagcttgatctgattgagtctgtaacttcagtcaagcctgctctgattgaatctgtacctcgaagaaaccctgatctaactgaatctgtacctccaagaaagcctgatttggttgagtctgtacctgcaaggaccaatttgatggagtatgggtttcttcctcaaaagaatgaatccggacctatactgaagcccaatttgcttcagtttggaccttcaagaaagcttgagttgattgagtccaagccttcagaatgcttcattgatcgtccttttgaaaggccagcagttacacccagcagctgcgagagtgatatgagattctctttcttccagtctcagtgggacaagtacctgactccatatcccaggagtgactgctgcatcatatgtcgatcttgtgaagctgggatgcagcttgtcccctgccttcataagatctgtgttgcctgcatgatgaggtgcaatatcagagcatgtatggtttgtggcacttctgtaagtggagtcaagtcatcccctgcagtggatgcaacatacagatacatgggactcacggagcgcgctttagatcaaaggtgccagttgatggttgtctgccgtggagctgaggcaatcgtcagatgctcaccatgtatgcacaccatcgcttgccggggatgcttccttgcctcagtgacactactgaagtcctgcaccacctgtggcttcatggttgagcacttcaagatcgtttga

SEQ ID NO: 2956 - protein, 1083 aa, Sorghum bicolor
MERVKHDNFCRAVAEDNTALLLSAVGNFRKEAMCRIRKGSDASRVLDKEMSTRLLHLACKHDAVECARLLLEGGSGIMAAPIDARDQLTRTPLHVAAETHSARCIQLLLSKNARTDLRVVDGRPLLPLEIALMSRRVQTNWSVENPIEDLLSFLKQRDLDAVRLLAEKTRVVGELAYRYAMEGSIPALAMLLLVVEEKISSHVSVVIEGVRTKRSIYNSIVDEALSMGDASARDGNERKKALLCEIQLLNQFGSASWRDHNDRRTLPPLLRAAKVGDMDVIKMLLMGNVDVNEADSEGNTALHWCLSGASCTKEPRIVWLLLKNGARVFQGNKLGLTPVHSAAAKGNYKALQSLLLHAQDCVDIPTKTKETPLFFAVKNGSVDCVKLLLRFGADTKARNLRKQRPIDVATSQDMRFILSSANVLPWNHSSPQKNRVMRKEIYKELLGDEFDDLDKDYCDESYTGLKTSVGQRDFRSSNRSAQGPKSKSQYVPKQAQGSKFVPRNNHWPKHDYTRKIFVGGLPPSVDSDYLIEFFNAEFGPVEEAVVIGIPIGNRVQSRGFGFVKFEREEDMISAKEAHHVYMLGKRVEVKDAVARAYLPLEDQRYTSLRECIKERPKVHRVLDGELTEEHNLQKRQPLPEKCLPSWFFIFRKWLPGFLEDETARLGGERYPLSSLKGDFRATCRMELDHTALGYPKLSDFMRSLPGICRMCVVPVGSGPATHMVLLPPLSRPKYVPLLEPCSFDRDELAESVSDHHSPRSPLNANIADDSPHNTDSQQGDDACSETNVQILQVDDACSETCVQSQHGHESSRSSAESQQDGSSSDNGSLLDDVPVSTTKLDLIESVTSVKPALIESVPRRNPDLTESVPPRKPDLVESVPARTNLMEYGFLPQKNESGPILKPNLLQFGPSRKLELIESKPSECFIDRPFERPAVTPSSCESDMRFSFFQSQWDKYLTPYPRSDCCIICRSCEAGMQLVPCLHKICVACMMRCNIRACMVCGTSVSGVKSSPAVDATYRYMGLTERALDQRCQLMVVCRGAEAIVRCSPCMHTIACRGCFLASVTLLKSCTTCGFMVEHFKIV

SEQ ID NO: 2957 - DNA, 300 bp, Sorghum bicolor
acacacagttacacgcatagagagacagagagagcagagaagaaattcatggagatgtgcttggatgagaagtggaagctatcgagcagctccaagaagggaagccggcggtcggcggcagtggcgccggcggcgacgagcccaagaggcctcaacaagggccggacgacatcatcgagggggcccgccgcccggtctgccgccgttcatggccggctggcgagcctggtgaaggagcagagggcaaggttctacatcgtgcgccgctgcgtcaccatgctcgtgtgctggagggactag

SEQ ID NO: 2958 - protein, 99 aa, Sorghum bicolor
THSYTHRETERAEKKFMEMCLDEKWKLSSSSKKGSRRSAAVAPAATSPRGLNKGRTTSSRGPAARSAAVHGRLASLVKEQRARFYIVRRCVTMLVCWRD

SEQ ID NO: 2959 - DNA, 1272 bp, Sorghum bicolor
atggatcagtatgaggtgttggagcagattggcaaaggagcatttggttctgcgcttttggtgaggcacaaggtcgagaagaagaagtatgtgctcaagaagatacgcctcgcacggcaaaccgaccgcacacgccggtctgcccaccaggagatgcagctcatcgcgacagtccggaatccattcattgtggagtacaaagattcatgggtggaaaagggttgctacgtttgcattgttattggttactgtgagggaggagacatggctgaggctatcaaaagagccaatggaaaccatttttctgaggagaaactttgcaagtggcttgtgcaacttctcatggctcttgattatctgcatgctaatcacattcttcatcgagatgtgaagtgctccaatatatttattgccagagatcaaagcatacgccttggtgactttggtcttgcaaagatattgacttcagatgatcttgcgtcttctgtggtaggaacaccaagttatatgtgcccagaacttcttgctgatataccatatggcactaaatctgatatttggtctctaggatgttgtatttatgaaatgactgctctcaggcctgcgtttaaagcttttgacatgcaagctcttattagcaagatcacaaagtcgatagtatcgccattgcccacgagatattctggttcctttaggggacttatcaagagcatgctacggaaaagtccagaacaccgaccaagtgctgcagaactgctaaagcatccacatcttcagccttatgtgcttcaggtccagttaaagtccagtccttctcgcaacatgtctccaatctatcaagctctgacagacaaagttaagaagatgacatttcctggtgatataactgattctgtgagaagaagggtggcaagaaggaactctctggggaatgagaggactgtaacattctgcaaaccctctcctgagcggaactctattagctctacacggagcatcaaagaatatacaactacccagagtgtcaaagagctatctgttgacagcagtcaaattgatgacgaggtcacaagtaaagccattataacaaagacatcgggcattctaaggactcccaagagtactccagccaagacattgacaactagaaatcggttggatcctccaaaaacatcatataccagaacaaaccatgctgaggtatttacacgagcttattctatgtccgtgcttttgttaatactggcaaacatgtgctctcaatttgtttga

SEQ ID NO: 2960 - protein, 423 aa, Sorghum bicolor
MDQYEVLEQIGKGAFGSALLVRHKVEKKKYVLKKIRLARQTDRTRRSAHQEMQLIATVRNPFIVEYKDSWVEKGCYVCIVIGYCEGGDMAEAIKRANGNHFSEEKLCKWLVQLLMALDYLHANHILHRDVKCSNIFIARDQSIRLGDFGLAKILTSDDLASSVVGTPSYMCPELLADIPYGTKSDIWSLGCCIYEMTALRPAFKAFDMQALISKITKSIVSPLPTRYSGSFRGLIKSMLRKSPEHRPSAAELLKHPHLQPYVLQVQLKSSPSRNMSPIYQALTDKVKKMTFPGDITDSVRRRVARRNSLGNERTVTFCKPSPERNSISSTRSIKEYTTTQSVKELSVDSSQIDDEVTSKAIITKTSGILRTPKSTPAKTLTTRNRLDPPKTSYTRTNHAEVFTRAYSMSVLLLILANMCSQFV

SEQ ID NO: 2961 - DNA, 996 bp, Sorghum bicolor
atggtggggacggcagccggcgccgcggagggtgcggtgcggcggtgggtggatgccgccggcgggcgcctggtcctggacggcgggctggccacggagctcgaggccaacggcgccgacctcaacgacccgctctggagcgccaagtgcctcctctcctccccgcacctcatccgcaaggtccatatggactacctggaagctggtgcaaacattctaatcacggcatcgtatcaggccactattcaagggtttgaatcaaagggcttttcaaaagagcaaagtgaaaacttgttaacaaagagtgttgagattgcactggaagctcgtgagatgttcttgaaggaacatttggagaaatccattcctatacagcatcctattctggttgcagcatctatagggagttatggggcttatcttgctgatggctctgagtacagtggggattatggtgaagctggtacaaaagagttcctgaaagattttcatcggcggaggcttcaggttcttgctgaagcaggccctgatttgattgcttttgaaacaatccccaataaactggaagctcaggcatatgttgaactccttgaggaatgtaacataaatatccctgcatggctttccttcaactcaaaagatggagtgcatattgtgagtggggactcagtaattgaatgcactactattgctgacaagtgtgcaaaggttggtgcagttgggataaattgtacacctccaagatttattcatggactgatactctccattcgaaaggtcacggacaagcctattctgatatatcccaacagtggtgaaagatatgatggtgaaaaaaaggagtgggtggaatccactggtgtatcagatggtgattttgtttcttatgtaaatgaatggtgcaaagatggggctgcgctcatcgggggctgctgcaggacaactccaaacactatcagggccatacaaagaactctaaaccaaggcttcaactag

SEQ ID NO: 2962 - protein, 331 aa, Sorghum bicolor
MVGTAAGAAEGAVRRWVDAAGGRLVLDGGLATELEANGADLNDPLWSAKCLLSSPHLIRKVHMDYLEAGANILITASYQATIQGFESKGFSKEQSENLLTKSVEIALEAREMFLKEHLEKSIPIQHPILVAASIGSYGAYLADGSEYSGDYGEAGTKEFLKDFHRRRLQVLAEAGPDLIAFETIPNKLEAQAYVELLEECNINIPAWLSFNSKDGVHIVSGDSVIECTTIADKCAKVGAVGINCTPPRFIHGLILSIRKVTDKPILIYPNSGERYDGEKKEWVESTGVSDGDFVSYVNEWCKDGAALIGGCCRTTPNTIRAIQRTLNQGFN

SEQ ID NO: 2963 - DNA, 687 bp, Sorghum bicolor
atgatgccctatggcacggcggcgggggcggaggcggcgctggggcgttccatgagctgggcggaggccctgtggttccggtactcggcggcgatgccggagctgtggctcacgtcgcacatcgctctcgtctaccttgtcatgtacgcggtggcgccgctgcccgtcatggttctccagcagctcgcgccggcctacgcactgcggcacaagctgcagcccggggtgccgcagccctcgccggtttctgtctacctaagctacataagcgaaagcaagggtctcaccctgtccgtcttgggccctttcccacttatctactccgctgcattcaagttgtttggggtccggacggggctccctttgccgtccgtatgggagacagcgatgcacctggtggtgtactcgttggtggaggactacctgtcctactggctccaccgcttcctgcacaccaagtggggctacgagaagatccactcggcccaccacgagaagacggcgccgtccgggttcgccgggtcctatgccaccggcaccgacctcaccttgtacaccatcacgctcttctttgggccagcgatcgtgccaagccacgtcaccacacactggctctggttctccatccgcataatggaagccttcgacgcacactgcggggctacatgtaccacaagagaagcctag

SEQ ID NO: 2964 - protein, 228 aa, Sorghum bicolor
MMPYGTAAGAEAALGRSMSWAEALWFRYSAAMPELWLTSHIALVYLVMYAVAPLPVMVLQQLAPAYALRHKLQPGVPQPSPVSVYLSYISESKGLTLSVLGPFPLIYSAAFKLFGVRTGLPLPSVWETAMHLVVYSLVEDYLSYWLHRFLHTKWGYEKIHSAHHEKTAPSGFAGSYATGTDLTLYTITLFFGPAIVPSHVTTHWLWFSIRIMEAFDAHCGATCTTREA

SEQ ID NO: 2965 - DNA, 2208 bp, Sorghum bicolor
atgctcaggcacctaaccaaaaacccattgctcccgctccgatgccgccgcctcctccatcccaaccggctctgtgccaccgccacatcgtcggcggccgccggtgagatcacgccgtttcccgccgcaaacgagactcccctcgaagatgacctcgcggaggagttgcgcagccgcctcgtgcgcgacacctgcaggctgctcgagctccgggactcgtggagcgccaagctggaggcgcagctccggcacctcctccgcgcgatgaccccgtcgcaggtccgcgccgtgctgcgcgcgcaggcgcagcgggacgctcgcgccgcgttcgagttcttccgctgggctgaccgccagtggaagtaccgccacgccccggaggtgttcgacgaaatgctggtgctcctcagccgcaccaggctccacgacccggcgcgccgcgtcatgcgcctcatgatccggcgtggcatgccccggggcacgcggcagttcgcgcacctcatgctctcgtacagtcgcgctgggaagctccgctccgccatgcgcgtgctccagctcatgcagaaggatgggtgtgcgcctgacatatgtatatgcaacatggcggtgaatgtgcttgttgtggccggacgcatcgacaaggcactcgagtttgctgaaaggatgcgtcgtgttggggttgacccggacgtggtcacgtacaattgcctaatcaagggattgtgcggagctcgtcgtatcgttgatgcactggagatgatcagctcaatgctgcaaaatgggtgcctgccagataagattagctactttacagtgatgagcttcttgtgcaaggagaagagggtggcagatgtgcagaatttgcttgagaggatgagtgatgcaggtatatttccagatcaggtcacgtataacatgcttattcatggtcttgcaaagcatggtcatgcagacgaggcattgagtttcttgagggagtcagaggggaaaagattccgtgttgacgaggtcggctatagtgcgactgtgcattcattttgcttgaatggtaggatggcagaggcaaaggaaattataggcgagatgatttcaaaggggtgccgccctgatgttgtaacatatagtgcggttgtagatggattctgccggattggggaactcgatcaggcaagaaagatgatgaagcatatgtataagaatggttgcaagcccaatacagtcacgcatactgcactgttaaatgggctttgcaaagttgggaaatcttcagaagcatgggaattgctaaacaagagcgaagaagagtggtggactccaagtgctatcacatacagtgttgttatgcatggatttcggagggaagggaagttaaaggaatcatgtgatgttgtaatgcagatgttgcagaagggtttcttccccacaacagtggagattaacttgttgattcacgcattatgcaatgaacgaaaaccagcagatgccaaagacttcatggagcagtgccaaagcaagggctgcttcattaatgttgttaacttcactactgtaattcatggattttctaggcagggtgatctggaatcagcactatctttgctggacgacatgtatctgaccaacaggcatcctgatgttgttacatacactgttgttgttgatgctttaggaaggaaaggtaaaatgaaagaagcaacatcacttgtagagaaaatgcttaatagaggtttgcaccctacacctgtcacatacaggactgtgatacatagatattgtgaaaagggtgcagttgaagatttactcaatcttctggataagatgttagcaaaagaagggtttagtagtgcatataatcaggtcattgagaagctatgtgcatttggtaaacttagtgaggctaacaatctcctcagcaaggtactaagaactgcctcaaaaagagatgctcaaacatgccacattttgatggatagttttctgaatagaggactcccacttcaatcatataatgtggcctgccgcatgttccagagaaacttaattcctgatcttaaattatgtcaaaaggttgacagtcagttggccctagcgggtgagaaacaagctgctggaaagcttatcattaagtttgttgaaagaggcgtgaacatgcataatggtgaggaggtgactgtgaacctggtttacgacaaaacaacttctgcatga

SEQ ID NO: 2966 - protein, 735 aa, Sorghum bicolor
MLRHLTKNPLLPLRCRRLLHPNRLCATATSSAAAGEITPFPAANETPLEDDLAEELRSRLVRDTCRLLELRDSWSAKLEAQLRHLLRAMTPSQVRAVLRAQAQRDARAAFEFFRWADRQWKYRHAPEVFDEMLVLLSRTRLHDPARRVMRLMIRRGMPRGTRQFAHLMLSYSRAGKLRSAMRVLQLMQKDGCAPDICICNMAVNVLVVAGRIDKALEFAERMRRVGVDPDVVTYNCLIKGLCGARRIVDALEMISSMLQNGCLPDKISYFTVMSFLCKEKRVADVQNLLERMSDAGIFPDQVTYNMLIHGLAKHGHADEALSFLRESEGKRFRVDEVGYSATVHSFCLNGRMAEAKEIIGEMISKGCRPDVVTYSAVVDGFCRIGELDQARKMMKHMYKNGCKPNTVTHTALLNGLCKVGKSSEAWELLNKSEEEWWTPSAITYSVVMHGFRREGKLKESCDVVMQMLQKGFFPTTVEINLLIHALCNERKPADAKDFMEQCQSKGCFINVVNFTTVIHGFSRQGDLESALSLLDDMYLTNRHPDVVTYTVVVDALGRKGKMKEATSLVEKMLNRGLHPTPVTYRTVIHRYCEKGAVEDLLNLLDKMLAKEGFSSAYNQVIEKLCAFGKLSEANNLLSKVLRTASKRDAQTCHILMDSFLNRGLPLQSYNVACRMFQRNLIPDLKLCQKVDSQLALAGEKQAAGKLIIKFVERGVNMHNGEEVTVNLVYDKTTSA

SEQ ID NO: 2967 - DNA, 2805 bp, Sorghum bicolor
atggaggacgaggggagcggcggcggccggagccggggaccggacgtcaaggccgtcgcactcgcgcacttctcgtcgccgcgaagggccaagacggtgaggatgtccgaggcccgagacttcatcatcccctacgtcgccgaggtgggttcgccatcgggctcgacgggctccgcctcctcgggagcggcgcgggcgctcggacacgccagcggcggcgatggcgacggctcggcgtcgctgtccgggttcccctctgacggcgcgatgcaggacacgccggactacatccggaggagcgccgcgcggcacagggtcgcgcccgtcgagttcttctccgcttcagtctcgccgccgccgtcaccgcccgcgggacttggcgcagccgctgaggggatggcttctagtgagaaatgccatgccgcggatggggtgtccgagagcgatgaggccgtggacggtggccgaagcggcacagagagcctgcagctggaaggaattgaagaggacaaatccgattgctgtggcctgctgaaacaacagtatggtgtgcttctgcgtgagaaggaggaatgcaggaggctgttagaggacctgatgagggagaacgagctcaagaccaggcaatgccgtgaagcccaggagtcgctccatgatctgcagatggagctgatgagaaagtccatgcacgttggctcactagcctctgcagtggaagggcaagtgaaggagaagagtcgtttgtgtcaattattgaaagaattgggcgaaaaatttatggtattaaagtcagagcaccagaatctaagacaagagtcactggagtacaaaaaatgtgtgttagatgcttcacaaatgtccgcaacaattcagcaatatgtgaatcaatatgtaagtttggactgtgagttcaaagatcttaaagaaaagtttaatgaggaggcaaaggagcgaaaggatttatacaacaagattatagagctaaagggtaatataagagtattttgtcggtgccggccacttaatgcagaagaaatagcagaaggagcttcgtcagccattgattttgactctgcaaaagatggagagcttattgttaggggtcatgtatcttctaagaaagtatacaaatttgattctgtctttagccctgaagaagaccaagaaaaggtttttgagaaaactgcgccatatgcaatttcggtgttggatggatttaatgtttgcatctttgcttatgggcaaaccggtactggtaaaacatttactatggaaggaattgaaggtgctcgtggtgttaactaccggaccctagaagaactctttcgaataattaaagaaagagagggcacattccaatatgagattactgtcagtgttttggaggtgtacaatgagcagattcatgatttgctacttacaggatctcaaccaggcgcaacaacaaaaagactggaagtaagacaagttgcagaaggggttcaccatgtaccaggacttgttgaagcacgggtgactaacatgaacgaggcttgggaggtgctacaaactggcagcaaagctagagtcgtgggttccacaaatgctaatgagcatagtagtcgatctcactgtatacattgtgtaatggtcaaaggagaaaacttgatgaatggagaatgcacaaagagcaaattatggctaattgaccttgctggaagtgaaagggtagcaaagacagatgcacaaggagaaagattgaaagaagcacagaacataaacaaatcactttctgcacttggtgatgtcatatctgctcttgcaacgaagaccccgcatataccctttagtagagtacgaggcatagagcttggtcaagctaaaaagcaagtcgatgttggagaattgttaagatacaagctcatggttgggagagccaaacaggatagcaagaacaaagatgctcagattaagagtatggaagaaaggatacaaacacttgaagcaaagaataagaccaaagatttgctcactctgaatctccaagagaagatcaaagagctggaatcacagcttctagttgaaagaaagatagcacggcagcatgtcgacaacaagattgctcaagaccatctgcagaagcagcacggcatgaaagaagacaactcgtacctgagaagcccaatggccgagaggaacctcaactccacagcagagaaagcagcagcagcagctaaagacttgggcatctccaagcagatgttctccgacagcaacgttgacacttacagcttcaagcagctgatgtcactaggggacgagaaggagaacaaccctaaagctgcgcagctgccgccgacaatgaaagcgagacgagtctcactctgcaacgatggagcttaccagcagccgctgaacccggctatgcgccggaagtctctgataccgcctccacggcgcagctcgctgctgccaatgcccacagcaaagcctgcagcagcagcagcgccatcgccgcttgacaagatcacagagaacctgtcctcgcccccactgtgctctcctccggttgtctccatcgacaagggaagcaggagtaagaggatcaacagcatcctgcggcgaagcctgcagaagaaggtagtcatcaggccgtctttggcggcgcaggcagggaagaaagccggtgctgcagctgcccaggggactgacaacgcacgcagggttgcacgtcgagtgccgagcggcggtgggcagagggtgcagcagaacagggacaaggagcgggggtggaacaccgggacgagcctcaggaacaacttctga

SEQ ID NO: 2968 - protein, 934 aa, Sorghum bicolor
MEDEGSGGGRSRGPDVKAVALAHFSSPRRAKTVRMSEARDFIIPYVAEVGSPSGSTGSASSGAARALGHASGGDGDGSASLSGFPSDGAMQDTPDYIRRSAARHRVAPVEFFSASVSPPPSPPAGLGAAAEGMASSEKCHAADGVSESDEAVDGGRSGTESLQLEGIEEDKSDCCGLLKQQYGVLLREKEECRRLLEDLMRENELKTRQCREAQESLHDLQMELMRKSMHVGSLASAVEGQVKEKSRLCQLLKELGEKFMVLKSEHQNLRQESLEYKKCVLDASQMSATIQQYVNQYVSLDCEFKDLKEKFNEEAKERKDLYNKIIELKGNIRVFCRCRPLNAEEIAEGASSAIDFDSAKDGELIVRGHVSSKKVYKFDSVFSPEEDQEKVFEKTAPYAISVLDGFNVCIFAYGQTGTGKTFTMEGIEGARGVNYRTLEELFRIIKEREGTFQYEITVSVLEVYNEQIHDLLLTGSQPGATTKRLEVRQVAEGVHHVPGLVEARVTNMNEAWEVLQTGSKARVVGSTNANEHSSRSHCIHCVMVKGENLMNGECTKSKLWLIDLAGSERVAKTDAQGERLKEAQNINKSLSALGDVISALATKTPHIPFSRVRGIELGQAKKQVDVGELLRYKLMVGRAKQDSKNKDAQIKSMEERIQTLEAKNKTKDLLTLNLQEKIKELESQLLVERKIARQHVDNKIAQDHLQKQHGMKEDNSYLRSPMAERNLNSTAEKAAAAAKDLGISKQMFSDSNVDTYSFKQLMSLGDEKENNPKAAQLPPTMKARRVSLCNDGAYQQPLNPAMRRKSLIPPPRRSSLLPMPTAKPAAAAAPSPLDKITENLSSPPLCSPPVVSIDKGSRSKRINSILRRSLQKKVVIRPSLAAQAGKKAGAAAAQGTDNARRVARRVPSGGGQRVQQNRDKERGWNTGTSLRNNF

SEQ ID NO: 2969 - DNA, 2097 bp, Sorghum bicolor
atgcgccgctgccagcaccacgccctcgccgccgccaagtcccacgccgcgcttctcaagtccggcgccacctcccccacgccctggaaccagcttctcaccgcgtactccgcctctggccccggctccggtctcgccgccgcgcgcagggtgttcgacgagatcccccgccccgacgcggtctcctggaactccctcctcgccgcgcacgtcgccgcgggcgcgcaccgggacgcatggcgcctgctcaaggacatgcacgcgcgggggctcaccgccagcaccttcgccctcggctccgccctccgctccgcggccgccgcgcgacgccctgagctcggcgcccagctgcagtcgttcgccgtcaagtccggcctcgtcgacaacgtcttctctgctagcgcattgctcgatgtgtacgcgaaatgtggccgattgagcgatgctcgacgagtgtttgatggaatgccagtgcggaataccgtttcttggaacgcgctcattgctgggtatgcggagtctcggaagccggcacaagcaatggagctgtttcttgagatgcagagggtggagttggtcccagatgatgcgacatttgctgcgttgctagcgacagttgagggcccgagctggtattccttgatgcagcagctgcatgggaagattgcgaagtatggttcagcgctggggttggtagtgctgaatgcagcaatcactgcatactcgcagtgtggcgcgtttgcagactctagaaggatctttgatggaattcagagtagggatttgatatcatggaattctatgcttggggcctatgcttaccatgggatggacgatgaggcaatgagattcttcgtcaggatgatgcgggagagtggagttcagcctgacatgtatagctttacaagtgtcgtaagtgtttgttctgagcatgggtgtgatgatcggcaagggagatcaattcatagtttggttgtcaagattgggttggaaggagtcacacatgtttgtaatgctatgattgccatgtacactaggttcactgagaactgcatgatggaagatgcatataagtgctttgattctttggtctttaaggatgcagtctcctggaactctatgttaactggatattcgcatcatggtttgagttctgatgctttgagattcttcagattcatgcgagcagagaatgttagtacagatgagtttgcactttctgctgctctcaggtcttgctcagaccttgctgtacttcggctaggtagacaagtacacagtttagtcatccaatctggtttctcttccaatgactttgtttcaagctcactgatcttcatgtattctaagtgtggaatggttggtgacgcaagaaagtcttttgaagaggcagataagggtagctcagtgccctggaactctatgatgtttggttatgcacaacatgggcaggcacagactgtgactgacctcttcagtgagatgctggaccataaggttcctttggatcatgttacctttgttgccctgcttactgcctacagccatggtggtcttgtagatgaagggtcggaaattctcaattcgatggaaactaggtataaaattcctctgcgaatggagcactatgcgtgtggagttgatctatatggtagggctgggcagcttgacaaagcaaaagagcttattgagtctatgccatttcagccagatgccatggtgtggatgacccttttaggtgcttgcagaatccatgggaatatggaactagcaagcgatgtggcaagccatttatttgtggcagaacctcggcagcactccacctatgttcttctttccagcatgtattctggtcgtggtatgtggagtgacagagcaacagtgcagaaggtaatgaagaataggggattaagcaaagttcctggatggagctggatcgaggtgaaaaatgaggtgcattcttttaatgcagatgataggtcacacccaaggatggatgaaatctttgacatgttaagaatgctgcttcaggttgcacagcggttttgctcttctggagatgaagagattctcatgaaaatatccagtgatacatga

SEQ ID NO: 2970 - protein, 698 aa, Sorghum bicolor
MRRCQHHALAAAKSHAALLKSGATSPTPWNQLLTAYSASGPGSGLAAARRVFDEIPRPDAVSWNSLLAAHVAAGAHRDAWRLLKDMHARGLTASTFALGSALRSAAAARRPELGAQLQSFAVKSGLVDNVFSASALLDVYAKCGRLSDARRVFDGMPVRNTVSWNALIAGYAESRKPAQAMELFLEMQRVELVPDDATFAALLATVEGPSWYSLMQQLHGKIAKYGSALGLVVLNAAITAYSQCGAFADSRRIFDGIQSRDLISWNSMLGAYAYHGMDDEAMRFFVRMMRESGVQPDMYSFTSVVSVCSEHGCDDRQGRSIHSLVVKIGLEGVTHVCNAMIAMYTRFTENCMMEDAYKCFDSLVFKDAVSWNSMLTGYSHHGLSSDALRFFRFMRAENVSTDEFALSAALRSCSDLAVLRLGRQVHSLVIQSGFSSNDFVSSSLIFMYSKCGMVGDARKSFEEADKGSSVPWNSMMFGYAQHGQAQTVTDLFSEMLDHKVPLDHVTFVALLTAYSHGGLVDEGSEILNSMETRYKIPLRMEHYACGVDLYGRAGQLDKAKELIESMPFQPDAMVWMTLLGACRIHGNMELASDVASHLFVAEPRQHSTYVLLSSMYSGRGMWSDRATVQKVMKNRGLSKVPGWSWIEVKNEVHSFNADDRSHPRMDEIFDMLRMLLQVAQRFCSSGDEEILMKISSDT

SEQ ID NO: 2971 - DNA, 1791 bp, Sorghum bicolor
atggctacaagtcttggaatggacgaatatgcagaactggaggtctctatgatggatcccactgacaagaagcctgccttcagaggcttgaaactgtacgtgaaagaactagattcaaagacacttcctccgtttcttgctcgtttgtgttctcccgacaagccttcctcttactctgaggatgagatcctgtgcattttcgagactgcgtctgaagttcatggccgcagcattgtgccgcacattggacagattgtttcagcagttgtcaagatcatggcgtcaaattcaaagcccttgcatagtgctggttgctccaaggtagtttgcacattatcccgctactgcattgatcccctgggtagagaagaagagaaatatgagatcatgggctccctttgccgtcccctatctgatagcttaatgaatactaacaagagcatctcttctggttcggctctttgtattgctgcgcttgtccagtccaacaattggcaatttgcatctaatgagttggttaatgatgtttgcttgaaagtgtcgggcgctctagaggaggctcactgccagactgttgttcacgtaagcttggtggttgctctgttaaaacacaatcctttgacactggagccttatggacgatcattgataaggtcaggcttgcagatattggaccacagcactaaggcaaacaattctcagatgattatgtcatcaattcagatgatatatttgatcatgagaagcttgaatgtgaggattataaattctgagatcagtagcattatccatgctttggagcacttccaagatggctttgtttcagatatatgcgctgcagctttccaggcaaccgagactgctaagttacttgggaggcaggaggaacatggagcccacaaaaatgtcagtcctttgggaagctgtagtggtgggaacagcaggaaggggtcaaattctccaattgatcatgcagatatcagagacagtggatctagtggatctcctcgtgagttacaatctgtccgttgttttagtgacttcaattctcagccaccagttggagaatgcactggtattcttggaacttcgcgtgcaaggcggcgactttggagttatggaactgacttttcacatgggatgtccaacgatgagcttttccacacttcggcacgtgattatcatgaaaatctgggtatcatagcacaatctgattctgctgatctcgtcaagtcaagtaggaggcgctctgatgtgttgacaagaattggtgatccatgtcctacttgtttaacacccagagctactaatcaggcgcgcaggcgacaagctttgtcaactccaaggaagcagctccagtctttgacctattgcagtgattcagaaagagatggccatcgcctacctccaagatcagcttcaaggttgatgcatcgcccagaccatcttttgtttcaaaagaattttcaaagtgaggaaaggaaaggctactgcaactcgcgacagaggaaccaattgcgtacacagaccacagacttgctgagcgaagacttgaagttccccaccagcagcaggcgttctgatagtgcacgggctcctccatgtgaagaacgccaatgtgatgctgctgctgaacatcagaaggtgactgggatggagaaaaaagaaacaaactgtcgtcgaagcaatcgattaactctatttatctgtgccatggtcttcgctgtgttgttgctagctttgtggaagcagcaggaccccagtaaggaactgtacttcgtgcctacttag

SEQ ID NO: 2972 - protein, 596 aa, Sorghum bicolor
MATSLGMDEYAELEVSMMDPTDKKPAFRGLKLYVKELDSKTLPPFLARLCSPDKPSSYSEDEILCIFETASEVHGRSIVPHIGQIVSAVVKIMASNSKPLHSAGCSKVVCTLSRYCIDPLGREEEKYEIMGSLCRPLSDSLMNTNKSISSGSALCIAALVQSNNWQFASNELVNDVCLKVSGALEEAHCQTVVHVSLVVALLKHNPLTLEPYGRSLIRSGLQILDHSTKANNSQMIMSSIQMIYLIMRSLNVRIINSEISSIIHALEHFQDGFVSDICAAAFQATETAKLLGRQEEHGAHKNVSPLGSCSGGNSRKGSNSPIDHADIRDSGSSGSPRELQSVRCFSDFNSQPPVGECTGILGTSRARRRLWSYGTDFSHGMSNDELFHTSARDYHENLGIIAQSDSADLVKSSRRRSDVLTRIGDPCPTCLTPRATNQARRRQALSTPRKQLQSLTYCSDSERDGHRLPPRSASRLMHRPDHLLFQKNFQSEERKGYCNSRQRNQLRTQTTDLLSEDLKFPTSSRRSDSARAPPCEERQCDAAAEHQKVTGMEKKETNCRRSNRLTLFICAMVFAVLLLALWKQQDPSKELYFVPT

SEQ ID NO: 2973 - DNA, 519 bp, Sorghum bicolor
atggcgtccacttccatgtccttggttctcttcctcctcctcgcaaccttcgccgccggtgccagcgccgccaccttcaccgtcaaaaacaactgcaactacacggtgtggcccgccgccatcccggtcggcggaggcacgcagctggacccaggacagacatggactgtcgatgtgcctgcaggcaccaccggccggttctggggacgcacgggctgttccttcagcggcggaagcggccactgcgacaccggcgactgcgccggcgccctcaactgcaccgtctccgggcagccaccggcgacgctggccgagttcagcatcggcggcaccgaggattactacgacatctccgtgattgacggctacaacctcgccatggccttctcctgcagcaccggcgttactctggtgtgcaggagcccgacttgcccgcaggcgtacccgtttgcgagcgaggatcccgagacccatggatgcagcaccaacagcaactaccagctcaccttctgtccatga

SEQ ID NO: 2974 - protein, 172 aa, Sorghum bicolor
MASTSMSLVLFLLLATFAAGASAATFTVKNNCNYTVWPAAIPVGGGTQLDPGQTWTVDVPAGTTGRFWGRTGCSFSGGSGHCDTGDCAGALNCTVSGQPPATLAEFSIGGTEDYYDISVIDGYNLAMAFSCSTGVTLVCRSPTCPQAYPFASEDPETHGCSTNSNYQLTFCP

SEQ ID NO: 2975 - DNA, 1608 bp, Sorghum bicolor
atggcggcccggcacctcttcctccaaagttgccgcatctactctacctcagcctcagctgaggacatggtcatctcctccctccgcttcctcccctcccctaccattaccaatccacctccaatccctactattcttcattctaccgactctcctcctgacccccatccaccgcttacctccatgctcctatctgccgcagatcgcctccgtggggtcttcctccgcaagccccctgggcgcactgcgctccaccaggcgctatcctcaacaggcattggtgctgccatggcgctctcaccagatgttcttgccaatgttgtcaacgccggcgacctcagtggtgccgctactgtcactttcttcgattgggcggtcactaattccaagcctcccccatccgtccacacctgcaacattgtcatcagggcattggggaggaagaaattctttgattttctggatgatgcccttcagatcatgcgcagaaacaacatctttccagacctgaccacgctggagatcatcattgatagcctagttgccgccaggcatgtcagtagggctgttgaggtgctcagtactgatcaatttggatttgggattgggaaagcttgccacaaaaaggaggcatttactgtcctcatcaggtgtctttgccggaggtcacatgttggccttgctagctcactcttgcaagctgctcgtaaggagttgcttggtcttgattgcaatgtgtacaatgatgttatgggtggctgggcgaggtttgggagtgttgataaattgcaggaggtttggacaaagatgcaggaggatgggctggttccaaatgaggtttcacattgccatctaattgagggattgggtagagccgggcagactgaagatgcactcagggagtttgagaatatggtacatgagagatatggtccaactacgatggcctacaatgcacttattttcaattttatttcagttggggatttggacagttgcatcaagtattacaaggatatgttggaaaagaactgtcccccaaacattgacacgtactccaagatggttaaagcctttttgaaaggtcgcagggtagctgatgcactccaaatgtttgatgatatgttagtccaaggagttctgccaaatactgggatgataacatcatttatcaatccattgtgtacatttggaccgcctcacgctgctttgatgatatacaaaaagagtaggaaggctggttgtgtaatatccttgaaagcttataagcttttgctagaaaggctcgctaaatttgggaagagtggaattgttttggacatttgggaagagatgcaggagtgcggatatcaacctgataaggagatttacgagtttattgtaaatgggctttgcaatgtgggtaaggttgatgctgctgtgtctgtggtggaggaatcacttaggaatggcttctgtcttgggagagttgtttacagcaaactgaacaacaagcttttggagatggacaaagttgagaccgcatataatttgttcaagaaagtcaaacatgcgcgtgcacttactaattcacgcaattattgtcgtgctaatggttggcattcctga

SEQ ID NO: 2976 - protein, 535 aa, Sorghum bicolor
MAARHLFLQSCRIYSTSASAEDMVISSLRFLPSPTITNPPPIPTILHSTDSPPDPHPPLTSMLLSAADRLRGVFLRKPPGRTALHQALSSTGIGAAMALSPDVLANVVNAGDLSGAATVTFFDWAVTNSKPPPSVHTCNIVIRALGRKKFFDFLDDALQIMRRNNIFPDLTTLEIIIDSLVAARHVSRAVEVLSTDQFGFGIGKACHKKEAFTVLIRCLCRRSHVGLASSLLQAARKELLGLDCNVYNDVMGGWARFGSVDKLQEVWTKMQEDGLVPNEVSHCHLIEGLGRAGQTEDALREFENMVHERYGPTTMAYNALIFNFISVGDLDSCIKYYKDMLEKNCPPNIDTYSKMVKAFLKGRRVADALQMFDDMLVQGVLPNTGMITSFINPLCTFGPPHAALMIYKKSRKAGCVISLKAYKLLLERLAKFGKSGIVLDIWEEMQECGYQPDKEIYEFIVNGLCNVGKVDAAVSVVEESLRNGFCLGRVVYSKLNNKLLEMDKVETAYNLFKKVKHARALTNSRNYCRANGWHS

SEQ ID NO: 2977 - DNA, 753 bp, Sorghum bicolor
atgatagccgccgtgctctgcctgctcctcttctccggccgcctcgccgcggcggagaagtctttcggtggtggaggctacagcgggttggaggccggtgggcagcagccggagacgggtggagcgagcgaggcggcgcttgccggtgccgctgagcagacgacgacaccggcggcatattcgtcaggcggcgacgctgccgctgcttccggcggcagcgccgaagcatcagcgtcgtcaggcggcgaggctgccgctgcatccggcggcggcggcgggggtggttacggcggcaagctggacccggacggcgacccggaggttggtctgaacgagaaggcgatcaaggagatcgtggacgagcacaacatgttccgcgccaaggagaacgcaggcctgccgccgctggtgtggaacgagacgctggccaagtggtcgcagaagtacgcggagacgctcaagggcaactgccagcagatccactcgacgtcgccgtacggggagaacctcatggagggcacgccggggctcacctggaagatcaccgtcgacggctggagcgaggagaagaagaactaccacttcgactccgacacctgcgacgccggcaagatgtgcgggcactacaaggccgtcgtctggaagaccaccaccagcgtcggctgcggacgcatcaagtgcaacagcggcgacaccatcatcatgtgcagctactggccgccggggaactacgacggcgtcaagccatactaa

SEQ ID NO: 2978 - protein, 250 aa, Sorghum bicolor
MIAAVLCLLLFSGRLAAAEKSFGGGGYSGLEAGGQQPETGGASEAALAGAAEQTTTPAAYSSGGDAAAASGGSAEASASSGGEAAAASGGGGGGGYGGKLDPDGDPEVGLNEKAIKEIVDEHNMFRAKENAGLPPLVWNETLAKWSQKYAETLKGNCQQIHSTSPYGENLMEGTPGLTWKITVDGWSEEKKNYHFDSDTCDAGKMCGHYKAVVWKTTTSVGCGRIKCNSGDTIIMCSYWPPGNYDGVKPY

SEQ ID NO: 2979 - DNA, 1881 bp, Sorghum bicolor
atgacaaggagagagagagagaagccgaccaccgccgccgcctccgcctccgactccgccatggacaagatcgccgccacggccttcgcccttctcctctgcctctgcttctcctccacgcccgccgccatggccctcaccccggacggcgaggcgttgctggagctcaagctggccttcaacgccaccgtgcagcgtctcaccagctggcggcccagtgaccctaacccctgcggttgggagggcatctcctgctccgttcccgacctcagggtccaatccataaacctcccctacatgcagctcgggggcatcatttcgcccagcatcgggaggctcgacaagctgcagagactagctctgcaccagaacagcttgcacggcccaatccctgcagagatcaagaactgcaccgagctcagggcaatttacctgagagccaactacctgcaaggaggcatcccttcagagattggcgagctcttgcacctcacaatcttggacctatcaagcaatctgttgaggggcacaataccggcctcgattggaagtcttactcaccttcgctttctgaacctgtctacaaatttcttctccggagagatcccaaatgttggtgtcctcggaaccttcaaaagcagctcgttcgttggaaatctggagctttgtggcttgtccatccagaaggcttgccgtggaacactcggctttcctgctgtgctgccacactccgatccgctctcttcagctggcgtttctccaatcaataacaacaagacatcacactttctgaatggcatcgtgatcggctcaatgtcaaccttggctcttgccttgatagctgtactcggattcctatgggtttgcttgctgtccaggaaaaagagcattggtggaaactatgtaaagatggacaagcaaaccgttcctgatggtgcaaagcttgtgacataccagtggaaccttccatattcgtcaagtgagattattagaaggttggagctgcttgatgaagaagatgtggttggctgtgggggatttggcacagtgtacaaaatggtgatggatgatggcacgtcatttgccgtcaagaggatcgacctcagccgcgaaagtcgtgacaggaccttcgagaaggagcttgagattctgggcagcatcaggcacataaatcttgtcaatttgcgaggctactgcaggctcgccacagcaaagctactcatatacgattttgttgaactgggcagcttggattgctaccttcatggagatgaacaagaggaccagccattgaactggaacgcgcgcatgaaaatcgcccttgggtcggctcgaggtctggcatatctccaccatgattgctcgcctgggattgtgcatagggacatcaaggccagtaacatcctgctagatagaagcttggagcctcgtgtctctgattttggccttgcaaggctgcttgtagacaatgctgcccatgttaccactgtcgtggcgggcacctttggatacctagcaccagagtacttgcaaaatgggcatgctactgaaaaatcagacgtgtatagctttggagtgcttttgctggagctggtgaccggaaagaggccaaccgactcatgcttcatcaagaagggactgaacattgttggctggctgaacaccctaactggggagcaccggttggaggatatcatcgatgagcaatgcggtgacgtggaggtggaagccgtggaagccatcctggacatcgcggcgatgtgcaccgacgcagacccagggcagcggccatcgatgagtgccgtgctgaagatgctggaggaggagatcctgtccccctgcatgagcgagctgtgctacgagcagcacctggagctctga

SEQ ID NO: 2980 - protein, 626 aa, Sorghum bicolor
MTRREREKPTTAAASASDSAMDKIAATAFALLLCLCFSSTPAAMALTPDGEALLELKLAFNATVQRLTSWRPSDPNPCGWEGISCSVPDLRVQSINLPYMQLGGIISPSIGRLDKLQRLALHQNSLHGPIPAEIKNCTELRAIYLRANYLQGGIPSEIGELLHLTILDLSSNLLRGTIPASIGSLTHLRFLNLSTNFFSGEIPNVGVLGTFKSSSFVGNLELCGLSIQKACRGTLGFPAVLPHSDPLSSAGVSPINNNKTSHFLNGIVIGSMSTLALALIAVLGFLWVCLLSRKKSIGGNYVKMDKQTVPDGAKLVTYQWNLPYSSSEIIRRLELLDEEDVVGCGGFGTVYKMVMDDGTSFAVKRIDLSRESRDRTFEKELEILGSIRHINLVNLRGYCRLATAKLLIYDFVELGSLDCYLHGDEQEDQPLNWNARMKIALGSARGLAYLHHDCSPGIVHRDIKASNILLDRSLEPRVSDFGLARLLVDNAAHVTTVVAGTFGYLAPEYLQNGHATEKSDVYSFGVLLLELVTGKRPTDSCFIKKGLNIVGWLNTLTGEHRLEDIIDEQCGDVEVEAVEAILDIAAMCTDADPGQRPSMSAVLKMLEEEILSPCMSELCYEQHLEL

SEQ ID NO: 2981 - DNA, 231 bp, Sorghum bicolor
atgactcgcggcaaccagcgtgaccgcgaccgtgagcgcgcggcggcgcggaagcccaacgccaagggctctcaggacgggctcaccccggagcagcgccgcgagagggacaagaaggcgctggaggagaaggcggccaagaaggcgcagcaggcagcggccggcggcaccgggacctccaccgacaacaacaacaacaacaacaagaataaggcaggtggcaagaagtag

SEQ ID NO: 2982 - protein, 76 aa, Sorghum bicolor
MTRGNQRDRDRERAAARKPNAKGSQDGLTPEQRRERDKKALEEKAAKKAQQAAAGGTGTSTDNNNNNNKNKAGGKK

SEQ ID NO: 2983 - DNA, 2457 bp, Sorghum bicolor
atggtgatagcatccggagccgttgacaggagccacctgtccccgtttgttcccctgtcagaatcctcatcttcatcattcttctcccaggatctcgtccccactgagaggcaagttggattctggaaatcatcagggtcaatggtccatcacaaagggagcgagcctattttcacttctccacttgataaggtccatccgatgggctcaagtcctgcaggtggtctggaacatcagcaaggtcaagcctttaaggggcagatgggcatgcttaaccttggtaatttggtgggtcaacaagaaaatgctcctggcataccatcgatttcttgggacgatgtcctcagtagctccaggtccagtcttggcttgtctactggagggacagcttttgttggaccaactagtgctgatcaacatgtgcatgactatggagactgcccttcatccagctcctacaccgaagtcttcagtagcaaatcagcaagattggtggcaagtggcgtttatggtcaatcagctgatgcaaatggttctggttgtgagggagatgaacctctagggtccatgaaagaattggaagctcaaactattggagatctccttcctgatgacgatgacttgatatcggggattatagatggcttcgaatacactggcttgtctaacaaggatgatgctgatgaagatatattctacactggaggaggtttggagctagagcatgatgattccaacaatgtcgacaaatttcgtgaagtgtccttcaaaagtcaactttctggcgatgtcaacgagatctacaaggctcctacaagctgcaataagaaatttgtagaattctataataccagagcagcacaagaaacactgaatgacctcaacaagggtgacatgtcatgctcacaaatcaaggttgagcatagctattctggaggagcaggatcttgcttcacagagcaatgttctggagaacagaagcaaaatgccgtacctcaccaacttaagaactctccacttgggaccattgggaagttagaccctaaaagttgggagggcagcactgttcgtaatttatattctccagttagaccacaacacgataaagcacaacatggcttctctgtgaatgctcctcagaagttgtcatcgcctatcagaattgaatctacacgacagcacagtaatcaaactgctcttggtgaacctagtggatcgcttggtcatggcaactttggaggtggactgcaagccttccacccacactcactgccagagtatcataatggtatttgcaatggctctaactccatgacattaaatgcaaggaattctaacttcagattaactgaaggaatggactacaataatcacaaagttgaccacagtgaccttcatggtcattcctctgatcaaaatgaagcatttagagctactggaattggaagttgcccccttcatggacatcactatacttggagtaactcaaatggatttcctcaaagcccctctgctccaatgctgtggtctaactttcagcaaccagtgcatgtgaattgttaccctgttatgcctcctcacatgcggcgcactgctgcccatcctatggaccaacatcacttgggttcagctccaaacagtgttggtggtttcgcaaatgcacattcttttcatccagggtcccttgaaagtgtagggtttcctggcagccctcagctgtatccagatctctctgtatttgcatctgccagaggaaattacagggagaccatgttctcccccgtaagtgctgggtttccatcaattcagcaaatttttcatgcgaccaacggaaggaatcctatggtgcatgtttccacatcatatgatgccactaatgatcggataaggagccgcaggcatgatggaaatgctgcccagtctgaaaacaagaagcagtttgagctggaccttgaccgcatagctaagggtgaagattcgcgcaccacactgatgataaaaaacattcctaacaagtacaactgtaagctgcttttggctgtcattgatgagaatcaccgaggaacctatgatttcatctaccttccaattgattttaagaacaaatgtaacgttggctacgctttcatcaatatgacagatccacagcacataattccattttacaagacattcaacggcaagaaatgggagaagttcaacagtgagaaagtggcatcacttgcatatgccagaatccagggaaggaatgctttgattgctcattttcagaattcgagcctgatgaacgaagagaaatggtgccgccctatgcttttccacaaagatggtccacatgcaggagatcaggagccattccctgtgggtagcaatgtccgttctcggtctgggagaaacagaccactcactggttcagagactactaaagagggaagtccatcaacctctcctaactaa

SEQ ID NO: 2984 - protein, 818 aa, Sorghum bicolor
MVIASGAVDRSHLSPFVPLSESSSSSFFSQDLVPTERQVGFWKSSGSMVHHKGSEPIFTSPLDKVHPMGSSPAGGLEHQQGQAFKGQMGMLNLGNLVGQQENAPGIPSISWDDVLSSSRSSLGLSTGGTAFVGPTSADQHVHDYGDCPSSSSYTEVFSSKSARLVASGVYGQSADANGSGCEGDEPLGSMKELEAQTIGDLLPDDDDLISGIIDGFEYTGLSNKDDADEDIFYTGGGLELEHDDSNNVDKFREVSFKSQLSGDVNEIYKAPTSCNKKFVEFYNTRAAQETLNDLNKGDMSCSQIKVEHSYSGGAGSCFTEQCSGEQKQNAVPHQLKNSPLGTIGKLDPKSWEGSTVRNLYSPVRPQHDKAQHGFSVNAPQKLSSPIRIESTRQHSNQTALGEPSGSLGHGNFGGGLQAFHPHSLPEYHNGICNGSNSMTLNARNSNFRLTEGMDYNNHKVDHSDLHGHSSDQNEAFRATGIGSCPLHGHHYTWSNSNGFPQSPSAPMLWSNFQQPVHVNCYPVMPPHMRRTAAHPMDQHHLGSAPNSVGGFANAHSFHPGSLESVGFPGSPQLYPDLSVFASARGNYRETMFSPVSAGFPSIQQIFHATNGRNPMVHVSTSYDATNDRIRSRRHDGNAAQSENKKQFELDLDRIAKGEDSRTTLMIKNIPNKYNCKLLLAVIDENHRGTYDFIYLPIDFKNKCNVGYAFINMTDPQHIIPFYKTFNGKKWEKFNSEKVASLAYARIQGRNALIAHFQNSSLMNEEKWCRPMLFHKDGPHAGDQEPFPVGSNVRSRSGRNRPLTGSETTKEGSPSTSPN

SEQ ID NO: 2985 - DNA, 750 bp, Sorghum bicolor
atggcggcggcggctgccacctccttcgccaccctcgccgtcgcgcgctcggcggggcagcggtccctcctcgcctccaaggccgccccctcgccgctcctctccctccgcagcgccggcctcccctcgcaggccgtctccttctccgggggcctcgcggcgtcgacctcccacagccgagcgcgcttcgcaacatccgccagcgccgagcccaaggaagcagaccttcagtctaaaatcacaaacaaggtgtactttgacataagcattgggaaccctgtggggaagaatgttgggaggattgtcatcggcctatatggggatgatgttccacaaacagcggagaacttccgtgctctttgcactggagagaaagggtttggatacaagggatccagtttccaccgtgttatcagcgacttcatgattcagggcggagattttgacaagggcaacggtaccggtgggaaaagcatatatggacgcaccttcaaagatgagaacttcaaattggttcacactggacctggagtggtcagcatggctaatgctggaccgaacaccaacggcagccagtttttcatttgcactgtcaagacaccttggttggacggaaggcatgttgtgtttggccaggtcctggaagggatggacatcgtaaagttgatcgagtcacaggagactgacagaggtgaccgcccgaagaagaaagtagtcatcagcgagtgtggggagcttccagtggtttaa

SEQ ID NO: 2986 - protein, 249 aa, Sorghum bicolor
MAAAAATSFATLAVARSAGQRSLLASKAAPSPLLSLRSAGLPSQAVSFSGGLAASTSHSRARFATSASAEPKEADLQSKITNKVYFDISIGNPVGKNVGRIVIGLYGDDVPQTAENFRALCTGEKGFGYKGSSFHRVISDFMIQGGDFDKGNGTGGKSIYGRTFKDENFKLVHTGPGVVSMANAGPNTNGSQFFICTVKTPWLDGRHVVFGQVLEGMDIVKLIESQETDRGDRPKKKVVISECGELPVV

SEQ ID NO: 2987 - DNA, 1065 bp, Sorghum bicolor
atgctggggatggaggcgaagaagccttacctgatcgccatcatcatacagcttatctacgccggcatgttcgtcgtctccaaggcagccttcgaccatggcatcaacaccttcgtcttcatcttctaccgaatggccgccgcctcgctcctcctgctgcctgtcgccattatcctccaaaggaagaatgtgcggtccatgtccttggtgctgcttctcaagctcttcttctatgccttgatcgggaacacattcagcttgaacttgtacaacgtgagcatgaagtggacatcggcgacagtggcgtcggcatccagcaactccatgccggtcatcaccttctgcctcgcgctgctgctaaggatggaggcggtgaagctgcggagccgctccggcgtggccaagctcgccggcgtcgcgctctgcctcgccggagtcttcgtcctcgccttctacgccgggccggcgctgagccccgtgaatcgccaccgcgccttcgctgttgcgcaagcttcgaacaacaatcatcatcatccgagcagcaggatgacgtgggtgaaaggaacgttcttcatggtcctcgccaacgtcacatgggccctctggatcgtcctgcagtcagcgttgctgaaagagtaccccaataagatgcttgtgacggtgacacaatgcgtcttcagcaccatgcagtcattcgtcgtggcagtggtggctgagagagacttctccaagtggaagctccgatttgacattagcttgctagccatcatttacacggggtttgtggtaacaggagtgtcctactatcttcaggcatggtgtatggagatgaaaggccctgtctttctagcaatgtctaacccgctctgcttcatcttcaccatattctgctcctccttctttcttggagagattgttcatcttggcagcatcttgggcggagctctgttggtcgcagggctttacagcgtgttgtggggtaaaagtaaggaaaccatggagtctgagggaacggaagagcagaaggacgcagccaaagcatcgtccatgcttgaacaagcgtga

SEQ ID NO: 2988 - protein, 354 aa, Sorghum bicolor
MLGMEAKKPYLIAIIIQLIYAGMFVVSKAAFDHGINTFVFIFYRMAAASLLLLPVAIILQRKNVRSMSLVLLLKLFFYALIGNTFSLNLYNVSMKWTSATVASASSNSMPVITFCLALLLRMEAVKLRSRSGVAKLAGVALCLAGVFVLAFYAGPALSPVNRHRAFAVAQASNNNHHHPSSRMTWVKGTFFMVLANVTWALWIVLQSALLKEYPNKMLVTVTQCVFSTMQSFVVAVVAERDFSKWKLRFDISLLAIIYTGFVVTGVSYYLQAWCMEMKGPVFLAMSNPLCFIFTIFCSSFFLGEIVHLGSILGGALLVAGLYSVLWGKSKETMESEGTEEQKDAAKASSMLEQA

SEQ ID NO: 2989 - DNA, 402 bp, Sorghum bicolor
atgtccaaggtcttcaccctcgaggacgtcgccaagcacaacaccaaggaggattgctggctcatcatcggcggcaaggtatatgatgtgacgaagtttttggaagaccacccagggggtgatgatgttctgttgtcttcaactggtaaggatgcaactgatgatttcgaggatgtcgggcacagcaacactgcccgtgcaatgatggatgagtacttggtcggtgaaattgacgcatcgacgatcccttctaggacaaagtatgttccccccaagcaaccgcactacaaccaggacaagacccccgagtttgttatcaagatcctccagtttttggttcccctggcaatcctgggcctggctgttgccgttaggatgtacaccaagtcggagtctgcttag

SEQ ID NO: 2990 - protein, 133 aa, Sorghum bicolor
MSKVFTLEDVAKHNTKEDCWLIIGGKVYDVTKFLEDHPGGDDVLLSSTGKDATDDFEDVGHSNTARAMMDEYLVGEIDASTIPSRTKYVPPKQPHYNQDKTPEFVIKILQFLVPLAILGLAVAVRMYTKSESA

SEQ ID NO: 2991 - DNA, 222 bp, Sorghum bicolor
atgagttccattgtcatgggtgctaccggtgacaagaacaagacatcatggcccgaggtggtgggcatgtccatcaatgaggcgacagatattattcttaaagacatgctcaatgcccacattgaaattttgcctattggctcaattgtgacccaggactttcgccttgatcgtgtccgcatctttgtcgatattgttgctgaaactccgatagttggttga

SEQ ID NO: 2992 - protein, 73 aa, Sorghum bicolor
MSSIVMGATGDKNKTSWPEVVGMSINEATDIILKDMLNAHIEILPIGSIVTQDFRLDRVRIFVDIVAETPIVG

SEQ ID NO: 2993 - DNA, 909 bp, Sorghum bicolor
atgtgcatgcaaccaaacaaaccaatcgacagccctgagcaggaggaagacgacgacgagtcgacgacgacatccgccccacaacccacaaaaaccagcatggctccatcgtcgacagtgctgctcgccgccgcggtcgtagcgttaacgttggcaccgcggccgagcttggccgtggacccggtgagcacgtactgcgccaagaacttcaccggcgggcagacgcaggcgagcatcagttcggtgctcgccacgctagtcccgcgcgcctcgacggcctactacgcgacggcgatggccggcaccggcggctccaccatctggggcctggcgcagtgccgcggcgacatctcgtcgtccgactgcgcgcgctgcctcgccgcggcggcgcggcaggtggcgtcgtcgtgccggggccaggcggacgcgcgggtctggtacgactactgcttcctccgctacgacgacgccgacttcgtcggcctgccggacaccgggcacacgctcatcctcatcaacaccatgaacgccaccggcgacctggccgcgttcgaccgcgccgagcggagcctcatggcgcgcgtcgcggagacggccggtgaccccgccagcgccgggctcgccaggaagacggcgaagtttgggtcggaggggactaccatctacgggctcgggtggtgcaccagggacatcgccgccgcggattgtgggctctgcgtggcgcaggcggtggcggagctccctaactactgcagattccggaggggatgccgcgtgctctacagcagctgcatggcgcgctacgagacctaccccttcttcttccccgtcaccggcgacgacgacgacgtcgcggctgcctcctcccacgccggcgagtacgagactgtcatcttgaaccacaaatag

SEQ ID NO: 2994 - protein, 302 aa, Sorghum bicolor
MCMQPNKPIDSPEQEEDDDESTTTSAPQPTKTSMAPSSTVLLAAAVVALTLAPRPSLAVDPVSTYCAKNFTGGQTQASISSVLATLVPRASTAYYATAMAGTGGSTIWGLAQCRGDISSSDCARCLAAAARQVASSCRGQADARVWYDYCFLRYDDADFVGLPDTGHTLILINTMNATGDLAAFDRAERSLMARVAETAGDPASAGLARKTAKFGSEGTTIYGLGWCTRDIAAADCGLCVAQAVAELPNYCRFRRGCRVLYSSCMARYETYPFFFPVTGDDDDVAAASSHAGEYETVILNHK

SEQ ID NO: 2995 - DNA, 645 bp, Sorghum bicolor
atggcgcccgctgtggaagccgtgaaggagactggctcgttccaaaaggttcctgccttgaacgaaaggatactgtcaaccatgtccaggagatctgttgctgcccacccttggcatgatctggagataggtcctggcgctccaaccatattcaactgtgtcattgagattcccaggggcagcaaggttaagtatgaacttgacaagaaaactggattgatcaaggtggaccgtgtgctgtattcatcagttgtttaccctcacaactatggattcattccacgcacactttgtgaagacagtgatcctttggatgtactggttataatgcaggagccagttatcccaggctgtttcctacgtgcaaaggccatcggcgttatgcccatgattgatcaaggagaggcagacgacaagatcattgcagtgtgtgctgatgatcctgagtacaagcactacaatgatatcaaggacctcccacctcaccgcttggctgaaatcaggcgcttctttgaagactacaagaagaatgagaacaaggaggttgctgtgaacgactttctgcctgcaactgaagcttatgaagtcatacagcactctatggatctgtatgctacctacattgttgagggcctgaggagatag

SEQ ID NO: 2996 - protein, 214 aa, Sorghum bicolor
MAPAVEAVKETGSFQKVPALNERILSTMSRRSVAAHPWHDLEIGPGAPTIFNCVIEIPRGSKVKYELDKKTGLIKVDRVLYSSVVYPHNYGFIPRTLCEDSDPLDVLVIMQEPVIPGCFLRAKAIGVMPMIDQGEADDKIIAVCADDPEYKHYNDIKDLPPHRLAEIRRFFEDYKKNENKEVAVNDFLPATEAYEVIQHSMDLYATYIVEGLRR

SEQ ID NO: 2997 - DNA, 915 bp, Sorghum bicolor
atggagaaccctccgagtttcgtagtgactcccatcgctgcacctgtatcagcggagttcaccaaactcaccttccgtagcttgtatattcgtcgaagtggtccaagcagcagggagatatctatggatggaaaatctgatctcggcaagagatatttcagtgacttccccgtatacgatggtcctggctccgaggccaaactcgtggctcgtgtgcagggactctcagtccaagttggtaacacataccaaatattcaccatcgtctttgagaccgagaggctcaagggctcaacgctccttaccaatggagtgataactggtgggtctgatgaatgggcaattttcggcggaaccggagcgtttgctatggcgactggtgtcataaaaagaaaatatcttgctgatagggatggggggaaaaatactgaagaacttatgatagatgttttctgcccactgtttgttgcttcacagccgaagggccctaccacgaaggctggattatggggtggacagggagggtcgaaccaggacataacggtgccaccaaagcgtctgcagagcctcaccattcgcagtggcagcgctattgatgctattgagttcacttatattgacaatgctggtcagaagcacactgctggcgcatggggtggacctggtggcactgctcacaggatcgatcttgacgatgccgagtatgtcaaggaagtttcaggaacctacggcacatttgaaggcattaccgtcttgacctcattcaaacttgtcaccaatgtcagaacctggggcccatgggccatcgagaatgggacacctttctccatcaccgcgccaaccaacagcagcattgtgggattctatggacgtgcaggaaggctcatcgatgccattggtgtttactttgcgtga

SEQ ID NO: 2998 - protein, 304 aa, Sorghum bicolor
MENPPSFVVTPIAAPVSAEFTKLTFRSLYIRRSGPSSREISMDGKSDLGKRYFSDFPVYDGPGSEAKLVARVQGLSVQVGNTYQIFTIVFETERLKGSTLLTNGVITGGSDEWAIFGGTGAFAMATGVIKRKYLADRDGGKNTEELMIDVFCPLFVASQPKGPTTKAGLWGGQGGSNQDITVPPKRLQSLTIRSGSAIDAIEFTYIDNAGQKHTAGAWGGPGGTAHRIDLDDAEYVKEVSGTYGTFEGITVLTSFKLVTNVRTWGPWAIENGTPFSITAPTNSSIVGFYGRAGRLIDAIGVYFA

SEQ ID NO: 2999 - DNA, 1344 bp, Sorghum bicolor
atgatgagctgctttgggtgtttcaagcctgagaagaagatgcctccccggaggctggaggccagggaggtcacggttgtgaagaaggccccaagccagaatgaagcgcctcccagggaatctgggtccgtcaggccatcaccagtcacttcaaagcacaagccatcatctgaaacaccaacaagcactgaacctcctaaaggaagttgttctgtttccaaaaccgcaaaagcattcacattccgtgagctagccacggctacaaagaatttccgttccgactgcctccttggagaagggggctttggcagggtatacaagggcaagcttgaaaatggacagcttgttgctgtcaagcaactagacctgaatgggtatcaaggcaacagagagttcctagttgaggtcctgatgctcagtctattgcaccatccaaacctagtcaatttggttggctattgcgcagatggagatcaaaggcttctggtgtacgagtacatggcacttggttcacttgcagatcacctgcttgatagcactcctgatcaagtgccactgagttggtatctcaggatgaagatagctcatggaactgctaaagggcttgaatacctccatgagaaggcaaacccacctgtcatttaccgggatctcaagtcccccaacatccttcttgatgagaagtacaaccctaagctctcagattttgggcttgcaaagcttggtccagtcggggcaaagacacacatctccactcgggtgatgggaacatatgggtactgtgctcccgaatacataaaaacaggccagctaactgtcaagactgacgtgtacagttttggagttttcctactggagttgatcacaggaagaagagcggtagatacctccaggccagcaaatgaacaaatcctggttaactgggtcaagccattgctgagagacaggaagaggtacaatgagctagtagaccctaatcttagaggtgagtacccagaaaaagacttgagccaagctgtgggtgtagcagcaatgtgcctacaagaggaagcctcagtccgaccttacatgagtgatgctgttgtggccctgggattcctcgcagaaatgcctgctggctataaacacaaatctggccctatactcccaatgaaacaagttagagatccatcactaactaatagtggtagcgctaagcaacataacgatgcatacaatcgtcaaaaggctgtagctgaggccattgagtggggctcactgaggcagaaacagaaggctcaaagtccagaaaagaaagctcaaagtcaaggtggaacatcccctccagaagccagcagattgtaa

SEQ ID NO: 3000 - protein, 447 aa, Sorghum bicolor
MMSCFGCFKPEKKMPPRRLEAREVTVVKKAPSQNEAPPRESGSVRPSPVTSKHKPSSETPTSTEPPKGSCSVSKTAKAFTFRELATATKNFRSDCLLGEGGFGRVYKGKLENGQLVAVKQLDLNGYQGNREFLVEVLMLSLLHHPNLVNLVGYCADGDQRLLVYEYMALGSLADHLLDSTPDQVPLSWYLRMKIAHGTAKGLEYLHEKANPPVIYRDLKSPNILLDEKYNPKLSDFGLAKLGPVGAKTHISTRVMGTYGYCAPEYIKTGQLTVKTDVYSFGVFLLELITGRRAVDTSRPANEQILVNWVKPLLRDRKRYNELVDPNLRGEYPEKDLSQAVGVAAMCLQEEASVRPYMSDAVVALGFLAEMPAGYKHKSGPILPMKQVRDPSLTNSGSAKQHNDAYNRQKAVAEAIEWGSLRQKQKAQSPEKKAQSQGGTSPPEASRL

SEQ ID NO: 3001 - DNA, 1191 bp, Sorghum bicolor
atggcgaagctggcgtcgtcctcgacgttcgcgctcgacttccttcgccgcctcctgtgcgcgcacagcgccgacgaccgtccagattccgccgccgcggcacgccacacgtgctgcacgccggagatggaggagccgacgaggagcccctgcattgtggccaggctcatgggcctggacgcgatgccgcccgaggcgctggcgccgcacgcgcagctccaggcccagcggacgcccccgctgcggcggagccgctccgcgagctcggccgaggggtcgtcgagcccctgggaccgagacacacagcagccgcagccgcgagtggtccgcgcgtccgcgtcgctgcgggagaggccggcgtacctgaggcaggagagcgacgagttcttgctcctcagcttcagccccgatgaccaggatccggaccgggagcgcgaagtcagggaggagctcgacttcctgctcgccgccacggaggccactgccacgaggcgcggcgggagggtgaggtcggacgcgcccgggaccgggagtaagcagaggaggaacgggcgctgccgcaggctgcggttcgccgacgacgaagcggagtcggcgggccgcgtcgtcctccgccgcacgaggacgccggccgcggagtgcgacgcgcactattccagcccggtgtccgtgctggaggcgcatgacgagtcgtccaccaccaccaccaccacctcgtcgtccttggaagaggtggagcacgcagagccctgctcggctacctcagatgaacctcagacgatattggaacatcggaactcaaggaggaagctgcatccagacttcttccagttggacaacatgtcgcctccaagaagctcctgccatgtctcaagatgttcagacagggagaggaggaacaggagagtggtgaacaaagacgaggtgatcacgccagaagtgtctggtatctggcaaccaatctgtaggctggtcgaggaaggtctcaagaacatggaatggctaactctggatggcgcaaatgttgtttccgagatagagtatggcatccttgagcacctcatatgtgagatggtggatgaactcgagggaatgtctgaaactatacatcctttcccagtccgatctatctcttcgaaacaattgggtggcaagaatgttcagacaagacgtgctactgaacaaggttag

SEQ ID NO: 3002 - protein, 396 aa, Sorghum bicolor
MAKLASSSTFALDFLRRLLCAHSADDRPDSAAAARHTCCTPEMEEPTRSPCIVARLMGLDAMPPEALAPHAQLQAQRTPPLRRSRSASSAEGSSSPWDRDTQQPQPRVVRASASLRERPAYLRQESDEFLLLSFSPDDQDPDREREVREELDFLLAATEATATRRGGRVRSDAPGTGSKQRRNGRCRRLRFADDEAESAGRVVLRRTRTPAAECDAHYSSPVSVLEAHDESSTTTTTTSSSLEEVEHAEPCSATSDEPQTILEHRNSRRKLHPDFFQLDNMSPPRSSCHVSRCSDRERRNRRVVNKDEVITPEVSGIWQPICRLVEEGLKNMEWLTLDGANVVSEIEYGILEHLICEMVDELEGMSETIHPFPVRSISSKQLGGKNVQTRRATEQG

SEQ ID NO: 3003 - DNA, 1047 bp, Sorghum bicolor
atgtctatctcggagaaggtggtgccatcatcatcatcagtttcttcgtcgtcagatttggatccgctgttgaaggatcttacggagaagaagttgagctttaggaggaacgtggtgtcattggcagccgagctcaaggatgtgaggaacaagcttgcttcccaggagcagctgtttgtaagggaatctcaaactagaaaggttgcggagacaaaagcgaggagcatggaagaggaagtaagcaagctgcagaaatgcttacaggacaaggatgagcaactgcgttcatccacaagtagcacggaacagtacctccatgagttggatgatcttagaacacaactgtcatttactcaagctacagcagaagcaagtgctgcatcagccaagtcagctcagatgcagtgcttgtcattgctgaaagagttgaatgagaaggacatctcactcaaagagcacgaacttcgagtgaacaagcttggtgagcagcttgatcttctccagaaggatctgcaagcaagggagctctcacaaatgcaacttaaagatgaagttataagaattgagaccgacatcatggacgcagttgccaaagctgggtctaggtctgacaaagataatgaactgttaaagatcttatctgatgtttcaccaaggaatgtccagaacctcaacaaccttttgaatgctaaggatacagaaattgcgaggttgagagaggaaatcagaatattgtctgctcactggacgaacaaaaccaaggaacttgaatcacagttagaaaagcaccggagaactgatcaggagctgaagaagagggttctgaagcttgaattttgccttcaagaatctcagtctcagatgcgaaaattaaagaggatgggggagaaaagagacaaggctctcaaggaactcatggaccaggtggccatgaagcagcccaacagcatgtgccatgacaacaaggagaatttttgggagagtcagggattcaagttccttgcctctatgtcgatgctggcactagtgatcctcgcaaagcgatga

SEQ ID NO: 3004 - protein, 348 aa, Sorghum bicolor
MSISEKVVPSSSSVSSSSDLDPLLKDLTEKKLSFRRNVVSLAAELKDVRNKLASQEQLFVRESQTRKVAETKARSMEEEVSKLQKCLQDKDEQLRSSTSSTEQYLHELDDLRTQLSFTQATAEASAASAKSAQMQCLSLLKELNEKDISLKEHELRVNKLGEQLDLLQKDLQARELSQMQLKDEVIRIETDIMDAVAKAGSRSDKDNELLKILSDVSPRNVQNLNNLLNAKDTEIARLREEIRILSAHWTNKTKELESQLEKHRRTDQELKKRVLKLEFCLQESQSQMRKLKRMGEKRDKALKELMDQVAMKQPNSMCHDNKENFWESQGFKFLASMSMLALVILAKR

SEQ ID NO: 3005 - DNA, 174 bp, Sorghum bicolor
atgtcggaggggacggccaactgcgtggacatcctgatcgccatcatcctgccaccgctgggtgtgttcctcaagttcgggtgcgggcaccagttctggatctgcctcctcctcaccttcctcggctacctccccggcatcatctacgccgtctacgccatcaccaagcagtag

SEQ ID NO: 3006 - protein, 57 aa, Sorghum bicolor
MSEGTANCVDILIAIILPPLGVFLKFGCGHQFWICLLLTFLGYLPGIIYAVYAITKQ

SEQ ID NO: 3007 - DNA, 579 bp, Sorghum bicolor
atggcgctgcgcatacccaccatctcctcgtcccacgggctggcctcctcgccggcgccgacgtgccggccggctgtcttcttggcggttggcagcagcagcagctgggcggcgggagcccagcagaagaggagcctgctgctggcgacgacgacgacgacggcctccgagacgaggggagctggagtcctcgcgccggtgaggtcgagcgggatcgagacgtcgacctcggtgggagctgaggccgtcaccgggcaggtcacggaggtcaacaaggacaccttctggcccatcgtcgaggccgccggcgacaaggtcgtcgtcctcgacatgtacaccgaatggtgcgggccttgcaaagtgatggctcccaagttccaggagatgtctgagaagaacctggatgttgtcttcctcaagctcgactgcaaccaggacaacaagccgcttgcaaaggagctgggaataaaggttgtgccaacgttcaagatcctcaagggtgggaaggtcgtcaaggaggtgaccggcgccaagatcgaggagctagcgcatgccatcgacacactcaagtcaggctga

SEQ ID NO: 3008 - protein, 192 aa, Sorghum bicolor
MALRIPTISSSHGLASSPAPTCRPAVFLAVGSSSSWAAGAQQKRSLLLATTTTTASETRGAGVLAPVRSSGIETSTSVGAEAVTGQVTEVNKDTFWPIVEAAGDKVVVLDMYTEWCGPCKVMAPKFQEMSEKNLDVVFLKLDCNQDNKPLAKELGIKVVPTFKILKGGKVVKEVTGAKIEELAHAIDTLKSG

SEQ ID NO: 3009 - DNA, 765 bp, Sorghum bicolor
atggccgattccaccaccaacgacgccccggtcgtcaacagccagcccaccacggaggaggaggtgacggtggagagggcggcggcggcggcggaggaggaggaggagaggctgcggtacctcgagttcgtgcagcaggcggcggcgcaggcgctggtgctggcggccgcggcctacgcgtacgccaagcagggcgcggggccgctccgccccggcgttgaccatgtcgagggcaccgtcaaggctgtcgtcgggccggtgtatgaccgcttccatgccgtcccgcttgacctcctcaagttcatcgatcgcaaggttggtgagtccgttgaggagatagaccgccgcgttcctccagtggtgaaggaagccccaacccttgcccgctcggctgcaaaggaggttcgtgaggccggccttgtgggtacggccacaggccttgccaagtcagccattgcccgcgcggagccaaaggccagggagctctacacccgctatgagcccgtggcagagcgccgtgctgcggaagcctgggtggccctgaaccgccttccgctggtgccttcagtcaccagggctgtcctccccacagccgcgcagctctcagccaggtacaattcagcggtgcgtgatggtgccaagcgcgggaacactgtggccacctatctcccgcttgtgcccactgagcggctcgcccgggtgttcccgtaccccatggctgatgttgccccagcaccagagatgcagcctatcccctcccagtag

SEQ ID NO: 3010 - protein, 254 aa, Sorghum bicolor
MADSTTNDAPVVNSQPTTEEEVTVERAAAAAEEEEERLRYLEFVQQAAAQALVLAAAAYAYAKQGAGPLRPGVDHVEGTVKAVVGPVYDRFHAVPLDLLKFIDRKVGESVEEIDRRVPPVVKEAPTLARSAAKEVREAGLVGTATGLAKSAIARAEPKARELYTRYEPVAERRAAEAWVALNRLPLVPSVTRAVLPTAAQLSARYNSAVRDGAKRGNTVATYLPLVPTERLARVFPYPMADVAPAPEMQPIPSQ

SEQ ID NO: 3011 - DNA, 1977 bp, Sorghum bicolor
atggactacacatccgatggagattctgaggtcgaagcttatggatccggtacttttgagcttctggaatcaggagatttacaagtgatgactgatgaaggcttgtaccgatgccccttttgttcagatgaagataaggaccacagtctaaatgatctgctgcagcatgcctctggtgtgggagcagcacatgatcggcaagccaaagagaaggcagaccaccgtgctcttgcaaggcatttgaagggtaagcctgctgaatcacctggcgcacgtttgcagccaatgcttatagatgtgcaggatcctgagcatacccaagatgagcaatttgtctggccctggatggctatcctagtcaatatgccaaatgaattctttggtaaaagtgcgaatcgactgaaggagcattactcatcttttcatccagtgaaggtgcatcctgtatatagcaaaggtcgtcccacgcgtgatgctgtttttgagtttgggaatgactggagtgctttcaggaatgcacgggcctttgatgctcactttgcaatgaaagggtacagtaaaaattgctggaaggagatgaagtctgaatgtaaagagcctgttgggtggatggcaagggctgatgattacaattctctaggggcaataggtgagctactgagaaaaaatggtgacctgaaaacattaaaagatattggtagtgaaggggcaaataaaaccgaaaagcttctgtccaatttggcctgcaaagttaaagaaaaggaaatttatttagagcaacttgagtctgagtacaacaagcgttctgcttcacttaacataatgatgcagaagagggagcaacaactccagtcatacaatcaagagatcctgaagatgagacaacttggtcaacaaaacacacaaagaattgttgagcagaaccggaagctacgatacgatatgcaggacatggcggacgcacttgatgcaagaaacaaacaaattgagcagtcggagcatgacaaaaagaaacttgagcaggagaagctaaaggaattagaatcctctagtcatgtatgtcttctaagaatgataaataactttgattgctatttctttgaaaatgaaatctttttgttacttggtgattttatgaatgcaatgaggaccaatcatcttaggttggctgcattggagcaggagaaagctgatgaaaatgtccaaaagcttgtggataaacaaacgagagaaacaaaagctattctagacgactttttgaggttgaacacacagttggagaagaagcagaaacttgaattggaaataaaccacttgagcgggaaactgcatgtgatggagctcaagccaggtgatgaagatccagaatccagagagaaaatagataaactaaaggaggagctcaatgagaagattgatgaactgaaatatgcggaaaactacaaccaagatttaatcagtagggaaagaaagtccagtgatgagttgcgagaagctcgtgaggtgttgataaattctctgcagagtttgccccgaaccacaagctgccagtcacagatcggcgtcaagaaagttggtgagcttgaccccagtgtgtttctaagcctgtgcaagcgaaaatttccagcagcagatgcagaagctaaaagttctagtctttgttcaaagtggcagaatgaaattgaaaatccagaatggcagcctttcaaggttattattgttgatggaaaagcatcggaagcactcaatgagggtgacaggaagctccaagaactgaaggagctcggtcaagaaccctatgctgcagtaacaaaggttctgatggagctgaaggatgccaatggcggcaggaaggatccgttccctgagctgtggaactatgaccagggtcggaaagcaaatatggtggaaggagctcggcatgctgtgatgctttggaacgcgagcaagacgaagaagggcaagaaaagccgctga

SEQ ID NO: 3012 - protein, 658 aa, Sorghum bicolor
MDYTSDGDSEVEAYGSGTFELLESGDLQVMTDEGLYRCPFCSDEDKDHSLNDLLQHASGVGAAHDRQAKEKADHRALARHLKGKPAESPGARLQPMLIDVQDPEHTQDEQFVWPWMAILVNMPNEFFGKSANRLKEHYSSFHPVKVHPVYSKGRPTRDAVFEFGNDWSAFRNARAFDAHFAMKGYSKNCWKEMKSECKEPVGWMARADDYNSLGAIGELLRKNGDLKTLKDIGSEGANKTEKLLSNLACKVKEKEIYLEQLESEYNKRSASLNIMMQKREQQLQSYNQEILKMRQLGQQNTQRIVEQNRKLRYDMQDMADALDARNKQIEQSEHDKKKLEQEKLKELESSSHVCLLRMINNFDCYFFENEIFLLLGDFMNAMRTNHLRLAALEQEKADENVQKLVDKQTRETKAILDDFLRLNTQLEKKQKLELEINHLSGKLHVMELKPGDEDPESREKIDKLKEELNEKIDELKYAENYNQDLISRERKSSDELREAREVLINSLQSLPRTTSCQSQIGVKKVGELDPSVFLSLCKRKFPAADAEAKSSSLCSKWQNEIENPEWQPFKVIIVDGKASEALNEGDRKLQELKELGQEPYAAVTKVLMELKDANGGRKDPFPELWNYDQGRKANMVEGARHAVMLWNASKTKKGKKSR

SEQ ID NO: 3013 - DNA, 1689 bp, Sorghum bicolor
atgcagtccaccgcggccgtctccgtctccgcctcggcgaccgcgtcccgcggcggcgccagatccgaggccgcgcggcggccaggtggggtccgggtctgcggactccggggcgaggccctagcgtgcccctcgctgcggatctcgcaggtgccagcgaggctggcggtggcgagggccgcggcggcgaccaatggcgcggtggcggggagcggcggcttcgattacgacctcgtcatcatcggcgcgggcgtcgggggtcacggcgccgcgctccacgccgttgaagagggtttgaaaacagccataattgagggagatgttgtgggtgggacttgtgtaaacagaggttgtgtcccatcgaaagcactccttgctgtcagtggtcgaatgcgggagcttcatgatgaacatcatttgaagtctatgggtctacaggtttcttctcctggatatgacaggcaaggtgttgctgatcatgcaagcaatcttgcctcaaaaatccgtagcaacttgactaactcaatgaaagctctgggagtggatatattgacaggtgttggcactattgtgggaaagcaaaaggtacgatatggaaaagccggttctccagataaagaaatcactgccagaaacatcataattgccactggttcagttccttttgttcccaaagggattgagattgatgggaaaactgtatttaccagtgatcatgcactgaaacttgagtcagttccagactggatagctattgttggaagtggttacattggacttgagttcagtgatgtatacacagctcttggaagtgaggttactttcgttgaagctcttgaccagctgatgcctggatttgatcctgaaattgcaaaattagcccagagagttcttatcaatcctcggaaaattgactatcacactggtgtttttgcaagcaagattactccagcaaaggacggaaaacctgtgctcatcgagcttattgatgcgaagacaaaggaacacaaagaaacccttgaggttgacgcagctcttattgccacaggaagggcgccattcaccaaagggcttggcttggaaaacatcaatgtcgttacacaacgtggttttgtgcctgttgatgaacggatgcgagtcatggatgcagatggcaatgtggtacccaatttatattgcattggagatgccaatggcaaactcatgcttgcccatgctgccagtgcacaaggaatttcagttgttgaacaaatctctggaaaggatcacatcctaaatcatttaagcatcccggccgcatgttttactcatccagagattagtatggttgggctgacagagccacaagccagggagcaggcagacaaagaaggatttgaggtaaatgttgtgaagactagctttaaggctaacactaaagctttggcagaaaatgaaggagatgggattgctaagttgatttaccgacctgacacgggtgaaattcttggggttcacattttgggtttgcatgctgctgatctcatccacgaggcctccaatgccattgccctaggaacacgtgtacaagacatcaagtttgctgttcacgctcaccccacattatccgaggtcctggatgaactcttcaaagcagcaaaggttaattccggtgtttctcattctgtaaatgaaccagttgcagcctag

SEQ ID NO: 3014 - protein, 562 aa, Sorghum bicolor
MQSTAAVSVSASATASRGGARSEAARRPGGVRVCGLRGEALACPSLRISQVPARLAVARAAAATNGAVAGSGGFDYDLVIIGAGVGGHGAALHAVEEGLKTAIIEGDVVGGTCVNRGCVPSKALLAVSGRMRELHDEHHLKSMGLQVSSPGYDRQGVADHASNLASKIRSNLTNSMKALGVDILTGVGTIVGKQKVRYGKAGSPDKEITARNIIIATGSVPFVPKGIEIDGKTVFTSDHALKLESVPDWIAIVGSGYIGLEFSDVYTALGSEVTFVEALDQLMPGFDPEIAKLAQRVLINPRKIDYHTGVFASKITPAKDGKPVLIELIDAKTKEHKETLEVDAALIATGRAPFTKGLGLENINVVTQRGFVPVDERMRVMDADGNVVPNLYCIGDANGKLMLAHAASAQGISVVEQISGKDHILNHLSIPAACFTHPEISMVGLTEPQAREQADKEGFEVNVVKTSFKANTKALAENEGDGIAKLIYRPDTGEILGVHILGLHAADLIHEASNAIALGTRVQDIKFAVHAHPTLSEVLDELFKAAKVNSGVSHSVNEPVAA

SEQ ID NO: 3015 - DNA, 297 bp, Sorghum bicolor
atggccgccgcaagaaggccttcaccgacgacgaagccgacgatgagcaaggacgtcgatgccgcggaaggcaaggcgagggtgaaggcctgcagcaggcgacgcgacatggaggtgaggaagaagatggaggtgctgaggcgcctcgtgccgagcagcagcggcggcggtgacggcgacggcgacgaggtcgacgagctcctcctcctgcgcgctgccggctacatcgcgcagctgcaggcgcaggtgacggtcatgcagttcatggtcgacgtgctcgaggacgcaaagcattaa

SEQ ID NO: 3016 - protein, 98 aa, Sorghum bicolor
MAAARRPSPTTKPTMSKDVDAAEGKARVKACSRRRDMEVRKKMEVLRRLVPSSSGGGDGDGDEVDELLLLRAAGYIAQLQAQVTVMQFMVDVLEDAKH

SEQ ID NO: 3017 - DNA, 1023 bp, Sorghum bicolor
atggtggtgccttccacgacgccggtggtggtgcgccaagaaacgccgccgccgccgctgccgctgccgccgtcccacgacggcataataggcataccgacggtggacatgtcggcgccgggcggccgcggcgcgctgtcgcggcaggtggcgcgcgccatgcgcgccggcccgcccagcccgctcggctacggctgccgcaccatcggcttcaacggcgacgccggcgagctcgagtacctgctgctccacgccaaccccgccgccgtcgcgcacagggccaggtccatcgacactgacgacccctcgcgcttcagtaatgtggtgaacgagtatgtgggagcaatgaggcagcttgcatgtgagatcctggacctgttaggagaggggctagggctcaaggaccccagatccttcagcaagctcatcactgacacagacagcgactcactcctgaggatcaaccactaccctccagcatgcaccattcagaagcttgaccatgacaaccaatgcaagatgaagagcagtttcagaatcaagactggcaatggtgtgaaccagtcagcaggtgcacggatcggattcggggagcattcagacccgcagattcttagcttgctccgatcaaacgatgttgacggccttcaggtgcttctgaactgcgacggcagggaggtgtgggttcaggtgccatccgatccatcagcattctttgtcaatgttggtgatctcctccaggctttgacaaatgggaaggtgataagtgtccggcacagggtaattgcaaactcctgcagggcaaggctgtccacaatctacttcgctgcgccgccactgcatgcacgaattttggccctcccagagacaatcacagccaactcaccccgccagtaccggcccttcacctgggccgagtacaagaagacaatgtactccctccgcctgagccacagccgcctcaacctcttccacatcgaccatgatgaccacagcaatgtcggcaaaggagaacaagaatag

SEQ ID NO: 3018 - protein, 340 aa, Sorghum bicolor
MVVPSTTPVVVRQETPPPPLPLPPSHDGIIGIPTVDMSAPGGRGALSRQVARAMRAGPPSPLGYGCRTIGFNGDAGELEYLLLHANPAAVAHRARSIDTDDPSRFSNVVNEYVGAMRQLACEILDLLGEGLGLKDPRSFSKLITDTDSDSLLRINHYPPACTIQKLDHDNQCKMKSSFRIKTGNGVNQSAGARIGFGEHSDPQILSLLRSNDVDGLQVLLNCDGREVWVQVPSDPSAFFVNVGDLLQALTNGKVISVRHRVIANSCRARLSTIYFAAPPLHARILALPETITANSPRQYRPFTWAEYKKTMYSLRLSHSRLNLFHIDHDDHSNVGKGEQE

SEQ ID NO: 3019 - DNA, 468 bp, Sorghum bicolor
atgcagatcttcgtgaagaccctgacggggaagaccatcacgttggaggtggagtcctcggacaccatcgacaacgtgaaggccaagatccaggacaaggagggcatcccgccggaccagcagcgtctcatcttcgccggcaagcagctcgaggacggccgcaccctcgccgactacaacatccagaaggagtccaccctccacctggtcctccgcctccgcggtggcgccaagaagcgcaagaagaagacgtacaccaagcccaagaagatcaagcacaagcacaagaaggtgaagctcgccgtgctccagttctacaaggtggacgacgccaccggcaaggtcacccgcctccgcaaggagtgccccaacaccgagtgcggcgccggcgtctttatggccaaccacttcgaccgccactactgcggcaagtgcggcctcacctatgtctacaaccagaaggcgtaa

SEQ ID NO: 3020 - protein, 155 aa, Sorghum bicolor
MQIFVKTLTGKTITLEVESSDTIDNVKAKIQDKEGIPPDQQRLIFAGKQLEDGRTLADYNIQKESTLHLVLRLRGGAKKRKKKTYTKPKKIKHKHKKVKLAVLQFYKVDDATGKVTRLRKECPNTECGAGVFMANHFDRHYCGKCGLTYVYNQKA

SEQ ID NO: 3021 - DNA, 726 bp, Sorghum bicolor
aagttgtacgtgggccaaatttctccacatacccggacacaggatcatgaggaccttttcagcaaatatgggagattgcgtaatgtggatctgaagagggactttggctttgttgagttcagtgatcctcgggatgcagatgatgcaaggcatgaccttgatggccgaagatttgatgggagttacatcattgttgaatttgctagaggggcccgacggggtccaggaggtgttcctctagatgtcagaggaccaccttttcctggacgctgctataactgtggaatggatgggtgggttcgtgattgcaaagctgatgactggagagataggtgctttcggtgtggagaactgggccatatagaaagaaactgcaagaacagtcctaaggatctgaagcgcgggaggagctactcgaggtctccatctcctcaccatgggaagggccgagggagaagctactcgaagtctctatctcctcaccatggaaggggccgagggagaagctactcaaggtctccatctcattgtcgtgggaggggcagaagttggagttacagtcggtcgctttcgccaaggaacaaatttaaggctgatggtgaagaattgccaccaagaacctctggttacagccgcagccccaggaggagctccccaccaagggagcaaggttcataccatggtggtagccccatgagaggtgaagctcaggggaagtgtcagtga

SEQ ID NO: 3022 - protein, 241 aa, Sorghum bicolor
KLYVGQISPHTRTQDHEDLFSKYGRLRNVDLKRDFGFVEFSDPRDADDARHDLDGRRFDGSYIIVEFARGARRGPGGVPLDVRGPPFPGRCYNCGMDGWVRDCKADDWRDRCFRCGELGHIERNCKNSPKDLKRGRSYSRSPSPHHGKGRGRSYSKSLSPHHGRGRGRSYSRSPSHCRGRGRSWSYSRSLSPRNKFKADGEELPPRTSGYSRSPRRSSPPREQGSYHGGSPMRGEAQGKCQ

SEQ ID NO: 3023 - DNA, 1896 bp, Sorghum bicolor; identical to SEQ ID NO: 1101

SEQ ID NO: 3024 - protein, 631 aa, Sorghum bicolor; identical to SEQ ID NO: 1102

SEQ ID NO: 3025 - DNA, 1299 bp, Sorghum bicolor
atggcgacctgcagggagagcggcgggttggtggcggtgcggtgcgccggaaggatcggggtggtggcctcggtggccatgaacctcgcgtggatcgccatgtacatccgccgccgctacttcggcgccggcggcggcggatctgacaacaacggccgcggcgtcaccacggtggagccgtccaaagggaaaccgccggtcactgaggactcaattgttaacctggaccatggtgacccgactatgtatgaggagttctggcgtgggacaggagatagcgcctccattttcatccctggttggcaaacaatgagctacttctccgacctcggcggcatttgttggttcgtcgagcccggcttcgagcgcgaggtccggcgtctccaccggctcgtcggaaatgccatggtcgacgggtaccatgtgctcgtcgggacaggctccacgcagctctttcaggccgtgctgtacgcactctcacctgcaagcgacggcacgcccatgaacgtcgtctcaccggcaccatactactcgtcatacccatctgtgaccaactttctgaactctgggctttaccgttggggtggtgatgccaatacatttgatggtgacacctgtattgagctcgtctgctcgccaaacaaccctgatggtagcatcagaaaagctgtcatcaaatccaagtctagcaaggctgtttatgacttcgcctactactggccacagtacgcacccatcaccgaggcagctggacatgatatcatgttattcactgtatccaaatgcaccggccatgccggcactagactggggtgggcattggtgaaggatactgaggtggcccagaaaatgattaagtttatagagctcaacacaattggcgtatccaaggactcccaacttcgtgccgctaagattattggggcaatctgtaacggctatgagctatcatctgctggtaaaacaagccacctcttccattttgctaaggaaaaaatggcggaacgttggattagactccgtgcagctgtggcagcctcagacatttttactctcccaaatgagctatcaggctattgtagtttttccaaggaggcagtcaccgccaatcctccatttgcatggcttcgctgcaagaaggatgatattgaagatttggagggctttctgcgtgggaaaaagataatcactcgaggtggcacaaagtttggagtggatgggagggttgtcagggttagtatggttgacacagaccaagccttcaatgtgttcatcaatcgtctcgccacaatgaagtga

SEQ ID NO: 3026 - protein, 432 aa, Sorghum bicolor
MATCRESGGLVAVRCAGRIGVVASVAMNLAWIAMYIRRRYFGAGGGGSDNNGRGVTTVEPSKGKPPVTEDSIVNLDHGDPTMYEEFWRGTGDSASIFIPGWQTMSYFSDLGGICWFVEPGFEREVRRLHRLVGNAMVDGYHVLVGTGSTQLFQAVLYALSPASDGTPMNVVSPAPYYSSYPSVTNFLNSGLYRWGGDANTFDGDTCIELVCSPNNPDGSIRKAVIKSKSSKAVYDFAYYWPQYAPITEAAGHDIMLFTVSKCTGHAGTRLGWALVKDTEVAQKMIKFIELNTIGVSKDSQLRAAKIIGAICNGYELSSAGKTSHLFHFAKEKMAERWIRLRAAVAASDIFTLPNELSGYCSFSKEAVTANPPFAWLRCKKDDIEDLEGFLRGKKIITRGGTKFGVDGRVVRVSMVDTDQAFNVFINRLATMK

SEQ ID NO: 3027 - DNA, 1260 bp, Sorghum bicolor
atgggcaggaagagcggcggcggcggcggtggcgcgcgattgcaatgcgccgaggccaaaccggcggcggattggagctgctgcttcctggccctgccaccggcagcggcagcggcagcaccgtcctgtgcggatggcgatggtggtttcaacctctcctggaacctccaccagtccttccacccgccggccggcctcttcgccagcatgggccagcaggttggggttggcttcccgggggcttcgtctaggtccccgtcgccggagacaccacgggacccgtacatgaagtacgtctcgccgccggaggttgttgagacacctctgccgggggaaggtgtggtggggttgaaggacaaggggcagaagaagaaagtcgtgaagctcaagattaaggttgggaatcatcacctcaagaggctcatcagtggggcaatcgcaggcactgtgtcaagaactgctgttgcacctttggagacgatcaggacgcatctgatggttgggagtaatgggaattcgacaacggaggtgttccagtctatcatgaagcatgagggatggactggcttgttccgtggtaactttgttaatgtcatccgggtagccccaagcaaggcaatcgagctttttgcctttgatacagctaataaattcttgacccccaaatctggggaggagcggaagatcccagtccctccttcactagtggctggagcatttgcaggtgttagctcaacactgtgtacataccctctggaattgattaagacacggttaactatacagagaggtgtgtatgacaacttccttgacgcatttgtcaaaatcgtccgtgatgaagggcctactgaactctaccgaggcttaaccccaagtctgattggagtggtgccatatgctgcaaccaactacttcgcttatgacaccctgaagaaggtgtacaagaaggtgttcaagacaaatgagattggcaacattccaacactgctcatcgggtctactgcaggagctatctcaagcacagcgacattccctcttgaggtcgcacggaagcacatgcaagttggagctgtcggtggcaagaaggtttacaagaacatgcttcatgccctcctgagcattcttgaggatgaaggggttgggggcctgtatagagggttggggccaagctgcatgaagttgatgcctgctgctgggatttcgtttatgtgctatgaggcttgcaagaagattctgatcgaagaagaagagaatgagtga

SEQ ID NO: 3028 - protein, 419 aa, Sorghum bicolor
MGRKSGGGGGGARLQCAEAKPAADWSCCFLALPPAAAAAAPSCADGDGGFNLSWNLHQSFHPPAGLFASMGQQVGVGFPGASSRSPSPETPRDPYMKYVSPPEVVETPLPGEGVVGLKDKGQKKKVVKLKIKVGNHHLKRLISGAIAGTVSRTAVAPLETIRTHLMVGSNGNSTTEVFQSIMKHEGWTGLFRGNFVNVIRVAPSKAIELFAFDTANKFLTPKSGEERKIPVPPSLVAGAFAGVSSTLCTYPLELIKTRLTIQRGVYDNFLDAFVKIVRDEGPTELYRGLTPSLIGVVPYAATNYFAYDTLKKVYKKVFKTNEIGNIPTLLIGSTAGAISSTATFPLEVARKHMQVGAVGGKKVYKNMLHALLSILEDEGVGGLYRGLGPSCMKLMPAAGISFMCYEACKKILIEEEENE

SEQ ID NO: 3029 - DNA, 909 bp, Sorghum bicolor
atgaatgtccgagatgatactccaaagccacatttcgtcttggttccgttcatggcgcaaggccacaccattcccatgattgacatggctcatctccttgcaaaacatggtgccatggtcagcttcatcaccacccctgccaacgcatctcggatagagtccaccattgacagggcaagagagctgaaccttccaatccactttgtagccctcaagctccactgcgttgaggtaggactacccgaaggctgcgagagtgttgacaaagtcctaggtaaagagcaggtcaagatgcttgtcgacgcctacagcatgttatacaagcccctcgtgtcatatctccatgcccagagcaaccctccttcctgcataatatcagacctgtgccagccatggacaggggatgttgcaagggatcttggcatccccaggttgatgtttaatggcttctgtgccttctcctccctctgcaggtacatcatccatcaggagaagatttttgaggatatatctgatgacaataggctaattgtgctccctgggtttcctcattgccttgagtgcgaaaatcctatagaggaggaacggagagctgatggtgtggtcacaaatagcttcgatgagcttgaaccattgtaccatgaggcctaccagatgaaaataggcaagaaagtttggtcccttgggccaatgttcctctgcaatactgacatggatgcaatggaatccaggggtgataagacatcagttgatgggaagcattgcttgcaatggcttgactccatgaaacctgggtcggttctttatgtcagttttggaagcatggctcgtactatgttttcacagatcgaagagatcgcattgggcttagaggcttcaaagagaccatttcttgttttatctccctag

SEQ ID NO: 3030 - protein, 302 aa, Sorghum bicolor
MNVRDDTPKPHFVLVPFMAQGHTIPMIDMAHLLAKHGAMVSFITTPANASRIESTIDRARELNLPIHFVALKLHCVEVGLPEGCESVDKVLGKEQVKMLVDAYSMLYKPLVSYLHAQSNPPSCIISDLCQPWTGDVARDLGIPRLMFNGFCAFSSLCRYIIHQEKIFEDISDDNRLIVLPGFPHCLECENPIEEERRADGVVTNSFDELEPLYHEAYQMKIGKKVWSLGPMFLCNTDMDAMESRGDKTSVDGKHCLQWLDSMKPGSVLYVSFGSMARTMFSQIEEIALGLEASKRPFLVLSP

SEQ ID NO: 3031 - DNA, 1233 bp, Sorghum bicolor
atggatgctcttcctgttgaatcagaaagagaaagtcaaacagatagtcaccctttactcatggagcatgtgattggcatcccaagggatgatgttgcttctacatcaacacctcgtcgagacaacaatgatggcatggatcacttgcctcgtgattcagaaagttcttccggaacaactgctgcatataactctccgaatactcctatagcaagaagagatgataatcgccgtcgccgtcaacagagtctgaattctggcttctggatatcaattgaactagctgtaaatcttagccagattatagctgctatctgcgttctgtctgtgtcaaggaatgaacatcctcatgctccattgtttgagtgggtcattggttatacaataggttgtattgcaactcttcctcatctttactggcgctatctccagcgcaaccagctgcccactgtgcaaggatcaaatcagaactacgttccagacaacagctttgaaagtaattcttttactgggatttcgccccctcatgtgtctgaagctggtgttgtaactgtaacaaatggagtctcgagaaacaatacggttaccacaaatccaagggctcaagctttcgctgatcacttcaagatggctctggactgtttcttcgctgtatggtttgttgtcggaaacgtgtgggtatttggtggacattcttcttcccatgatgcacccaacttgtacaggttgtgtatagccttcctcaccttcagctgcattggctacgctatgcccttcattctctgtgcgctgatatgctgctgcctaccctgcataatctccttaatgggtttccgggaagatctgaacgaaaacagaggtgctacttcagatgcaatcaatgccctgggcacatacaagttcaaaacgaagaagcctcgtaacacagagggaaatgaaggcggcggtggagtctttgctcctggaacagacaaggaacgagctgtttctgctgaagatgctgtttgctgtatctgcttggcgaggtatgtagataacgatgatctccggttgctcccctgcgggcacttcttccataaggactgtgtcgacaaatggctcaagataaatgcactatgcccactctgcaaagctgagatcgacatcgtcccgacaactgctcctccagccatcggatttgggcgccgccacagtgacaacagggtaggaaacgacattgaatcacaacggtaa

SEQ ID NO: 3032 - protein, 410 aa, Sorghum bicolor
MDALPVESERESQTDSHPLLMEHVIGIPRDDVASTSTPRRDNNDGMDHLPRDSESSSGTTAAYNSPNTPIARRDDNRRRRQQSLNSGFWISIELAVNLSQIIAAICVLSVSRNEHPHAPLFEWVIGYTIGCIATLPHLYWRYLQRNQLPTVQGSNQNYVPDNSFESNSFTGISPPHVSEAGVVTVTNGVSRNNTVTTNPRAQAFADHFKMALDCFFAVWFVVGNVWVFGGHSSSHDAPNLYRLCIAFLTFSCIGYAMPFILCALICCCLPCIISLMGFREDLNENRGATSDAINALGTYKFKTKKPRNTEGNEGGGGVFAPGTDKERAVSAEDAVCCICLARYVDNDDLRLLPCGHFFHKDCVDKWLKINALCPLCKAEIDIVPTTAPPAIGFGRRHSDNRVGNDIESQR

SEQ ID NO: 3033 - DNA, 1935 bp, Sorghum bicolor
atggcggacggccaccacttcaacaatatctcactcggcggccgtggcggcggcaaccctgggcagttcaaactttactccggaggcttggcatggaagaagcaaggaggaggaaagatcattgaggttgataaaggtgatatcacttctgtggcttggatgaggattcctaaatcttatcagcttagcgttggaacaaaggagggcctctgttacagattttttggctttcgtgaacaggatgttagtagcctgactaatttcatagagaagagcactggaatcacaccagaagagaagcaactttctgttactgggcataattggggcggaatagaaataaatgggagtatgctttgctttaatgttggttcaaaggaagcgtttgaagtctctctagcagatgtggcacagactcagatgcaagggaaaacagatgttgtcctagagttccatgtagatgatactactggggcaaatgagaaagattctttgatggatttaagtttccatgttccgacttcaaatacgcaattcgttggagatgagcatcgtacttcagctcagatgttatggcaggctatctcggttgaaattgatggtggtggctcatcagagatggctgttgttacatttgatggaattgcaattcttacaccaaggggtcgatacagtgttgagcttcatcagtcattcttgcgactccaaggacaagctaatgatttcaaaatccaatatagtagtattcttcgcctatttgttttaccaaagtcacacaatccacatacctttgtggttatcacacttgatccaccaattcggaaagggcaaactttatatcctcacattgttattcagtttgagacagaggcagtggttgaaagggaactggcattaagtggtgaggttttggctgagaagtacaaggataggcttgagagctcttacaggggtctaatacatgaggtattctccaaggtccttcgtggcttatctggtgctaaagtgacaaggccaagtacattccgcagttgccaagatggatatgcagtcaaatcatcacttaaagctgaagatggtttgctttatccactcgaaaagggcttcttctttctgccaaagcccccaacactaattcctcatgatgagattgagtatgttgagtttgagcgtcatggtgctggaggtgcaagcatatcatctcattacttcgaccttttggttaagctcacaaatgatcaagaacatctcttcagaaacatccaaaggaatgaataccataacctcttcaacttcatcagtggtaagcatttgaaaattctgaatcttggagatggccaaggtagaactagtggtgttactgctgttcttcagagcacggatgatgattctgttgatccacatctggagcggataaaaaatcaggctggtaatgatgaaagcgatgaagaggatgaagattttgtggcagacaaggacgatagtggatctccaacggatgattctgatgcggatggctctgatgctagtatgagtggaggagacaaggagaaaccttccaagaaggaagctagtagctcaaaggaagctagtagctcaaagccgcctgtgaagaagaagcagaagagtgggcctgatgaaggttctcaaaaaaagaggccaaagaagaagaaagatcccaatgcccctaagagagctatagccccattcatgtacttctcaaaggctgagcgagctaatatcaagagcagcaatcctgaactggctaccacagagattgcaaagaagctcggagaaaggtggcaaaagatgacagctgaggagaggcagccatatgtggagcagtcccaagtcgacaagcaacgctatgcagaagagtctgcagcttaccgtggtgcagccgctcagcagggctctggtgctggatcggaatga

SEQ ID NO: 3034 - protein, 644 aa, Sorghum bicolor
MADGHHFNNISLGGRGGGNPGQFKLYSGGLAWKKQGGGKIIEVDKGDITSVAWMRIPKSYQLSVGTKEGLCYRFFGFREQDVSSLTNFIEKSTGITPEEKQLSVTGHNWGGIEINGSMLCFNVGSKEAFEVSLADVAQTQMQGKTDVVLEFHVDDTTGANEKDSLMDLSFHVPTSNTQFVGDEHRTSAQMLWQAISVEIDGGGSSEMAVVTFDGIAILTPRGRYSVELHQSFLRLQGQANDFKIQYSSILRLFVLPKSHNPHTFVVITLDPPIRKGQTLYPHIVIQFETEAVVERELALSGEVLAEKYKDRLESSYRGLIHEVFSKVLRGLSGAKVTRPSTFRSCQDGYAVKSSLKAEDGLLYPLEKGFFFLPKPPTLIPHDEIEYVEFERHGAGGASISSHYFDLLVKLTNDQEHLFRNIQRNEYHNLFNFISGKHLKILNLGDGQGRTSGVTAVLQSTDDDSVDPHLERIKNQAGNDESDEEDEDFVADKDDSGSPTDDSDADGSDASMSGGDKEKPSKKEASSSKEASSSKPPVKKKQKSGPDEGSQKKRPKKKKDPNAPKRAIAPFMYFSKAERANIKSSNPELATTEIAKKLGERWQKMTAEERQPYVEQSQVDKQRYAEESAAYRGAAAQQGSGAGSE

SEQ ID NO: 3035 - DNA, 1164 bp, Sorghum bicolor
atgaccaccgaccgtctcctccactttctccgagcgccgacaggctctccggctgcggcccctacccgcgcggctcgccggggtcctctacaggcgcagggcgtccacttctgtcagggagctgcggtgatgcggcgcgcgtccctgtcctgctcgggcactagctctggccgggaggggggactgacgtacaaggatgctggcgtggacatagacgccggcgccgagctcgtgcgccgcatcgccaagatggcacccgggattggcggcttcggcggtctcttcccctacaatgacgattatcttgttggtagcaccgacggggtggggacaaagctgaagcttgctttcgaaactggcattcatgacacaatcggcattgacctggtggcaatgagcgtcaatgacattgtaactttaggtgcaaaaccattgttcttcctagattactatgcgacgagcaagcttgatgttgatcttgcagagaaggttatcaaggggattagggatgggtgtgaacaatcagattgtgctctcctaggaggggagacagcagaaatgcctggtttctatgcagagggtgaatatgatctaagtggttttgctgtgggtgttgtgaagaaggataaagtcattgacggaaaaaacattgttaagggagatgtccttataggtcttccttccagtggggttcattctaatgggttctctcttgttagaagggtactggagaaaagcggactttccttgagtgaccagctcccaagaaatgatggcataacaactactgttggtgaagctctaatggcaccaactgtcatctatgttaagcaggtgcttgagattattaagaaaggtggtgtgaaaggactagcccacatcactggtggtggttttactgacaatatcccaagagtatttccttctggactcggggcaaagatttttactgggtcatgggaagtgcctcctgtcttcaactggcttcaacaggctggaaacattgatgatgcagagatgcggcgaacattcaatatgggaattggaatggttcttgtggtaagcagagagtcagcggacagaattatcgaagacacccatgggtcaaatcatgcttatcacattggagaggtgatcgagggtgacggggttcagtatgtctga

SEQ ID NO: 3036 - protein, 387 aa, Sorghum bicolor
MTTDRLLHFLRAPTGSPAAAPTRAARRGPLQAQGVHFCQGAAVMRRASLSCSGTSSGREGGLTYKDAGVDIDAGAELVRRIAKMAPGIGGFGGLFPYNDDYLVGSTDGVGTKLKLAFETGIHDTIGIDLVAMSVNDIVTLGAKPLFFLDYYATSKLDVDLAEKVIKGIRDGCEQSDCALLGGETAEMPGFYAEGEYDLSGFAVGVVKKDKVIDGKNIVKGDVLIGLPSSGVHSNGFSLVRRVLEKSGLSLSDQLPRNDGITTTVGEALMAPTVIYVKQVLEIIKKGGVKGLAHITGGGFTDNIPRVFPSGLGAKIFTGSWEVPPVFNWLQQAGNIDDAEMRRTFNMGIGMVLVVSRESADRIIEDTHGSNHAYHIGEVIEGDGVQYV

SEQ ID NO: 3037 - DNA, 714 bp, Sorghum bicolor
atgagccgagacgagccgagccgaggaagcggggggcctggcactagcaggaggtcggcggagggagcaatggcggaatctagcgggtacgggtccgtgtcggtggacgtcgagcggatctccttcggcggcaaggagcatcttgtgaggacgagatgtggttctgtaaccgttgctgtgtatggagacgaggacaagcctgcgcttgtaacatacccggatgtaggtctgaattacatgtcctgtttccaaggattgttcttctgcccggaagctgcgtctttgctgctccacaatttctgcatctaccacatcaatcctcaggggcacgagttgggagcagctccgatatcatcagatgttccggtgccaactgtggatgatctcgctgatcaagttgcagatgtgcttgatttcttcagtttaggatctgtgatgtgccttggtgtcacggctggtgcatatgttctcactctctttgcgacgaaatatcgggagagggtaataggactgatgctggtttcccctctgtgcaaagccccatcgtggagcgaatggctgtataataaagtattgttaaatttgctttattattacgggactcaaggcctggtcaaggagtgcttgcttcaacgttactttagcaaggtaaggttcagatctcaatattctcatcttgttttattgggactaatagtttatagttttcattaa

SEQ ID NO: 3038 - protein, 237 aa, Sorghum bicolor
MSRDEPSRGSGGPGTSRRSAEGAMAESSGYGSVSVDVERISFGGKEHLVRTRCGSVTVAVYGDEDKPALVTYPDVGLNYMSCFQGLFFCPEAASLLLHNFCIYHINPQGHELGAAPISSDVPVPTVDDLADQVADVLDFFSLGSVMCLGVTAGAYVLTLFATKYRERVIGLMLVSPLCKAPSWSEWLYNKVLLNLLYYYGTQGLVKECLLQRYFSKVRFRSQYSHLVLLGLIVYSFH

SEQ ID NO: 3039 - DNA, 699 bp, Sorghum bicolor
atggctcccaagcgccgccgcgcggatcagggctcgccggtgccggcgccacctcctgctttgcggacggcaaaacttcagccggtggtcgtcttcgcccacggcgccggtgctccttcctcttccgactggatggtccattggaagaagatggtgcatgacgcattggatgctgtcgacgtagtgacctttgactacccatatatgtcgggtgggaagcgcagggcgccgccaaaggcagagaagcttgttgatcaccacctgggcatcgtgaaggatgctgctggcaagtatcaggggcaccctcttattttgatggggaagtccatgggatcgagggttagctgcgtggtggcaagctccactgacattgatgtttctgctgttgtttgcttgggttacccactaaagggagtgaatggagcagtgagagatgagacactcttacagctgaaggtaccaacgatgtttgttcagggaagtaaagatgccctgtgccccttagataaacttcagtctactcgcaagaagatgacctgcaagaatgaactgcatgtcattgatggtggtgaccactcatttaaggtcggcaaaaaatacctagagtctagagggttaaaccaacatgatcttgaaatggaagctgttaaagcaatttcgcaatttgtccagaactccataactccgaactgtacctag

SEQ ID NO: 3040 - protein, 232 aa, Sorghum bicolor
MAPKRRRADQGSPVPAPPPALRTAKLQPVVVFAHGAGAPSSSDWMVHWKKMVHDALDAVDVVTFDYPYMSGGKRRAPPKAEKLVDHHLGIVKDAAGKYQGHPLILMGKSMGSRVSCVVASSTDIDVSAVVCLGYPLKGVNGAVRDETLLQLKVPTMFVQGSKDALCPLDKLQSTRKKMTCKNELHVIDGGDHSFKVGKKYLESRGLNQHDLEMEAVKAISQFVQNSITPNCT

SEQ ID NO: 3041 - DNA, 1770 bp, Sorghum bicolor
atgttaagaagtagaagtctacagaaagagttcaggagcgaagtgtcaaaccaaggtgcattagacatcgaggatttggcacgaatagggaagaagattggaacttgtccctactatggttcgcgtgacatgatccgctcagctgaccttgtagtccttccttatcaatctttgttactcaagtctgctagagaatcacttggccttaatctgaagaacagtgttgtcatcatagatgaggctcataacttagctgattccttgactaacatgtacaactcaaagatcacgtcttctcagttgaagacagtcctttcccacctggatgaataccttaacagatttcacaatgttttgggagctgcgaatcgacgatacatccagaccttgacagttttaacaaggtctttcctacgtgttttgatcaataagcaagatggtgccagcaatatgtcttctatgaccataaaccaattcttgttttcccttgacattgataatataaacatagtaaaactttgtcagtttgtgaaagaaagcaatataatccacaaggttagtggatatgcaaacaagttaactagcatccaaaatcagtttgatatccagctccatgatgaaggaagcagtatagcatgccttcaggcattggttgactttatacgctcccttctgaacagcaataacgatggaagaatcatagttgcaaagcaaaagctaggtggacaacctgatgaagcatatcttaaatttgtgatgctttgtgcagaaaaaatattttccgaggttacacaggatgcttatgctgttatcctggctggtggaaccctccagcctattgaagaaactaggctacgcttgtgtccaagcttaccaccaactgatataaaattcttcacttgcaaccatattgttcctcctgagagtattcttccaatagcagttacacgtggaccctcaggcatgacatttgatttcagctacaattcaaggagctctccttctatgattgaagagcttgggcgtttcatttgtaatattataacagttgtgcctgagggagttgttatgtttttttcttcatatgattatgaaaggcgtgtatatgatgcatggatgaccgcaggcacaatttccaagatttctaaaaagaagcatgttttcagagagccaaggaacagtgctgatgttgagggtgtcctcaacaaatacaaggagacaattgaatcctgtagtaaaatttcccaagacacaggtgtcaatggggcacttctattagccgttgttggtgggaagatttctgaaggcataaacttcagcaatgggatgggtcgttgtgtaataatggttggcttgccttatccaagtccatctgatgttgagctgatagagaccataaagcatatcgaaagtatttctagctcatttttggttggagatgataaggcctcaagcagaaaatatgatgatgaatgtgaactccagcctggttatgatatatttcgtaagtgcactagaggtggaagagagtattatgagaacttatgcatgaaagctgtgaatcaatctattggcagagcaatcaggcacataaatgattatgctgcaatgctattggttgactcacgttatgcacagacttcatcaaccaagaatttttcctgccctactgataagcttcctcaatggataaaagcacgactctcttgtgctcaaaactatggagaagttcatagatcattacatcagttcttcaaattcaataaacaa

SEQ ID NO: 3042 - protein, 590 aa, Sorghum bicolor
MLRSRSLQKEFRSEVSNQGALDIEDLARIGKKIGTCPYYGSRDMIRSADLVVLPYQSLLLKSARESLGLNLKNSVVIIDEAHNLADSLTNMYNSKITSSQLKTVLSHLDEYLNRFHNVLGAANRRYIQTLTVLTRSFLRVLINKQDGASNMSSMTINQFLFSLDIDNINIVKLCQFVKESNIIHKVSGYANKLTSIQNQFDIQLHDEGSSIACLQALVDFIRSLLNSNNDGRIIVAKQKLGGQPDEAYLKFVMLCAEKIFSEVTQDAYAVILAGGTLQPIEETRLRLCPSLPPTDIKFFTCNHIVPPESILPIAVTRGPSGMTFDFSYNSRSSPSMIEELGRFICNIITVVPEGVVMFFSSYDYERRVYDAWMTAGTISKISKKKHVFREPRNSADVEGVLNKYKETIESCSKISQDTGVNGALLLAVVGGKISEGINFSNGMGRCVIMVGLPYPSPSDVELIETIKHIESISSSFLVGDDKASSRKYDDECELQPGYDIFRKCTRGGREYYENLCMKAVNQSIGRAIRHINDYAAMLLVDSRYAQTSSTKNFSCPTDKLPQWIKARLSCAQNYGEVHRSLHQFFKFNKQ

SEQ ID NO: 3043 - DNA, 2430 bp, Sorghum bicolor
atgcctcggtttcttgcaactctcctttctactgcttccatcctctctttcattgctctactcccaagagttgcatcccgtgacactctatcactgggttcctctctcagagttgaatcctacgaaaccagcatcttacaatcatcagatgggaccttctcctctggcttctaccaagtctatactgatgccttcacattctcgatatggtactcaaaggcagccaacaagaccattgtctggagtgcaaaccctgaccatcctgtccatgccaggaggtcggctataaccttgcacaaggatggcaacatggtactgacggattatgatggcgcagtcatgtggcaagctgatggcaacttcacggatgttcagcgtgctcggctcttgaacactgggaatctcatcattgaggactcaagaggtaacactgtctggcaaagttttgattcaccaacagacactttcctgccaacacagctcatcactgctacaaccaaattagtccctacaactcaatcgcatagtcctggtaactatatcttccgtttcagtgacctttcagtactatcgcttatatatgatgtgcctgaagtttcagacatatactggccagaccctgatcaaaatctctaccaggatggtcgaaaccagtataacagtacaaggttaggagtccttagtcatagtggggtccttgcatcgagcgactttgctgatggtcaaccacttgtggcctctgatgcaggaccagacattaagagaaggctaactcttgaccctgatggtaatctccgcctgtatagcctgaatagttcagatgggtcatggtcagtttcaatggcagcaatgtcccaaccttgcaatattcatggtttatgtggtcctaatggaatctgccattactcacctaaacctacatgttcatgcccaccaggttatgagatgagaaacccaggtaactggactgaaggttgtatggctattgtcaacataacctgtgatcactatgacaacaaatctatgaaatttgtgaaacttccaaatacggatttttgggggtcagatcagcaacatcgtttgtcagtttctcttcaaacttgcaagaatatttgcatcagtgactgcacctgtaaaggctttcaatatcaggaaggtacaggatcatgctatccaaaagcttatcttttcagcggaagaacctacccaacatctgatgtacgaacaatatatctcaagcttccaacaagggttaatgttttaaatgtccctattccacggtccaatgtgtttgattctgtgccccatcaccttgactgtgatcagatgaacaaaaacatcagtgaaccatttccaaatgtgcataagaccagtagaggagaatcaaaatggttttacttctatgggttcatagctgcattttttgttgttgaagtttccttcatttcatttgcatggttctttgttttgagaagagaacttaagccatcagaattatgggcagctgaggaaggttacaaagtaatgactagtaattttagaagatatagttacagagaacttgtgaaggcgaccagaaaatttaaagttgagctaggaaggggagcatcaggcactgtgtacaaaggcctcctagaagatgataggcaagtggctgtgaagaagttggaaaatgtaaaggaaggcaaggaagtgtttcaagctgagctaagtgtaattgggaggatcaaccacatgaaccttgtgaggatatggggcttttgttcagaaggatctcataggttgttggtctctgaatatgttgagaatggatcactggctaacattttgttcaatgaaaaaagtaatatcttattggactggaagggaaggttcaatattgcgttaggtgttgcaaaagggttagcctatcttcaccatgaatgcttagagtgggtcatccattgtgatgttaaacctgagaacatactgttagaccaaacttttgagcccaagatcactgactttgggttggcaaagttactaaacagaggaggttccacccagaatgtatcccatgtaagaggaacactaggttacattgcacctgagtgggtttccagtctccccatcacagcaaaagttgatgtatacagttatggggttgtgcttcttgagctagtgacaggcactagagttttggagttggtggaaggtccagatgaggtgcataatatgcttagaaagcttgtcaggatgctttctgctaaactggaaggggaggaacaatcgtggattgatgggtttgtggattcaaaattgaatcgtccagtcaactatgtgcaagcaagaacactaatcaaattggcagtttcctgcttggaggaagacagaagcaaaagaccaacaatggaatatgcagtccagaccctcctgtcagctgatgactga

SEQ ID NO: 3044 - protein, 809 aa, Sorghum bicolor
MPRFLATLLSTASILSFIALLPRVASRDTLSLGSSLRVESYETSILQSSDGTFSSGFYQVYTDAFTFSIWYSKAANKTIVWSANPDHPVHARRSAITLHKDGNMVLTDYDGAVMWQADGNFTDVQRARLLNTGNLIIEDSRGNTVWQSFDSPTDTFLPTQLITATTKLVPTTQSHSPGNYIFRFSDLSVLSLIYDVPEVSDIYWPDPDQNLYQDGRNQYNSTRLGVLSHSGVLASSDFADGQPLVASDAGPDIKRRLTLDPDGNLRLYSLNSSDGSWSVSMAAMSQPCNIHGLCGPNGICHYSPKPTCSCPPGYEMRNPGNWTEGCMAIVNITCDHYDNKSMKFVKLPNTDFWGSDQQHRLSVSLQTCKNICISDCTCKGFQYQEGTGSCYPKAYLFSGRTYPTSDVRTIYLKLPTRVNVLNVPIPRSNVFDSVPHHLDCDQMNKNISEPFPNVHKTSRGESKWFYFYGFIAAFFVVEVSFISFAWFFVLRRELKPSELWAAEEGYKVMTSNFRRYSYRELVKATRKFKVELGRGASGTVYKGLLEDDRQVAVKKLENVKEGKEVFQAELSVIGRINHMNLVRIWGFCSEGSHRLLVSEYVENGSLANILFNEKSNILLDWKGRFNIALGVAKGLAYLHHECLEWVIHCDVKPENILLDQTFEPKITDFGLAKLLNRGGSTQNVSHVRGTLGYIAPEWVSSLPITAKVDVYSYGVVLLELVTGTRVLELVEGPDEVHNMLRKLVRMLSAKLEGEEQSWIDGFVDSKLNRPVNYVQARTLIKLAVSCLEEDRSKRPTMEYAVQTLLSADD

SEQ ID NO: 3045 - DNA, 348 bp, Sorghum bicolor
acagcccacaagataaaaaatattaagacaagatttcctgcagttgtgaagcaaataaatgacttcaatgtaatagcaaaaggtttactagcagtccctgctcaaaatataaataagactattggagaaccgtcgttattgctaaaggttggtgaggcaaaagtatatggaagagatgatgtcaagtgtaatatcatttgtctaggtggatgtggcaaaactaatttggccagatacatcttggtaaaggaacactttgatgttacattctgggttcatgtgactcaagaattcaacatggaaaagctcattggaaaactctatgaagcagttgctgatgagaagtga

SEQ ID NO: 3046 - protein, 115 aa, Sorghum bicolor
TAHKIKNIKTRFPAVVKQINDFNVIAKGLLAVPAQNINKTIGEPSLLLKVGEAKVYGRDDVKCNIICLGGCGKTNLARYILVKEHFDVTFWVHVTQEFNMEKLIGKLYEAVADEK

SEQ ID NO: 3047 - DNA, 480 bp, Sorghum bicolor
atgtacaaagccagagaggatgataatccaaaagatcatgtaaaatcccagtccaattctgttgaagacattccaattacaaatggagtgaagaagcactaccgagatggagcttttgttgaagcaagttccttttctgcatcttcaggtcacgatgaaatgcaaatgctcaagtcagagatgcaagatcatggatttcattatatgccacctaggaaaccaaggaaatcagatggttatcttcgttataggaggaagcggctaagcggtggctttgtttatgttgcacatgctgattattacatgttgctacgtgcttttgcaaagcttgcagaaattgatattcgtatcatgcatattagtgtgttaaaacttgagaggagactcgcatgtattgaggagcaaattgagagaagcttgaacaccttacagaacttttctactgcaacaggagatgagctaagatctgtatctgactga

SEQ ID NO: 3048 - protein, 159 aa, Sorghum bicolor
MYKAREDDNPKDHVKSQSNSVEDIPITNGVKKHYRDGAFVEASSFSASSGHDEMQMLKSEMQDHGFHYMPPRKPRKSDGYLRYRRKRLSGGFVYVAHADYYMLLRAFAKLAEIDIRIMHISVLKLERRLACIEEQIERSLNTLQNFSTATGDELRSVSD

SEQ ID NO: 3049 - DNA, 183 bp, Sorghum bicolor
ttaccgctgaggcctttggatttgatcactcacaagacactgaaaccgagaatgttggatttagcaattaacatttgcaggctaattctttgtaacaatcccctttgccagtttgacagtagtcaaaaccatcatctacaagaaatatttccgggcaacaaaagtagcaatatgacttggtaa

SEQ ID NO: 3050 - protein, 60 aa, Sorghum bicolor
LPLRPLDLITHKTLKPRMLDLAINICRLILCNNPLCQFDSSQNHHLQEIFPGNKSSNMTW

SEQ ID NO: 3051 - DNA, 1506 bp, Sorghum bicolor
atggggaaggcgcagtggttgagcgtcgcgttgggctgcgtggcggcggtgacgtgcgcggtggcgacgacgctggtagcgaggcgggcggtggcgcggtatcggtggagcagagccgtggcggtggtgcgcgggttcgaggaggattgcgccacgcccacggagcggctgcagcggatcgtcaactccctgtccgtcgagatgttcgcgggcctcgcgtcggagggcgccagcaaggtccggatgctgctcacctgcgtcgacgcgctgcctgacgggagtgaggaaggcatctattactctgttgatcttggggggacaagcttcagagtcatgaaactagagcttggttcaggatctatggttatcaataaaaaagttgagcatcaacctattccagaagacttgaccaagggtacaagcgaggatttatttaatctaattgccttggcattaaaaaactttattgaaagagagggtggaggcgatgagggaagggcacttggttttacattttccttccctgtcagacaagtgtccatatcctcagggtcattaattaggtggactaaggaattttcaattgaagaggctgttggaagagatgttgctcaatgcttaaatgaagcccttgttaggaatggactgaatttgcaggttactgcattggtgaacaatgctgtgggtacattggctatggggcactattatgatgaggatacagttgctgcagtgattataggagctggtaccaatgcttcctatattgaacgcaatgctgctatcccaaaaagtcagggccttcttaccaactctgacataacggttgtaaatgtagaatggggtagtttccggtctccacaaataccattaactccatatgacatatgttccagtgaagctgaacgcaatcactatgaccaagcttttgagaaaatgatctccggtgtgtatcttggagaaattgcaagattggtattccaaagaatggctcaagaatcggatttatttggttcttttgtgaattgcttatctacccctttcatattgagtacaccttctctagctgctattcgtgaggatgattctccagatcttagagtagttggcaaggtgctcgaagaacatctgaagatacaagatgttccactgaagactcggagacttgttgttagaatatgtgacattgtcacccgaagggctgctcgtctagcagctgctgggattgttgcaatactacaaaaaattggtcgtgatggaactctttgtggcaccacctttgttagaaagataagaggcgaggcaaagagatcggttgtcgcgattgaaggcggtctctaccaaggctattcagtctttagggagtatctaaatgaagctgtggatgagatcctaggggaggagcttgcccccacagttagtcttagagttatggaggagggttcagggattggggctgcactccttgcagcatcatattcgtcaactagaaaaaattttgtgtag

SEQ ID NO: 3052 - protein, 501 aa, Sorghum bicolor
MGKAQWLSVALGCVAAVTCAVATTLVARRAVARYRWSRAVAVVRGFEEDCATPTERLQRIVNSLSVEMFAGLASEGASKVRMLLTCVDALPDGSEEGIYYSVDLGGTSFRVMKLELGSGSMVINKKVEHQPIPEDLTKGTSEDLFNLIALALKNFIEREGGGDEGRALGFTFSFPVRQVSISSGSLIRWTKEFSIEEAVGRDVAQCLNEALVRNGLNLQVTALVNNAVGTLAMGHYYDEDTVAAVIIGAGTNASYIERNAAIPKSQGLLTNSDITVVNVEWGSFRSPQIPLTPYDICSSEAERNHYDQAFEKMISGVYLGEIARLVFQRMAQESDLFGSFVNCLSTPFILSTPSLAAIREDDSPDLRVVGKVLEEHLKIQDVPLKTRRLVVRICDIVTRRAARLAAAGIVAILQKIGRDGTLCGTTFVRKIRGEAKRSVVAIEGGLYQGYSVFREYLNEAVDEILGEELAPTVSLRVMEEGSGIGAALLAASYSSTRKNFV

SEQ ID NO: 3053 - DNA, 1437 bp, Sorghum bicolor
atgaaaatggcgcacttgatcactaactgtagtttcagtacatctcctgctgttcagacattctccagttctcctaattactgccgcagtgttggccaattacagaactcaaaatcttcaaatttatccctcaaatcttgttccaggagacaaaagaagtcatatgtttcctgtgctagtgcagccgtacaaggacagacacaaacacctcttactggtagccagcaagcttatgagcattcatcctccaaacctaaaaaggtaatggttattggtggagatggatactgtgggtgggcaacagctcttcatctctcaaacaaaggttatgaggttgctattgttgataatcttgttcgccgtctttttgatcaccaacttggtcttgattcccttacccccataacttcaatccaaaatcgtgtccgtagatggaagtctctcactggtaagacaattcagctctttatcggtgacatatgtgattttgaattcctctcggaagctttcaagtcttttgagccggatgctgctgttcactttggtgagcaaagatccgcaccatactctatgattgatcgttcgcgggcagtctacacgcagcataacaatgtcattgggacacttaatgtcttgtttgccataaaggaatacagtgacgagtgccatttggttaagctaggaactatgggtgagtatggaacaccaaacattgacattgaagaggggtttatcactattactcacaatggaagaacagacaccttgccttatccaaaacaagcgagttctttctaccatctaagcaaagtgcatgactcccacaacatagcatttacctgcaaggcttggggtataagggccacagatcttaaccaaggtgtggtctatggggtcagaacagatgaaactgcactgcatgaagagctatctaacagatttgactatgatggcgtctttgggacagcactaaataggttctgcgttcaggctgctgtagggcatccacttacagtttatggaaaaggtggtcagacccggggatatctggacatcagagacactgtacagtgcgttgagctagcaatagccaacccagccaaacctggcgagttcagagtcttcaaccagttcactgagcaattctctgtcaatgagctagccaaactggtgacagccgcaggagcgaagcttggtctagaagtgcagaccaaatcggtgcccaacccacgagtcgaggctgaggagcactattacaacgccaagcacacgaagctcattgagctcggcctggtgccccacctgctctcagactccctgcttgactcgcttctcaactttgccatccaatacaaggatcgggtcgacacagcacagatcatgccaagcgtgtcatggaagaagatgggtgccaagccacggacagtctctgtttag

SEQ ID NO: 3054 - protein, 478 aa, Sorghum bicolor
MKMAHLITNCSFSTSPAVQTFSSSPNYCRSVGQLQNSKSSNLSLKSCSRRQKKSYVSCASAAVQGQTQTPLTGSQQAYEHSSSKPKKVMVIGGDGYCGWATALHLSNKGYEVAIVDNLVRRLFDHQLGLDSLTPITSIQNRVRRWKSLTGKTIQLFIGDICDFEFLSEAFKSFEPDAAVHFGEQRSAPYSMIDRSRAVYTQHNNVIGTLNVLFAIKEYSDECHLVKLGTMGEYGTPNIDIEEGFITITHNGRTDTLPYPKQASSFYHLSKVHDSHNIAFTCKAWGIRATDLNQGVVYGVRTDETALHEELSNRFDYDGVFGTALNRFCVQAAVGHPLTVYGKGGQTRGYLDIRDTVQCVELAIANPAKPGEFRVFNQFTEQFSVNELAKLVTAAGAKLGLEVQTKSVPNPRVEAEEHYYNAKHTKLIELGLVPHLLSDSLLDSLLNFAIQYKDRVDTAQIMPSVSWKKMGAKPRTVSV

SEQ ID NO: 3055 - DNA, 1608 bp, Sorghum bicolor
atgggatctgggagcagcaaggccaccaccacctcctcctcctcctcctcctcctcgtcatcgcgcacgttggcggaggcggcgggcggcgaggttaagaggccgaatgggagcgggaaggggaggagggggaggagccttttgccgagctcctcctgcttccgtggctccacgacgccgccgtgcgaaggcgacgcttccgcagcaccggtggacgtcgagtgtaacaagggaggggagactgcaagcctgccttcactcactcacactgcaaagtctgatgaagatgttcttgcaatgcctaagtcttatcccggcgaaggggtagcagtaccttcatcagatagtgaaagagatcaagatgatgatgtgctacagaatgctgctgccactagcacatcaacagcggccaatcaattgccaaatccttctgggaggtcaaggccacgttttggtgtcaactttgggttgagtagagctgtcagcttgggatcatcagcagcctgctctattctgtcatctggcctcccgacttctgctaatccaggtgaaggtcggagagatgtggatgactcttctgatacaggcatctcccagcagggtactgcaccgactgctgggattgattcgactctggatatgcttagagatagtgtcacggcacaagctagagcagctcgtcaggctaggagaaatctgctagaatctgaagatgctagcttgaggagctcctacagaaggatggggtctcaggaaccttttgaaggcagtgttcggtttagccgaacattaagtgttgggcggcttcgggacagagttctcaggcggcctccattctcagatgggctattcaccccttcgcttctttatgatagggcagtatggccatctggaaacgctagtgctaggcaagattcagcagtaatgcaaaggactaattcagacaggagttcagaaccgcgatctgatccttcaaccaacgatatgtacaacttgagctctgagaggcaggccagtaatagcgacctactggagcgcagatcagcttttcttgagaggaggaggaggatacgatctcaggtcagagctctgcaaaggttgggcagcaggtttgaaaatttatcaggtcatgagaggtcctgcatattatccggtcagcatagaacaggaaattgcaactgcagaacaggtagtcgacaaggcaatcctgatgaagaaactagcacaagggctagcatatcgagaattgttatgttagcagaagcactttttgaggttcttgatgaaattcaccaccaatctgctgcattatcgtcatcaagaccatcgttttcttcaattggatccgttcctgctccaagggagattgttgagcgtcttcctgcaaaagtgtataggaaaccgttgaaataccagagcgatgaagctgcacaatgctatatttgccttgttgaatatgaagagggagattgtctccgtatacttccatgccatcatgaatttcatctaacatgtgtagataaatggctaaaggagattcacagggtttgtccactttgtcgtggcgatgtctgcagatctgatgcaccgagtagaaaggtcagctga

SEQ ID NO: 3056 - protein, 535 aa, Sorghum bicolor
MGSGSSKATTTSSSSSSSSSSRTLAEAAGGEVKRPNGSGKGRRGRSLLPSSSCFRGSTTPPCEGDASAAPVDVECNKGGETASLPSLTHTAKSDEDVLAMPKSYPGEGVAVPSSDSERDQDDDVLQNAAATSTSTAANQLPNPSGRSRPRFGVNFGLSRAVSLGSSAACSILSSGLPTSANPGEGRRDVDDSSDTGISQQGTAPTAGIDSTLDMLRDSVTAQARAARQARRNLLESEDASLRSSYRRMGSQEPFEGSVRFSRTLSVGRLRDRVLRRPPFSDGLFTPSLLYDRAVWPSGNASARQDSAVMQRTNSDRSSEPRSDPSTNDMYNLSSERQASNSDLLERRSAFLERRRRIRSQVRALQRLGSRFENLSGHERSCILSGQHRTGNCNCRTGSRQGNPDEETSTRASISRIVMLAEALFEVLDEIHHQSAALSSSRPSFSSIGSVPAPREIVERLPAKVYRKPLKYQSDEAAQCYICLVEYEEGDCLRILPCHHEFHLTCVDKWLKEIHRVCPLCRGDVCRSDAPSRKVS

SEQ ID NO: 3057 - DNA, 2769 bp, Sorghum bicolor
atgtccgccgcttccaccgccacggccacccgcctcatcctcccgcgcccttcagtcccgttccgctccctcctcctttcccgccgccggggccgcctccgccgcgcgttccacgccagcgccgtcgccgctggcggcggcggaggaggcagcggggccggcgagggcgccgcgaaggagccgccgcggacgctgttccccggcgggttcaagcggccggagatccaggtgccggcgctcgtcctgcgcgtcggcgccgaggaggcgctgcggtgcggggatgaggtggccgccgccgtgtcccggggcgtggggatcgtcgtgctcgaggccggagaggagggcggtgggcgagcgtacgaggccgctcgcgcgctcagggccacggtcggggaccgcgcgtacctgctgatcgcggagcgcgtcgacgtcgcgtccgcagtcggggcgagcggcgtcgtgctcgctgacgatggcattcctgctattgttgcaaggagtatgatgatgaaatcaaatgctgactccatatatctccctattgttgctagaaggatacaatctgcaaactctgcaataagcgcttcaagttctgaaggggctgattttctgattgtaaatactggcactggtgattttacggatcttatgaatggtggtgttggtcaacatgtgaagattccgattttcttcacactgaatcatttgagtgaaggaacttattctgacttcacatccaggttgctccaatctggtgcatctggagttgttacatccttagctggtatgcaacttctcactgatgatcttataaaaaagtacttctcaaaagtggactcagctgaggaagtcccacgagcgagttactcttctgctgggatgctggaagatgttaataatgtaatggtcctaactcgcgatcgcgagaagactaaagttgctggatttacaaaattggatgaaaaagtgatgcagttgatagaaatagagaagcctattcttaatgaagctattgctattatccgcaaggcagcaccaatgatggaggaggttgagcttctagtggatgctgcttctcgcctgagtgagccatttttgttggttactgtgggtgaatttaactcaggaaagtcaacttttataaatgctttacttggaaggcagtatcttcaggagggagttgtgcctacgacaaatgagattacactactatcatattctgaggttgaatctgaaagctttgaacgatgtgagaggcatccagatggtcaattcatgtgctatttatctgttccaattttaaaggaaatgaatctagttgatacacctggaacaaatgttattcttcagaggcagcaacgactcactgaagaatacgtgccacgagctgatttgatactctttgtcctatcatcagatagaccattaactgaaagtgaggttggatttcttcagtatgtccagcagtggaagaagaaagttgtatttgttctaaacaaattggacctctatcggaacagcaatgagcttgaagaagctactgcatttgtcaaggaaaatgcaatgaaattgcttaacgcggaagatgtcacactgtttcctgtatcttcacgctctgctctggaagccaagctttcatattccaaaaacagtgacggaaagcatttgagggaagctatgtttagtgatcctagatggagaagcagcaatttttgtgaacttgaggattacttactgagtttcttagatagttcaacagaaaatggaaaagaaagggtccggctgaaacttgaaacaccaataggcattgcagatcgattgttaacttcatgtcaaagactcgtgaaactagaatatgaaaaggctgttgaagatttaacatccatcaaggatcttgtttatggtgcaaacaattatgccatcaaacttaagtctgatagcaattcctggcagaaccagatttcatctcttattgagagagcaaaaggtcgagcagtaacacttatgggatctacacttcagctgtcaaatattgaccttatttttacatacacggtcaaaggaaaaacaggcagttccacgagagccacatcatttgttcagaatgatattctgagtccaacccttgacgatgctgtgaatttactaggtgactactcgacatggttgagttctagcaatacccgtgaagcaaaagtatatttggagtgtttcagtgcaagatgggatgcactggttggtccagaagaaagggctctgttagatccaaatggacttgtcaatgaaggggagaaactcaccataaaggcactggatggcttcaacgccagtgctgctgccaaggtttttgaagaggaaatcagagaagtggcttttggaacatttggagggctaggtattgctggactgtcagcttctcttttgacatctgttttgtcaactactcttgaagatcttcttgctcttgcgctttgctcagctggcgggttttttgttttatcaagtttccctggtcgacggaagcttgcaatacagaaggttaacaaggctgccgatgaactctcgagaaaagttgatgaagctatccaaaaggatatctcacagagtgctaatgacctaatccgctttgttgaggtcatcagcaaaccttaccaggaagcatgccagcgaaaaatagattggttacagggcgttcagggtgagctatctgctgtcgagcgtaagctccaaactttgaaagttgaaatccaaaatcttcatggatcgtga

SEQ ID NO: 3058 - protein, 922 aa, Sorghum bicolor
MSAASTATATRLILPRPSVPFRSLLLSRRRGRLRRAFHASAVAAGGGGGGSGAGEGAAKEPPRTLFPGGFKRPEIQVPALVLRVGAEEALRCGDEVAAAVSRGVGIVVLEAGEEGGGRAYEAARALRATVGDRAYLLIAERVDVASAVGASGVVLADDGIPAIVARSMMMKSNADSIYLPIVARRIQSANSAISASSSEGADFLIVNTGTGDFTDLMNGGVGQHVKIPIFFTLNHLSEGTYSDFTSRLLQSGASGVVTSLAGMQLLTDDLIKKYFSKVDSAEEVPRASYSSAGMLEDVNNVMVLTRDREKTKVAGFTKLDEKVMQLIEIEKPILNEAIAIIRKAAPMMEEVELLVDAASRLSEPFLLVTVGEFNSGKSTFINALLGRQYLQEGVVPTTNEITLLSYSEVESESFERCERHPDGQFMCYLSVPILKEMNLVDTPGTNVILQRQQRLTEEYVPRADLILFVLSSDRPLTESEVGFLQYVQQWKKKVVFVLNKLDLYRNSNELEEATAFVKENAMKLLNAEDVTLFPVSSRSALEAKLSYSKNSDGKHLREAMFSDPRWRSSNFCELEDYLLSFLDSSTENGKERVRLKLETPIGIADRLLTSCQRLVKLEYEKAVEDLTSIKDLVYGANNYAIKLKSDSNSWQNQISSLIERAKGRAVTLMGSTLQLSNIDLIFTYTVKGKTGSSTRATSFVQNDILSPTLDDAVNLLGDYSTWLSSSNTREAKVYLECFSARWDALVGPEERALLDPNGLVNEGEKLTIKALDGFNASAAAKVFEEEIREVAFGTFGGLGIAGLSASLLTSVLSTTLEDLLALALCSAGGFFVLSSFPGRRKLAIQKVNKAADELSRKVDEAIQKDISQSANDLIRFVEVISKPYQEACQRKIDWLQGVQGELSAVERKLQTLKVEIQNLHGS

SEQ ID NO: 3059 - DNA, 2805 bp, Sorghum bicolor
atggagccggatccggtcaccgcggcgggggcatcctcctcctcgccgccgccgccgccgccttccgaccaccagatcgcagcaatggagccggatccggtcgccgcgggggcatcctcctcctcgccgccgccctccgaccaccagctcgcagcgatgaagccggatccggtcgccgtgggggcatcctcctcggcgccgccctcaccagcgccggccacgtcgtccccgccgtcctcaccagcgccggccgcgtccccgccgcggaaaacgcgagatgacgatgggcgggaagcagtggagtgcgcggatcctgggggagacctgaaccccgcgccgccgctgtcgcctcagcaggctacagttgaggacgccacggtgggcagcgatgtcgcgcaggaggaggaggcaaagaaggaggcgatggcaggagcaggggaggctctccgcagcttcatggaggagtttgggaatcaaggagaggactctattatcttgtcaccacggctgaaggagattagtactcctgaccgcccagctgccatccgctttctaggggagaagtataacaacctcatggagaggtacaagaaggcggtggtcaagtgttctgaggactgtgagcccagatataatggcctgaagaagaagtacacagatgagtgtgccgagaggcggcgtctgtacaatgagcttattgagctaagaggtaacattagggtgttctgcagatgcagacctctgagctccgatgaggtcacccgtgggtgtgtatcagtggttgagattgacccgtcacaggagaccgagctgcagtttgtccctaatgaaaaagaaaggaagccgtataagttcgaccatgttttcggcccagaggatgaccaagaggcggtcttttcagaaacagtgcctgttgttagatcagtgatggatggtttcaacgtttgcatctttgcatatgggcaaacaggaacggggaaaactttcacaatggaagggattccagaaaataggggtgtaaattatagggctttggaagaactgttcagaatttcagagaaaagaagtgcatctgttacatacacattttctgtaagcatcttggaagtttacaacgaaaagatcagagatcttcttgatgagagcaatgatcaatcaaaaaggttggatattaagcaaaatgctgatggaacacaagaagttcatggtttagttgaggctccagtttataacatagatggtgtttgggagaaactgaagtttggtgctcaaaatagatctgttggctcaaccaatgctaatgaactcagcagccgctcccacagtttggttagggtcactgttaggagcgagaatttggtgacttatcagacgagcagaagccacatgtggctagttgatcttgctggaagtgagagaatagctaaaactggggtagaaggagataggctgaaagaatcacagttcatcaacaaatcactatctgccttgggtgatgttatatctgcccttgcctcaaaaaattcccatattccatacaggaattccaagttgactcatttgctccaaagctctttaggcggagattgcaagacactaatgtttgtgcagataagtccaagctctatggattcaggagaaactctcagttcactcaattttgcgagtagagtccggtctgtagaacatggccctgctcgtaagcaagttgatccagctgaaactttaaagttcaagcagatgactgaaaaactacggcacgaggaaaaggaaaatgcacagctgaatcaacgcttgcagctgatgcagctcaagcatgcttctcgtgagaatgtcttcaggacactaaatgaaaaggtgaaggatgctgaacaagcatgcagaaattatcagcaacggattagagagctggaaaatgaattaggtaatgtgaagagggcttctagggattctgctagatcctcgaggccgccacttgttccaacgaggcagagacaacctcagggaaggaataacagcttggtaccaccttcaggcccttctagatggaggctcaaagctgccacaattaacaacaaagagaacattcctgtggcgatgaataaaccaaatcctgtggatgatcctaaggctgttggcaaagcaaggcgcgtttcacttaccccggtgatgcgacatgtcctccccatccagcccaagaggcgatcatccatcgcaatactgccttgtgtgaaggagcatttttctgtgctaaacgagaagagaggaggatctggactgccaagaggatcagttgccacacttggtgtgaatttggttccaggaacacccctagcaggacgtggtggacctgtttatgctaccccagatggatcaaagttcaagagatttgatttcggaagcagcagcaagttcacaagccctccaaatgtgggcatgtggaacaaaatggtcacaccgcagcagaagcttggaatggcaccggcaggaggtcctgcaaacgcagcgaagttgtgcttcagcatccagaaaagagttacgcctccacgtgttcgggcaacttctggtttgggcatcagcattgtcgacgcagctctgcgagagaacgtggctgtggggatacacgccaaagcgcggcgggtgcccaacccaagagaagacaatctatcctctaactctggaagcgaaggtttggacgttcaaactgagctgctgtgtggtgagaatgatggtgccttaagcgtcgtgttcttagtgaaaccgtgttgggacagaacgatgttcttttcagcatctttaaagtga

SEQ ID NO: 3060 - protein, 934 aa, Sorghum bicolor
MEPDPVTAAGASSSSPPPPPPSDHQIAAMEPDPVAAGASSSSPPPSDHQLAAMKPDPVAVGASSSAPPSPAPATSSPPSSPAPAASPPRKTRDDDGREAVECADPGGDLNPAPPLSPQQATVEDATVGSDVAQEEEAKKEAMAGAGEALRSFMEEFGNQGEDSIILSPRLKEISTPDRPAAIRFLGEKYNNLMERYKKAVVKCSEDCEPRYNGLKKKYTDECAERRRLYNELIELRGNIRVFCRCRPLSSDEVTRGCVSVVEIDPSQETELQFVPNEKERKPYKFDHVFGPEDDQEAVFSETVPVVRSVMDGFNVCIFAYGQTGTGKTFTMEGIPENRGVNYRALEELFRISEKRSASVTYTFSVSILEVYNEKIRDLLDESNDQSKRLDIKQNADGTQEVHGLVEAPVYNIDGVWEKLKFGAQNRSVGSTNANELSSRSHSLVRVTVRSENLVTYQTSRSHMWLVDLAGSERIAKTGVEGDRLKESQFINKSLSALGDVISALASKNSHIPYRNSKLTHLLQSSLGGDCKTLMFVQISPSSMDSGETLSSLNFASRVRSVEHGPARKQVDPAETLKFKQMTEKLRHEEKENAQLNQRLQLMQLKHASRENVFRTLNEKVKDAEQACRNYQQRIRELENELGNVKRASRDSARSSRPPLVPTRQRQPQGRNNSLVPPSGPSRWRLKAATINNKENIPVAMNKPNPVDDPKAVGKARRVSLTPVMRHVLPIQPKRRSSIAILPCVKEHFSVLNEKRGGSGLPRGSVATLGVNLVPGTPLAGRGGPVYATPDGSKFKRFDFGSSSKFTSPPNVGMWNKMVTPQQKLGMAPAGGPANAAKLCFSIQKRVTPPRVRATSGLGISIVDAALRENVAVGIHAKARRVPNPREDNLSSNSGSEGLDVQTELLCGENDGALSVVFLVKPCWDRTMFFSASLK

SEQ ID NO: 3061 - DNA, 441 bp, Sorghum bicolor
atgtcaaataaaagaattatcagtccttggtcccacacactttttcaaaactattctgtcaaatcagatttaccagctacaaccatggacagcctgactgctgtacctttcccgcacgagctcgtgtttgcaagtctcatcggcactgctgttacaaatcaggtgtttagtcacgttggctgcttggacctgaattggtctctccaaaacaagaaccagagcttccttctccaactgcaagcagtagcttccaaaagtctctatatccactttgagcctgaagtccagactgaacaacaaatccagttcaagcatattcatctctcttgtggtaattcctccaactctcccgtagtatgcattgttgaaaaaactgcaaacaaaatgtatccagaaaagttactggaaaactttcttcagtttattttcactatggaataa

SEQ ID NO: 3062 - protein, 146 aa, Sorghum bicolor
MSNKRIISPWSHTLFQNYSVKSDLPATTMDSLTAVPFPHELVFASLIGTAVTNQVFSHVGCLDLNWSLQNKNQSFLLQLQAVASKSLYIHFEPEVQTEQQIQFKHIHLSCGNSSNSPVVCIVEKTANKMYPEKLLENFLQFIFTME

SEQ ID NO: 3063 - DNA, 507 bp, Sorghum bicolor
atggcgtccgccgcccaccggtccatggcgtccgccctcctgttcctcaacctcgtcatgtacgtcgtcatcgccgtcatcgccggctgggccatcaactacagcatcgacgagagcaggaactcgctgaagggcgcgaggccgccggtgcggctgttcccgatctacttcccgatcggcaacctggcgacggggttcttcgtcatcttcgcgctcctcacgggcgtcgtgggcatcgccacctcgctcgccggcctgcacgacgtcagccaggggtaccccgccagcatgatgtccgccgcggcgtcctccctcgtcacctggacgctcaccgtcctcgccatggggctcgcctgcaaggagatcagcctcagcgtcaggcccggcagcctgcgcaccttggaggcgttcaccatcatcgcgacggcgacgcagctgctctgcgctgggtcgctccacgccggcgcgcacgcggtcatcctggagacgcctatcggcggagtttaa

SEQ ID NO: 3064 - protein, 168 aa, Sorghum bicolor
MASAAHRSMASALLFLNLVMYVVIAVIAGWAINYSIDESRNSLKGARPPVRLFPIYFPIGNLATGFFVIFALLTGVVGIATSLAGLHDVSQGYPASMMSAAASSLVTWTLTVLAMGLACKEISLSVRPGSLRTLEAFTIIATATQLLCAGSLHAGAHAVILETPIGGV

SEQ ID NO: 3065 - DNA, 3465 bp, Sorghum bicolor
atggcgcggttcgaggtgaacggcaagtcggtgcaaggcgtggacctgctgtggcggcgccactgggcgtcgcgcctcgacttctggcccttccttgcgctctatgcgctctggctgctgctcgccgttccggcgctcgacttcaccgacgctctcatcgtccttgccgcgctctccgctgctcacatcctcgccttcctcttcacggcctggtccgtcgatttccgggcctttgtcgggtactccaaggtcaaggacatccgtgccgctaacgcgtgtaaggtgaccccggctaagttctcagggtcaaaggagattgtacccctgcatatacagagagttgtggcatcaacttcggctgcaggtgagacagaggagatttactttgatttccggaagcagaggttcatctactcggcggagaaagataactttttaaaacttcggtacccgacgaaggagttgatcggttattataccaagggcactggttatggaactgaggccaagattagcaccgctgtggataagtggggtagaaacgtattcgagtatccacagcccacatttcagaaattaatgaaggagcaaatcatggaaccattttttgttttccaggttttttgtgttgctctttggtgcctggatgagtattggtactacagtttgtttacacttttcatgcttttcctgtttgagtctactatggcaaagaataggctgaagacattgactgagctaagacgtgtgaaagttgatagccagattgtgttgacctatagatgtggaaaatgggttaaaatccctggaactgaactactaccaggagatattgtgtcaatagggcgctcaactagtggtgaagatagatctgtaccagcagatatgctattgttagctgggtctgcaatagtaaatgaagctattcttacaggagaatctactccacagtggaaggtttcaattgctggacgtggtcctgaggatatgctatctataaagcgggataagaaccatatcctatttggtggcactaaagtattgcaacacactgcagataagtctgtaaatcttcgagcacctgatggtggctgtatagcttttgtattgaggactggatttgagactagccaagggaaattgatgaggactatcttattttcaactgagagggttactgcaaataacaaggaaagtggcctgtttatactctttttgctcttctttgcaattattgcatccggttatgtgcttatgaagggactagaggacccaacaaggagtagatataaacttttattgagttgttcattgattattacttctgtgatacccccggaattgccaatggagctctccatagcagtcaacacatctttaattgcattggctcggcgtggtattttctgcacagagccattcagaataccgtttgctgggaaggttgacatatgctgcttcgataagacagggactctgacatcagatgatatggaattccaaggtattgttactttggaaggcgatgatgacttaatatctgatgcaaataagctgcccctccgaactcaagaagtgctttctagttgccatgcattggtatttgtcgacaacaagctggttggtgatcccctcgaaaaggctgctataaagggcatagactggatctacacatctgatgagaaggccatgtctaaaaggcctggtggtcaacctgtacagatcgtgcacaggtaccattttgcttcccacttgaagagaatgtctgttatcgtccgtatccaggagaaattttacgctttcattaagggtgcaccggagaccatccaagagagattagttgatttacctgctgcatatgtggagacatataagaaatacacacgacaaggttctcgggtcttggctcttgcatacaaattgcttcctgagatgcctgttagtgaggctagaagtttggaacgggatcaagtagagagcgacctaacatttgctggttttgcagtcttcaactgtcctataaggagcgactctggtgctgtcttaaaagaactgggacaatcttcccatgacttggtcatgatcaccggagaccaagcattgactgcctgccatgttgctagccaagtacatatatcttccaaacctgttttgatcttgacacggataaagactggcggttttgagtgggtttcgccagatgaaactgatagagctccgtacagtgctgtggaggttgcagtgttatcagaatctcatgacctttgtattaatggggactgttttgaaatgctacaaagtactgaggctgttctccaggttatcccttatgtgaaggttttttcacgtgttgccccagaacaaaaagaacttgtactgactacattcaaaagtgttgggagggtgacactgatgtgtggagatggaaccaatgatgttggtgcactgaagcagggcatcatgaaagtcgactcaaaatctgggaagttgaaaaaacagaagcctgttaatgaagcatcatcacaagtgactgcagcagctaatagttctgctaaagcatcgagcagccgccccatgactgctgctgagaggcagcgagaaaagctgcagaaaatgttggatgaaatgaatgatgaaactgatggccgttcagcaccaattgttaagcttggtgatgcttctatggcttcacctttcacagcaaagcatgcctctgttgcccctactcttgacatcatccgtcaggggagaagcacgctagtcactacacttcaaatgttcaagattcttgggctcaattgccttgcaacggcttacgttctcagtgtcatgtacttggatggtgtcaaactgggtgatgttcaagctacaatcagtggtgtctttactgcagccttcttcctcttcatctcccatgctcggccgctccaaacactctctgcagagcggcctcaccctaacatattctgtgcatacgtcctgctctccattcttggccagttcgccatgcacatattcttccttgtcacagctgtcaatgaagcatcaaaacatatgccagaagaatgcattgagcccgactcaaatttccatccaaaccttgtgaatacagtttcatacatggtgaacatgatgatccaggtggcaacctttgctgtaaactacatgggccacccatttaatcagagcatatccgagaacaagcccttcaagtatgcattgtatggagcggttgctttcttcacagtgattacatcagatatgttcagggatttgaatgactacatgaagcttgaacccttgccagagggaatgcgtggcaaattgatgttgtgggctattctaatgttttgtggttgctacggatgggagcggcttctgcgatggatgtttccaggaaagatgcctgcgtgggagaagcgccagaaacaggcagttgcaaacttggagaaaaagcgagattaa

SEQ ID NO: 3066 - protein, 1154 aa, Sorghum bicolor
MARFEVNGKSVQGVDLLWRRHWASRLDFWPFLALYALWLLLAVPALDFTDALIVLAALSAAHILAFLFTAWSVDFRAFVGYSKVKDIRAANACKVTPAKFSGSKEIVPLHIQRVVASTSAAGETEEIYFDFRKQRFIYSAEKDNFLKLRYPTKELIGYYTKGTGYGTEAKISTAVDKWGRNVFEYPQPTFQKLMKEQIMEPFFVFQVFCVALWCLDEYWYYSLFTLFMLFLFESTMAKNRLKTLTELRRVKVDSQIVLTYRCGKWVKIPGTELLPGDIVSIGRSTSGEDRSVPADMLLLAGSAIVNEAILTGESTPQWKVSIAGRGPEDMLSIKRDKNHILFGGTKVLQHTADKSVNLRAPDGGCIAFVLRTGFETSQGKLMRTILFSTERVTANNKESGLFILFLLFFAIIASGYVLMKGLEDPTRSRYKLLLSCSLIITSVIPPELPMELSIAVNTSLIALARRGIFCTEPFRIPFAGKVDICCFDKTGTLTSDDMEFQGIVTLEGDDDLISDANKLPLRTQEVLSSCHALVFVDNKLVGDPLEKAAIKGIDWIYTSDEKAMSKRPGGQPVQIVHRYHFASHLKRMSVIVRIQEKFYAFIKGAPETIQERLVDLPAAYVETYKKYTRQGSRVLALAYKLLPEMPVSEARSLERDQVESDLTFAGFAVFNCPIRSDSGAVLKELGQSSHDLVMITGDQALTACHVASQVHISSKPVLILTRIKTGGFEWVSPDETDRAPYSAVEVAVLSESHDLCINGDCFEMLQSTEAVLQVIPYVKVFSRVAPEQKELVLTTFKSVGRVTLMCGDGTNDVGALKQGIMKVDSKSGKLKKQKPVNEASSQVTAAANSSAKASSSRPMTAAERQREKLQKMLDEMNDETDGRSAPIVKLGDASMASPFTAKHASVAPTLDIIRQGRSTLVTTLQMFKILGLNCLATAYVLSVMYLDGVKLGDVQATISGVFTAAFFLFISHARPLQTLSAERPHPNIFCAYVLLSILGQFAMHIFFLVTAVNEASKHMPEECIEPDSNFHPNLVNTVSYMVNMMIQVATFAVNYMGHPFNQSISENKPFKYALYGAVAFFTVITSDMFRDLNDYMKLEPLPEGMRGKLMLWAILMFCGCYGWERLLRWMFPGKMPAWEKRQKQAVANLEKKRD

SEQ ID NO: 3067 - DNA, 369 bp, Sorghum bicolor
atgggaacagaggtgctccgcccgcacgattgcctcgcccgctctaggcggccgcggccgctgcgccctgccgccgggaggaggacggcggcggcgcgccagggccagtaccatggccgtggcgcgcgtggcgacaagcggagcccctcggcggcagtgacggtgccgaggcaggtcgtcgcacggaccaaggtggcggcggcggacgcgtacgcggggccggcgttcggcgccatgtcgccgtcgccgcgcgcgctgccgctgccacggtggttctcctctaggacggtcgccgacgacgacgcgacggtgccaggcgtggacgacgccgccacgcgggagcttcggcggctgctggggctccattga

SEQ ID NO: 3068 - protein, 122 aa, Sorghum bicolor
MGTEVLRPHDCLARSRRPRPLRPAAGRRTAAARQGQYHGRGARGDKRSPSAAVTVPRQVVARTKVAAADAYAGPAFGAMSPSPRALPLPRWFSSRTVADDDATVPGVDDAATRELRRLLGLH

SEQ ID NO: 3069 - DNA, 1206 bp, Sorghum bicolor
atgggttatggcatgagtaggctagaagatgaatactatgagcctgaagggcagaatactgatggatctggctcagttcaagtgaacaatgagtttgcagaactgcataacgatatttttcatatgacccgaatgagatcaagacttactgaaagctacaagtccatgggtaccaacagaggcataatatcaacggccaagttattatctcaaagggaaattgattgttctggaaagaggatgttctcttctggtgaccgtgcatttgttctaggtcgctatgttccaatgaacggccctcagttattggataggatggattctcgtgcttatgtttcgcagttttctgctgatggcactctttttgttgctggttttcagggaagtcacataagaatatatgatgctgatagaggctggagcatacacaaagacattcatgctaggtgtttgagatggacaatcagtgatgtatccttatcacctgatcagcggtatcttgcctactctagtctggcacctattgtccatattgttaatgtcggaaatgcggcaagagaatcctatgctaacgtcacttctgatgtcaatacagtagcatttgctgatgaaaccggccatctcatatattctggaagtgatgacactttatgcaaggtttgggacaggcggtgtttgtccacaggacaagctgccggagttttgactggacatttgcatggggtaacacatattgatagtcgtggagatggccgaagtttcatatccaatggaaaagaccaagcaatcaaactgtgggatgtcaggaaaatgacgtccaatgctgatagttgtgcagacggagccccaagttgggactacagatattcgaggtatccgcagcagcataaacagttaaagcatccgcatgatcagtcattagcgacataccgtggacatgcagtcctccggacattgatccgttgctacttttctcctgcttacagcactgggcaaaagtacatatatacagggtcgtatgattcctgcgtttacatctatgatgtggtaagtggatcgcaagttgcgaagctgaaatggcatcaaatggcgattcgtgactgcagttggcacccatttgagcccacgcttgtgagctcatcctgggacggccaggtagcaaaatggaccagtgcacgtgatcaacaggcttctgatatagattga

SEQ ID NO: 3070 - protein, 401 aa, Sorghum bicolor
MGYGMSRLEDEYYEPEGQNTDGSGSVQVNNEFAELHNDIFHMTRMRSRLTESYKSMGTNRGIISTAKLLSQREIDCSGKRMFSSGDRAFVLGRYVPMNGPQLLDRMDSRAYVSQFSADGTLFVAGFQGSHIRIYDADRGWSIHKDIHARCLRWTISDVSLSPDQRYLAYSSLAPIVHIVNVGNAARESYANVTSDVNTVAFADETGHLIYSGSDDTLCKVWDRRCLSTGQAAGVLTGHLHGVTHIDSRGDGRSFISNGKDQAIKLWDVRKMTSNADSCADGAPSWDYRYSRYPQQHKQLKHPHDQSLATYRGHAVLRTLIRCYFSPAYSTGQKYIYTGSYDSCVYIYDVVSGSQVAKLKWHQMAIRDCSWHPFEPTLVSSSWDGQVAKWTSARDQQASDID

SEQ ID NO: 3071 - DNA, 1017 bp, Sorghum bicolor
atgacccagcagatgtgggcgtgcaagaacatgatgtgtgccgcggatccgtgccatggccgctacctgacggcctctaccatgttccggggcaagatgagcaccaaggaggtggaggagcagatgctcagcgtgcagagcaagggctcgtcctgctttgtggagtggattctgaacaacgtgaaatccagcgtttgtgacatccccccgcgtggcctcaccatggcctccaccttcgtcggcagctccacctccattcaggagatgttccggcgtgtgagtcatccgttcacggccatgttcaggaggaaggccttcttgcattggtacacgtgtgagggcatggatgagatggagttcactgaggcggagagcaacatgaacgacctcgtctccgagtaccagcagtaccaggacgctacagccgacgaggaggccggctatgaggacgagaacgcaggggaagagaagaagaaagaggaagaagaaaaagacactgacgagtgggtcccttctgtcattctctctggaatagccggcgtgagacccgcgacagccggcgagctgcgccaaacgccggcgaggtcggagccctgccctcgacgacgacgccggcggcgggtgggaagcccggggacggccagggacgcgaccaatggccgaggacggccgggagcgcgacggattcccggaggcgcgacaacgacggcggtcacggggcgcgacgacggcggggatggggcgccggcggagggctgggagaggacggggcgcgaggacggcggcggatggcgcggcggcggaggcctgggagaggacgggcgcgaggacggcggcggatgggccgagggcgccctgatatgtggcgtcgagcccgctgccacctgccatgtcacacgtgatctggccagtgacagtaacctcagcagcgccgtgatctatggcgtcaagtcgtgtaacctcgacgtcatgaagcatggctctatggcgtcaagtcgtgtaacctcgacgtcatga

SEQ ID NO: 3072 - protein, 338 aa, Sorghum bicolor
MTQQMWACKNMMCAADPCHGRYLTASTMFRGKMSTKEVEEQMLSVQSKGSSCFVEWILNNVKSSVCDIPPRGLTMASTFVGSSTSIQEMFRRVSHPFTAMFRRKAFLHWYTCEGMDEMEFTEAESNMNDLVSEYQQYQDATADEEAGYEDENAGEEKKKEEEEKDTDEWVPSVILSGIAGVRPATAGELRQTPARSEPCPRRRRRRRVGSPGTARDATNGRGRPGARRIPGGATTTAVTGRDDGGDGAPAEGWERTGREDGGGWRGGGGLGEDGREDGGGWAEGALICGVEPAATCHVTRDLASDSNLSSAVIYGVKSCNLDVMKHGSMASSRVTSTS

SEQ ID NO: 3073 - DNA, 1821 bp, Sorghum bicolor
atgacagatcattttgctctaagtctaggtgctctttttctgttgttgctaagtaccagtggtttcagctctgaacttgatgtccaatgcttgagagacgttcagaaatcggtgattgatccaaatggtatactcaaatcctcatggatttttgataacagcagtgcgggtttcatatgcaaatttactggtgtggagtgctggcacccagatgagaatcgagttcttacattgcgcctcagcaaccttggtcttcagggtccattccctaaaggtcttaagaattgtaccagtatgactgggctggatctgtcaagtaacagctttactggcgtcatcccttcagacatcgagcagcaagtgccaatgttgacatctctggacctctcctataatagtttctcaggaggaattccaatacttatttataacatttcatacctaaacacccttaatcttcagcataaccaattgagtggtgaaatcccagggcagttcagcgcccttgctcggttacaagtgtttaatgttgctgacaaccgactatcagggattattccaagttctctacggaacttctcggcatcaaactttgctggtaatgaaggactgtgtgggcctccattaggtgactgccaagcttcagcaaagagcaagagcactgcagcaatcattggggctattgttggagtggtaattgtcgtcattattggtgcaatagttgtgttcttttgtctgcggaggaaaccagccaagaagaaggcaaaggatgaggatgataataagtgggcaaagagtatcaaaggaacaaaaactatcaaggtatctatgtttgagaatccagtttcaaagatgaaactaagtgatctcatgaaagccacaaaccaattcagcaaagagaacatcattggtactgggaggacaggaactatgtacaaggcagtgctacctgacggttccttcctagctgtcaaaaggctacaagactcgcaacattctgaatcacagttcacatcggagatgaagacacttggtcaagtgaggcaccggaacttggttccgctcttgggattttgcattgccaagaaggagaagttgctggtgtacaagcacatgcccaagggctcactctatgatcagttaaatcaagaggaaggtagtaagatggactggccattgaggctacgaatcggcattggtgcagcaaaagggcttgcatatctccaccatacctgcaatcctcgagttcttcaccgcaacatcagctccaaatgcatcctcttagatgaggatttcgaaccaaagatatcggactttggccttgctaggctcatgaacccaatagacacccatctcagcacctttgtcaatggggaattcggagaccttggttacgtggcaccagagtatgcgcgtactctgatggccacgccaaagggcgatgtctacagctttggtgtggttctccttgagcttgtcaccggcgagaagcctacccacgtttcctcggccccggagaatttcagagggagcctagtggaatggatcaattatatgtccaacaacgcacttctccaagacgctatcgataagtcgctggtagggaaggatgctgatggtgagctgatgcagttcctgaaagttgcgtgttcctgcacgctcgccaccccgaaggagagaccaaccatgtttgaggtttaccagctcgttagagccattggggaaaggtaccatttcactgccgatgatgacctggtgctgccacctcttagcacagatggtgatggtgtaaccctcgacgaactcattgttgccaagtaa

SEQ ID NO: 3074 - protein, 606 aa, Sorghum bicolor
MTDHFALSLGALFLLLLSTSGFSSELDVQCLRDVQKSVIDPNGILKSSWIFDNSSAGFICKFTGVECWHPDENRVLTLRLSNLGLQGPFPKGLKNCTSMTGLDLSSNSFTGVIPSDIEQQVPMLTSLDLSYNSFSGGIPILIYNISYLNTLNLQHNQLSGEIPGQFSALARLQVFNVADNRLSGIIPSSLRNFSASNFAGNEGLCGPPLGDCQASAKSKSTAAIIGAIVGVVIVVIIGAIVVFFCLRRKPAKKKAKDEDDNKWAKSIKGTKTIKVSMFENPVSKMKLSDLMKATNQFSKENIIGTGRTGTMYKAVLPDGSFLAVKRLQDSQHSESQFTSEMKTLGQVRHRNLVPLLGFCIAKKEKLLVYKHMPKGSLYDQLNQEEGSKMDWPLRLRIGIGAAKGLAYLHHTCNPRVLHRNISSKCILLDEDFEPKISDFGLARLMNPIDTHLSTFVNGEFGDLGYVAPEYARTLMATPKGDVYSFGVVLLELVTGEKPTHVSSAPENFRGSLVEWINYMSNNALLQDAIDKSLVGKDADGELMQFLKVACSCTLATPKERPTMFEVYQLVRAIGERYHFTADDDLVLPPLSTDGDGVTLDELIVAK

SEQ ID NO: 3075 - DNA, 681 bp, Sorghum bicolor
atggcgaccaccgcggcgctctccaccgccgccaaccccacccaccagctctgccggtcccgcgctacgctgggcaagccagtgaaggggcttggcctggggatgggccgggagcgcgcccagagcatcacgtgccaggcggcgagcagcatccccgccgaccgcgtccccgacatggagaagcggaagctgatgaacctcctcctcctcggcgccatctcgctgcccaccgtcggcatggtcgtcccctacggcgccttcttcgtccccgccggctccggcggcgccggcggcgggacctacgccaaggacaagctgggcaacgacatcacggtggatgagtggctcaagacgcacggtcccaacgaccgcacgctggcgcaggggctcaagggtgacccgacgtacctggtggtggagcaggacaagacgctggccacctacgggatcaacgccgtgtgcactcacctcggctgcgtcgtgccgtggaacggcgccgagaacaagttcatctgcccctgccatggatcccagtacaacaaccagggcaaggtggtccgtggaccggcgcctctgtcgctggcgctggttcacgccgacgtcgacgacggcaaggtcctcttcgtcccgtgggtggagaccgacttcaggaccggcgaggacccgtggtggaaggcatga

SEQ ID NO: 3076 - protein, 226 aa, Sorghum bicolor
MATTAALSTAANPTHQLCRSRATLGKPVKGLGLGMGRERAQSITCQAASSIPADRVPDMEKRKLMNLLLLGAISLPTVGMVVPYGAFFVPAGSGGAGGGTYAKDKLGNDITVDEWLKTHGPNDRTLAQGLKGDPTYLVVEQDKTLATYGINAVCTHLGCVVPWNGAENKFICPCHGSQYNNQGKVVRGPAPLSLALVHADVDDGKVLFVPWVETDFRTGEDPWWKA

SEQ ID NO: 3077 - DNA, 2658 bp, Sorghum bicolor
atggggtgccggagctcgcggctggacgcgacggacgtgtccccggcggccgcgctgtgccgggagcgtcgggacctgctgcgggccgccgcggaccaccgcgcgcacctcgcggccgcgcacgccgcctacttccgggcgctcccgcgcgtcgccgacgcgctcgcgcggttcgcgagccaccaccacgccgccacgccgccggcgccggggtcgcccgtgctcacgctgccgccgccgtccgaccacgacgacgccgacgacgccgacgagcccaagaagcagcggggcagcggctcagcgacaccgcataccgactccggccactcccacatccacttccactccgacgacgcctcggaatccgatcccgactcctcggccgacgacccctgcgccggccccggaggctgtggcggcggtggccacggcgccgagatcccgccgcagacggcgcctccccaagaacgccaaatccatgaccctggttttgttgccaggccggagatgccgtgggagtacgcctcctacgatccctatgcttcctttccaaacaccgcattccaaaatgccacatttcccagctactactacatgaaggccagcttgacgccggcgaacacggtgtaccaagaaccgtacggctacggcaacttcgccaccagttcgtcctacatggggtacggctacgggtacaacaacccaatgtacggcgtctcgttgccaccagacggggatcggccggtggaggatcgcggccgggaaccggcgccggcggctccggcggcggcgccgccgccaatgccaatgcctgagacgacaccgtgggacttctttaaccccttcgattcgtatgagcaggaacttcctcagtataagggcaaaggttacgactccaatgggtcgttcaccagcagtcccaactcaagtgaggtgagggcaagggaggggatcccggagctcgaggaggagacggagctggagtctatgagggagtctgtgaaggcaaggaaggctgtagagagcacggcgtcgaaccggattggcaatgtggatgtcagtgccaaggtaaaagtgtccatggagcataaggaagttgagatcgagagtgtgtatagtgcttcggtatttgagtcaggggacgagagtgtgtgcagttgcgattgtgaccatgccaatgctagaacagaggggtcagtgcaggtgccggcaggagatgatcaaatgaaggtgaggaaggtgagctcagaggatcactcatccatagtagtcggagaggatgcacggccgccagagttcactgggacaagagatgtcgccgaggttgttgaggaaataaaggagcaattcaaatcagtggctgcctgtggggatgatgtcgcaaggatccttgaggtggggaggatgcggtatcgatcacggaatagaatcttaagattgatattctcacggatgatggggaccttcgctttgttattttcttccatatcggagccaccggtgaagagcttggaagaatcagctataaatccatccaaaggaaaccagaattccagtaaaagattcgattttcccagtgatgttgagcttaatactctttcggcaacaatggacaggctgtatgtgtgggagaaaagacttcataaggaaattgtggaggaagaaaaattgaggattacatatgacaaagaatggaagcgcttgaaagagctggatgctagtggtgcagagccacataagatcgatacaacgcgggcctcaattagggcactgctcaccaaaatcaacatttccatcagatcagctaaagttatttctaggaggatccacatactacgagatgatgagctacacccacaccttgttacacttatccatgggcttgttagaatgtggaaattcattcttgaatgccatcggaagcaatttcataccatacttcaaactaaatctcatattctgatccctaagaatggacctgaagaaagctcctccaaggttacactggagctagaaatggaacttttgaactggtgttcttgtttcaggaactggatcttatcccaaaaagcttatatcgaaaccctcaatggttggctagtcaaatggcttcctcaggaaaaggaggagactccggatggcattgcacccttctctcctggtaggcttggagctcctgctgtgttcattacagctaacgattggtgtcaagccatgaaaaggataccagaagccagcgtcgtagatacaatggaagcttttgctgtcaacgtacatatgttatgggagcggcaggacgaagagcagcagcagaagctgaaagctgactacctctctagggatttcgcaaagcggctcaaatctcttcaggaggaacatggcttgcaagggcaatttgaagctgacaaggcagtgttgcccattgccgacaatggcagggcagtcgataaccgcatggttgcattggatacactgcacaagagattggatgaacaaagagctcggcacgacgaaactgtgaaacagattcgagaggccagtgcagctgatctgaaagcaggtctggctccgatatttgaagcactggaatctttcagtgtggagacgctgaaaggttatgaaaatgtcaggattccagtcgaaggtgttggtggttga

SEQ ID NO: 3078 - protein, 885 aa, Sorghum bicolor
MGCRSSRLDATDVSPAAALCRERRDLLRAAADHRAHLAAAHAAYFRALPRVADALARFASHHHAATPPAPGSPVLTLPPPSDHDDADDADEPKKQRGSGSATPHTDSGHSHIHFHSDDASESDPDSSADDPCAGPGGCGGGGHGAEIPPQTAPPQERQIHDPGFVARPEMPWEYASYDPYASFPNTAFQNATFPSYYYMKASLTPANTVYQEPYGYGNFATSSSYMGYGYGYNNPMYGVSLPPDGDRPVEDRGREPAPAAPAAAPPPMPMPETTPWDFFNPFDSYEQELPQYKGKGYDSNGSFTSSPNSSEVRAREGIPELEEETELESMRESVKARKAVESTASNRIGNVDVSAKVKVSMEHKEVEIESVYSASVFESGDESVCSCDCDHANARTEGSVQVPAGDDQMKVRKVSSEDHSSIVVGEDARPPEFTGTRDVAEVVEEIKEQFKSVAACGDDVARILEVGRMRYRSRNRILRLIFSRMMGTFALLFSSISEPPVKSLEESAINPSKGNQNSSKRFDFPSDVELNTLSATMDRLYVWEKRLHKEIVEEEKLRITYDKEWKRLKELDASGAEPHKIDTTRASIRALLTKINISIRSAKVISRRIHILRDDELHPHLVTLIHGLVRMWKFILECHRKQFHTILQTKSHILIPKNGPEESSSKVTLELEMELLNWCSCFRNWILSQKAYIETLNGWLVKWLPQEKEETPDGIAPFSPGRLGAPAVFITANDWCQAMKRIPEASVVDTMEAFAVNVHMLWERQDEEQQQKLKADYLSRDFAKRLKSLQEEHGLQGQFEADKAVLPIADNGRAVDNRMVALDTLHKRLDEQRARHDETVKQIREASAADLKAGLAPIFEALESFSVETLKGYENVRIPVEGVGG

SEQ ID NO: 3079 - DNA, 771 bp, Sorghum bicolor
atggaggatgtggtgaagttcatctttggaatttgtggaaatgtcattgctctcttcctcttcctatccccagtgcctaccttctggaggatcatcaggaggaggtcgacggaggatttctcaggggtgccgtacaacatgacactcctcaactgcctcttgtcagcttggtacgggctgccgttcgtgtcgccgaacaacatcctggtgtcgacgatcaacggcgcgggcgcggcgatcgaggccgtgtacgtggtgatcttcctggtgttcgcgtccagccagcggacgcggctgcggatgctgggcctggcgtcggcggtggcggcggtgttcgccgccgtggcgctggtgtccatgctggcgctccaccagggccagggccggaagctcatgtgcggcctcgccgccaccgtctgctccatctgcatgtacgcctcgccgctctccatcatgaggctggtggtgaagaccaagagcgtggagtacatgccgttcctgctgtcgctggccgtgttcctgtgcggcacgtcctggttcgtctacggcctgctcggccgggatcccttcgtcgcgatccccaacgggtgcgggagcttcctgggcgccgtgcagctggtcctgtacgccatctaccgcaacagcgccggcacagctggcgccggcaagcagcaggccggcgacgacgtggagatggccgccgacgcgaagagcagcaagaaggtcgccgacgacgtcggcggcgccggcaaggagggccgcctggtctag

SEQ ID NO: 3080 - protein, 256 aa, Sorghum bicolor
MEDVVKFIFGICGNVIALFLFLSPVPTFWRIIRRRSTEDFSGVPYNMTLLNCLLSAWYGLPFVSPNNILVSTINGAGAAIEAVYVVIFLVFASSQRTRLRMLGLASAVAAVFAAVALVSMLALHQGQGRKLMCGLAATVCSICMYASPLSIMRLVVKTKSVEYMPFLLSLAVFLCGTSWFVYGLLGRDPFVAIPNGCGSFLGAVQLVLYAIYRNSAGTAGAGKQQAGDDVEMAADAKSSKKVADDVGGAGKEGRLV

SEQ ID NO: 3081 - DNA, 141 bp, Sorghum bicolor
ttaaacatccatattacgacaatcataatggtttgcatattgtcaatacataagccaaattgcttaaagatggcaatcatgcaggttgcaatacacacaggtaataacataaccaaagatttacacgccaagtcttattga

SEQ ID NO: 3082 - protein, 46 aa, Sorghum bicolor
LNIHITTIIMVCILSIHKPNCLKMAIMQVAIHTGNNITKDLHAKSY

SEQ ID NO: 3083 - DNA, 423 bp, Sorghum bicolor
atggcggatcaggagaccccagttgcagtcgaggcacctaccccggtccttggggagccgatcgacttgatgactgctctgcagcttgtcatgaagaagtcaggtgctcatgatggccttgttaagggtcttcgcgaggctgccaaagccattgagaagcatgctgctcagctttgtgtgcttgccgaggactgtgaccagcctgattatgtcaagctggtgaaggctctctgctctgagcacaatgttcacctggttacggtgcctagcgccaaaactcttggcgaatgggctgggctttgcaagattgattctgagggcaaggcgaggaaggtcgtaggctgctcctgtgttgtcgtcaaggactatggcgaagaatctgagggccttaacatagtgcaggagtacgtcaaatcgcactag

SEQ ID NO: 3084 - protein, 140 aa, Sorghum bicolor
MADQETPVAVEAPTPVLGEPIDLMTALQLVMKKSGAHDGLVKGLREAAKAIEKHAAQLCVLAEDCDQPDYVKLVKALCSEHNVHLVTVPSAKTLGEWAGLCKIDSEGKARKVVGCSCVVVKDYGEESEGLNIVQEYVKSH

SEQ ID NO: 3085 - DNA, 528 bp, Sorghum bicolor
atgcatggcgtgcgcggaagccaacgcaagggtcaacagcgcgacgccgacgacgcggcggacgcgctatatatcccgtcgcatggctcaccctacggaggaggagagcaggggggcgcggcggccatggaggacggccaccactactcgcccacggccgccgccgccggcggcgtcggtggtggcgagcggcggttcctcggcgtgctgcagcggccgtgggggaagtgggcggcggagatccgggacccgcacatggcggcgcgcgtgtggctcggcacgtttgatacagcccaggccgcggcgcgcgcctactacgaggccgggctccgcttccgcggtatccgcgccaagctcaacttcctggaggacgtgcgcctgaccactacctccaccacctgttacggcgaggcggcggggcagtggacagcctggccgccggagagtgcgtggagctatccggcgaccacgggttcttcttggtctggttcaagccagtatccaccgtcaactcgtcctcctcaatag

SEQ ID NO: 3086 - protein, 175 aa, Sorghum bicolor
MHGVRGSQRKGQQRDADDAADALYIPSHGSPYGGGEQGGAAAMEDGHHYSPTAAAAGGVGGGERRFLGVLQRPWGKWAAEIRDPHMAARVWLGTFDTAQAAARAYYEAGLRFRGIRAKLNFLEDVRLTTTSTTCYGEAAGQWTAWPPESAWSYPATTGSSWSGSSQYPPSTRPPQ

SEQ ID NO: 3087 - DNA, 5115 bp, Sorghum bicolor
atgtctgcggggagaggcgatccaaacacccctggcaacaggcctatgttcctgagtgctggggtgcccaacttaggctgtcacaatcttgcggctccagctgcagcatgcaacaccggctcgatcgcctctcaagtcttgttctccccatgctccacgtctgtcctgaataccattcaagaggtttctgctccacaatctgatcagttgagtctgataagccgtgcaactgaacaagacgacgtccgctgcatccagccatcctggaatatgcctgggggttgcacgcaggtgcctattaatatcgtagtgttccataggcagctcactggaaggggttcgagggcgcagttgccaccgtcggccaccactgccttgcctgatgtttcagagggtgatatgacaacgaattcttcacagctagccactccagataaatacaattcagagcatcttcggttgaattgtatatatgatgaagcatccaagactgaaaacggaacagaaactagccagcttccacaattagcagcagcaattttccgcaacagctgcaatgatttggaatcggtgattcctgcagctacctgggaaacacgagttcaacattctcaagaatcaaccacccttcttgcagaaagtaccactgatgacaacattcatatgtaccaatctatgcaaaaaaggctcaagacacaaatcaatcaaagtgaacacacaccattgtcaacaccaactgtacccaaggagaaaacactaactcaaattgagatgcagatagcaagtgctgagaaaactgaaatgttcaggaatgaggaaaccccagcactgaaaatgaaggctcggaggaaaaaacatagaccaaaggtaatcagagagaataagctagccaaagttcaaaaacctgattcaacaccggatggaacatctccgaatcaaaaagtcaagagaagttatgtccggaagaaaagaaatcccagctctctggagaagtgctctgatcctgttagtgatcaatcaatctctagagcaacaggagttgcagatagaagccgaacagcatcagttcgacgaagtctgcaatttgaacccaaagaacaaggattgcaaggaggccattcgtcaatgaccaactcacaccatcacaactatgagaaacctgaccatgctcaaagttctttctactcagaatcagaagtgcagactggacatgcgctgcaagtaggtatggagaattcaccaggagaattagctttcgacatgagtctcagactgaacaaatttttagatgagtacatgcatttgccagagatgccaaaacctacacaagaagttccaattgcaacttctgggtcttttggtactgaactagcaagggaagaagataatctgggaagaacttgcctacctgatggcaaaaatggtcttatttcctcagctaagtccttacctgaaatggaacccacaggcagtcagatgggtaaggtgtcggaagtggagaaccccacacaccatagaaacggttccctacctggcacacgggactctgttgtcttgaggactgcagctgagatgctatcagttttccatgctggtgcaataaagaagaagcgatctgcccggctccgcagaaattccttcttttctattatggatcttgagaataatactctacaagcatcaacaagactgccacagccatgcatggatgctctgtataaaagttcttgcattaagtttatgaccaaaaaacgttcagaaaaggcacgaccacactgttccagttccattcaaccaaatgatgagctgaagaacaggctttcagctggaagcattttttatagtgcatctaatgcatccaaaatatcagaagacagttctccaaacttttcacctcagaccctggacaatgaaagaatcaactttgatactcattgtgaaatagcagaagggagatcagcaaatacatcaacaggaccctatatggattaccttcaaggagttgcatcaaagttgaagcatcttgatttgaatactgaacaggtgcacagaaatgagatgcatttctctctgaccgcacctgctgttatttcttttgagggaacaagtggtccttcaaatgctcttgtcccatacggtggtgcagtgatggttccatatgaaaggcccttgcagttagtaaaaaagcagcggcctcgagctaaggttgacttggattttgagacgacaagggtttggaaccttttgatggggaaatcagctgagcctgatgggactgatgttgagaaggagagatggtggcagcaagaaagagaagtatttcaaggccgtgctaattcgttcatagcacgcatgcgactcgttcaaggagacaggcgtttttctccttggaaaggatctgtagtcgactctgtagtaggagtgttcctcactcagaatgtagctgatcatctttcaagctctgcctatatggcccttgccgcaagttttccttcacggtcagtcaacaacagttgtaaggatgatgctaccacagaagacaatgaacaaactaccagcacgagtgcactagtaggagagaaaagtgtgtttgaccttttctacaatggtgctagacctgatctagaagtgggctgtgaggaggtatcaatgacctacaagaagacacatatggaaccaaaggacaatactagggatagtgaattggttgaagatgaaacctattcctttgattacaaatcaaaatatggaagcgtttgcaatcaccaagggacaggtatagaacataaagaaaaagaacaacaactaccagatttctcctcagtagaattaactgcgtctacagaactcatgcagcagatacaaatccagaagatctcatcctcccagattttaacttcaacaactattcaatcaaaattatctttgagttctgagatacctagaaattttgtttgtggtggttctgctgcagcttataagcaactgggaagcaatttcgatcagggaaggtcattaacaggaaatgataccacagtcagggaaattgaatgccacagactccaaatggctgcaaggaatgattatggatttggtaaacctgagattccttctagttctgcaatgccatttttcttgactgttgatcctcaacagctgaaattgagaaatgagacaaatgtttcttcaacatcttccaacagcccttcagattctgcatcaccaaacttgaaaaatggcacgagtcctctttttatgccatttaattcctacatggcactcatggcagagtgtagcagcaataagatcgcttacaccactctgaacactccaaaaacaagcacagaacttccagtcaagttacgccatgacaaaaggagtagttttgaagcaccagacttaaaggagcatgaatcagtctttccaacacatgaaatagcagtagaagcaacaagaaaagaatatgaatatacatcgaaatctggttttacttcctgcaatggagtaccagatacagctgcacaagcaccaaaggcaaagaaaacaagaaccgcaactaaaaaggatgcagagaattttgactgggataaattacgaaggcaggcttatagtgaagggcagatgaaaacaagaagtgttgaaagaagagactctgtagattgggaagcagtaaggtgtgcagatgcacaaagaatatctcatgccattcgggaaagggggatgaataatattttagcagagcgaatccagaattttctgaatcgtttggttagagatcatgggagcattgaccttgagtggctaagatatattcccccagactcagcgaaggattacctactaagtatacgtggactggggcttaaaagtgttgaatgtgttcgtcttctcacactgcatcatcttgctttccctgttgacaccaatgttggtcgtatatgtgtaagactgggatgggtgcccattcaacctcttcctgaatctctacagttacatcttttggagctatatcctatcttggaaactatacaaaagtatctttggcctcgcctttgtaaactcgatcaacagacactgtatgagctacattatcagatgattacatttggaaaggtcttttgtaccaaaagcaagccaaattgcaatgcatgcccaatgaggagtgagtgcaagcattttgcaagtgcttttgcaagtgcaaggcttgcacttcctgctcctcaggagaaaagcttagtgaagttgagcaatcaatttgctttccagaatagcagcatgcacactatgaattcgactcacctgcctcgccttgaggggagtctccattcaagggagtttcttcctaagaactcagagccaataatcgaggagcctgcaagtccaagggaggaaggacctccagaaaccatcgaaaatgatattgaagatttttatgaagatggtgaaatcccaacaataaagcttaacatggaagtgtttgcacagaacttggagaattgcattaaagaaagcaataatgaactccagtctgatgatattgcaaaagcattggttgctattagcactgaagcagcttcgattcctgtaccgaaactaaagaatgtgcataggcttcgaacagaacactatgtgtatgagcttccagatgcacatccacttttacaacagctaggacttgaccaacgggaacctgatgatcctaccccgtacttattggccatatggacaccagagaaagaaaaccaatctagatatgttagaggcacaattctggttccttgtcgaacagctatgaggggtagtttcccacttaatggcacttactttcaagtcaatgaggtatttgctgaccacagatctagccacaacccaatccatgtgcaaagggagcagctatggaacttgcaaaggcgcatggtcttcttcgggacttcagtacccaccatattcaaaggtctaacaacagaagaaatacaacaatgcttctggaggggatttgtctgtgtgcgaggattcgacatggagactagggcaccaaggcctctctgccctcatttgcatgttgtagcaagaccgaaagcccgcaagacagcagcaactgagcaagtactctaa

SEQ ID NO: 3088 - protein, 1704 aa, Sorghum bicolor
MSAGRGDPNTPGNRPMFLSAGVPNLGCHNLAAPAAACNTGSIASQVLFSPCSTSVLNTIQEVSAPQSDQLSLISRATEQDDVRCIQPSWNMPGGCTQVPINIVVFHRQLTGRGSRAQLPPSATTALPDVSEGDMTTNSSQLATPDKYNSEHLRLNCIYDEASKTENGTETSQLPQLAAAIFRNSCNDLESVIPAATWETRVQHSQESTTLLAESTTDDNIHMYQSMQKRLKTQINQSEHTPLSTPTVPKEKTLTQIEMQIASAEKTEMFRNEETPALKMKARRKKHRPKVIRENKLAKVQKPDSTPDGTSPNQKVKRSYVRKKRNPSSLEKCSDPVSDQSISRATGVADRSRTASVRRSLQFEPKEQGLQGGHSSMTNSHHHNYEKPDHAQSSFYSESEVQTGHALQVGMENSPGELAFDMSLRLNKFLDEYMHLPEMPKPTQEVPIATSGSFGTELAREEDNLGRTCLPDGKNGLISSAKSLPEMEPTGSQMGKVSEVENPTHHRNGSLPGTRDSVVLRTAAEMLSVFHAGAIKKKRSARLRRNSFFSIMDLENNTLQASTRLPQPCMDALYKSSCIKFMTKKRSEKARPHCSSSIQPNDELKNRLSAGSIFYSASNASKISEDSSPNFSPQTLDNERINFDTHCEIAEGRSANTSTGPYMDYLQGVASKLKHLDLNTEQVHRNEMHFSLTAPAVISFEGTSGPSNALVPYGGAVMVPYERPLQLVKKQRPRAKVDLDFETTRVWNLLMGKSAEPDGTDVEKERWWQQEREVFQGRANSFIARMRLVQGDRRFSPWKGSVVDSVVGVFLTQNVADHLSSSAYMALAASFPSRSVNNSCKDDATTEDNEQTTSTSALVGEKSVFDLFYNGARPDLEVGCEEVSMTYKKTHMEPKDNTRDSELVEDETYSFDYKSKYGSVCNHQGTGIEHKEKEQQLPDFSSVELTASTELMQQIQIQKISSSQILTSTTIQSKLSLSSEIPRNFVCGGSAAAYKQLGSNFDQGRSLTGNDTTVREIECHRLQMAARNDYGFGKPEIPSSSAMPFFLTVDPQQLKLRNETNVSSTSSNSPSDSASPNLKNGTSPLFMPFNSYMALMAECSSNKIAYTTLNTPKTSTELPVKLRHDKRSSFEAPDLKEHESVFPTHEIAVEATRKEYEYTSKSGFTSCNGVPDTAAQAPKAKKTRTATKKDAENFDWDKLRRQAYSEGQMKTRSVERRDSVDWEAVRCADAQRISHAIRERGMNNILAERIQNFLNRLVRDHGSIDLEWLRYIPPDSAKDYLLSIRGLGLKSVECVRLLTLHHLAFPVDTNVGRICVRLGWVPIQPLPESLQLHLLELYPILETIQKYLWPRLCKLDQQTLYELHYQMITFGKVFCTKSKPNCNACPMRSECKHFASAFASARLALPAPQEKSLVKLSNQFAFQNSSMHTMNSTHLPRLEGSLHSREFLPKNSEPIIEEPASPREEGPPETIENDIEDFYEDGEIPTIKLNMEVFAQNLENCIKESNNELQSDDIAKALVAISTEAASIPVPKLKNVHRLRTEHYVYELPDAHPLLQQLGLDQREPDDPTPYLLAIWTPEKENQSRYVRGTILVPCRTAMRGSFPLNGTYFQVNEVFADHRSSHNPIHVQREQLWNLQRRMVFFGTSVPTIFKGLTTEEIQQCFWRGFVCVRGFDMETRAPRPLCPHLHVVARPKARKTAATEQVL

SEQ ID NO: 3089 - DNA, 738 bp, Sorghum bicolor
atggtgggcggtggagagcattcgtccatggaccaccaccctgacgccgaagacctcgagcgcggcgagctgcgccgtgacgtgcctgagtttgcggacggcgacgacggggacgaggtagaaacccagtacttctcggacgcggaggaccggtcgtgggcgtcgcactcgcgccaggactccaccgcctaccaggactgcatctcgccgtgcgcctccgcccgcgcgagctccgtcgacgccgacgccgatggcgacgccgctggagaacactgcaggaagtcgtcatgcgtgtcagagggctcgctggaggacgttgacctggaggccggactgagcgagatcatcaaggccagtcctgagaaggccgaacagaactgccgcatttgccaccttggcctggagagcacggcggctgagtccggcgccggcatcacgctcggctgctcctgcaagggggacttatcctacgcccacaagcagtgcgccgacacctggttcaagatcagaggcaacaacgcaacgcaacggcggttcaggaagatgcatgtgaatgctgcggctggattgctggaatctcggacggcttcaggacaacaggcggccggccgaaaccgggcagtttttctcggcacccgcgaggattctcctccgagcgccaaggacaaagctcccggcgaaaagcagatgccgccagccccctacgtgccgttggcagtggcctcggagagcgcgtga

SEQ ID NO: 3090 - protein, 245 aa, Sorghum bicolor
MVGGGEHSSMDHHPDAEDLERGELRRDVPEFADGDDGDEVETQYFSDAEDRSWASHSRQDSTAYQDCISPCASARASSVDADADGDAAGEHCRKSSCVSEGSLEDVDLEAGLSEIIKASPEKAEQNCRICHLGLESTAAESGAGITLGCSCKGDLSYAHKQCADTWFKIRGNNATQRRFRKMHVNAAAGLLESRTASGQQAAGRNRAVFLGTREDSPPSAKDKAPGEKQMPPAPYVPLAVASESA

SEQ ID NO: 3091 - DNA, 939 bp, Sorghum bicolor
atggctgaatcctttgttctcaataccggcgcgaggatcccatcggttgggcttggcgtatggcaaatacaacctgacgctgctgtcaacgccatctacgctgctgtcaaggctgggtatcggcatatcgattgtgctccagcatacagcaatgagaaggaggtgggtttggctttgaagaaattatttgaagatggtgtggttaagcgtgatgatttgtttatcacctctaagctatggtctgctaatcatgcacctgaagatgtgaaagagggatttgataccacacttcaagatttgcagcttgactacttagatttgtacctcatccatggtccaatccgtatcaaaaaaggaactagcattacgagccctgaaaattttatccctacagatatccctactacatgggcagcaatggagaagttatacgaatctggcaaagctcgtgcaatcggcgtgagtaatttttcttgtaagaagctggatgatttgtttgccgttgctcgagtgcctccagcagtgaaccaggttgagtgccatccggtttggcagcaagacaagctccggaagttatgccaatccaagggtgttcatctttctgcattttcgcctttaggctcacctggatctcctggaatcaatgggtcaagtgtcctcgagaactcgattgtggtctctgttgcagagaagttgcagaaaacacctgcccaggtcgctctacgctggggaattcaaatgggccatagtgtactaccaaaaagcgccaatgaatcaaggattaaggagaacattgacatatttgactggtctattccagaagatttgatggcgaagttctctgaaatcaaacaggtcaggctgctgagagctgagtttgcagttcaccctcaaggcggctacaatacattagaggatttttgggatggtgaaatataa

SEQ ID NO: 3092 - protein, 312 aa, Sorghum bicolor
MAESFVLNTGARIPSVGLGVWQIQPDAAVNAIYAAVKAGYRHIDCAPAYSNEKEVGLALKKLFEDGVVKRDDLFITSKLWSANHAPEDVKEGFDTTLQDLQLDYLDLYLIHGPIRIKKGTSITSPENFIPTDIPTTWAAMEKLYESGKARAIGVSNFSCKKLDDLFAVARVPPAVNQVECHPVWQQDKLRKLCQSKGVHLSAFSPLGSPGSPGINGSSVLENSIVVSVAEKLQKTPAQVALRWGIQMGHSVLPKSANESRIKENIDIFDWSIPEDLMAKFSEIKQVRLLRAEFAVHPQGGYNTLEDFWDGEI

SEQ ID NO: 3093 - DNA, 1158 bp, Sorghum bicolor
atggagagctggttgcggggcccggcctataactgctccgggccgtgtccgacgcgactgcattccatctgccactgtcggggtgtcgaggccgcagatatttcggctccaacctttggaggcaggcaaaaccgcacagggcaccagagtgttggtacgcagcgcgcggtacggcgtatggccacccacttcgtcctcaacaccggcgcgaagatcccgtcggtcgggctcggcacctggcagtccgacaatggactcgtcggcgacgccgtctatgccgccgtgaaggcaggttacaggcacatcgactgtgctcaagcatacaacaacgagaaagaggtcgggtttggtctcaagaaagtgctggacgagggcatagtcaagcgtgaagatctcttcatcacctccaaactctggaacaccaaccatgcgccggaggacgtcccggttgcgctggacggcacactcaagaacctgcaaactgactacgtggatctttacctcatacattggccggtgagaatgaagaaagacgccgggttcggcccgcagagcgtggtcccgtcagatatccccgcgacgtgggcggcgatggagaagctgtacgacgccggcaaggcgcgcgccatcggcgtcagcaacttctcgagcaagaagctagcggacctgctcgccgtggcgcgcgtgcccccggccgtcgaccaggtggagtgccaccccgtgtggcagcagggcaagctccgcgccttctgcgtggccaacgggatccactctccgtacgtgcacgcagttctgcagagagttctttctaaaagttttatggcctactcgccgttggggtcgccgggaacgatgatggtgaaggcgggcgcggtgctggagcacccggtcgtcgtgtcggcggcggagaagctcgggaagacgccggcgcaggtggcgctgcgctggggcatccagatggggcacagcgtgctcccgaagagcaccgacgaggagaggatcagggcgaacttcgacgtctacgactggtccatcccggacgaattgttcgccaagttctcggagattgagcaggagaagctgattcgcgcgggcttttttgttgatcccgaaggcgtgttcaaatccatcgaagagttttgggatggcgagatctga

SEQ ID NO: 3094 - protein, 385 aa, Sorghum bicolor
MESWLRGPAYNCSGPCPTRLHSICHCRGVEAADISAPTFGGRQNRTGHQSVGTQRAVRRMATHFVLNTGAKIPSVGLGTWQSDNGLVGDAVYAAVKAGYRHIDCAQAYNNEKEVGFGLKKVLDEGIVKREDLFITSKLWNTNHAPEDVPVALDGTLKNLQTDYVDLYLIHWPVRMKKDAGFGPQSVVPSDIPATWAAMEKLYDAGKARAIGVSNFSSKKLADLLAVARVPPAVDQVECHPVWQQGKLRAFCVANGIHSPYVHAVLQRVLSKSFMAYSPLGSPGTMMVKAGAVLEHPVVVSAAEKLGKTPAQVALRWGIQMGHSVLPKSTDEERIRANFDVYDWSIPDELFAKFSEIEQEKLIRAGFFVDPEGVFKSIEEFWDGEI

SEQ ID NO: 3095 - DNA, 1467 bp, Sorghum bicolor
atgaatggcaacaataggacatcagttctgaatacaagcatttcttcagtcacttcaagacctacaacccctagtaggcgaagcagcacggttatcgcaccgaaacaatcagttccagctgcacgtccagtgcctgcaagatcctctactcctgttaaaactcgtccatctacaccagcaaaaactcgcccatctactcctacgagaactcgtccaacagcaccaaactcttcaactgattcggctgctgccaagaccacatccacacatagtgtgaggccatcaactccaaattcccggtcccgtattgttcccaactcatcttcaagtgcaactcatgcaataagccgcccgagcgcctcctcgggtacaacaagcagaccagggtcttcctcaggtaatgttcctgggataagccgtgccacctcattgtcctcaagttcggttccttcaatgagccgttccagttcacgatcatctacacctacacgccagcctgcaattcgttcatcagctccatctattggtcgttctccttctgttggacggaattctagtatgaacggctttacatctgcgtcccgttctgcagccagtggtggccggaactcagcaccttcatcagctccatcatcacgtccaagttctccgaatccacgaccccgagctccagtgcgaccacttgatatccccgattttccaaatgaaactccaccaaatctaaggacaaaattacctgaaagaccactatccgctggcagatcacggccaggaatggctttaggcataagatcaaccccaaatactgaaccttcagctgcttcagctcctgtgaagaaggtctctgtgcctgctgttagtcgaagtaaattttctgatacatcatcaaagacctctactctcacaaatggacaccaaaatcgacaggctgaaaggtccactattgacagtcaagctaatagaccctcaagacctatcacaggcacagataatggatttgggaggtcgatatcaaagagatcacttgacatggctatcaagcacatggacattcggcagaacttgggtggcattcgtggtgcatccctgtttccccagagcattcgctcggctgctgccaaggtccgtccagctcgggcatcagacccggggcatggcatcacaaacagcgaccatcactatattgacaatgcaagtagcgtgaacggacacctctctggggactcaaatggggctctctcacgcaatggtggcagctcaacggattcgccagacagggggagcatcggaaccaaggagaccctgagcgagctggacatctatggtagctcgcgctatgaagcaatgctgctgagggaggacgtgcgcaacacaagctggctgcatggattcgatgacaagcctgaccaaagcccgctgtttgaccaccggttcgagccgctgccagagcccttcagcccgttatga

SEQ ID NO: 3096 - protein, 488 aa, Sorghum bicolor
MNGNNRTSVLNTSISSVTSRPTTPSRRSSTVIAPKQSVPAARPVPARSSTPVKTRPSTPAKTRPSTPTRTRPTAPNSSTDSAAAKTTSTHSVRPSTPNSRSRIVPNSSSSATHAISRPSASSGTTSRPGSSSGNVPGISRATSLSSSSVPSMSRSSSRSSTPTRQPAIRSSAPSIGRSPSVGRNSSMNGFTSASRSAASGGRNSAPSSAPSSRPSSPNPRPRAPVRPLDIPDFPNETPPNLRTKLPERPLSAGRSRPGMALGIRSTPNTEPSAASAPVKKVSVPAVSRSKFSDTSSKTSTLTNGHQNRQAERSTIDSQANRPSRPITGTDNGFGRSISKRSLDMAIKHMDIRQNLGGIRGASLFPQSIRSAAAKVRPARASDPGHGITNSDHHYIDNASSVNGHLSGDSNGALSRNGGSSTDSPDRGSIGTKETLSELDIYGSSRYEAMLLREDVRNTSWLHGFDDKPDQSPLFDHRFEPLPEPFSPL

SEQ ID NO: 3097 - DNA, 195 bp, Sorghum bicolor
atggcgcggctgcactggctcgaggccgtcctgccgctgggaatcatcggcggcatgctctgcatcatgggcaacgcccagtatttcatccacaaggccgcgcacggcaggccgaagcacatcgggaacgatatgtgggacgtcgccatggagcgccgcgacaagaagctcatggagcagtcctccggcaattag

SEQ ID NO: 3098 - protein, 64 aa, Sorghum bicolor
MARLHWLEAVLPLGIIGGMLCIMGNAQYFIHKAAHGRPKHIGNDMWDVAMERRDKKLMEQSSGN

SEQ ID NO: 3099 - DNA, 993 bp, Sorghum bicolor
atgacagaagctgcagttacaaggtactggtgccatggatgtgagaaggccattgaggaggccatgggggaggagatcaagtgcccattctgtgatggtggattcattgaagagatgatcggggaggaatttgaggggttggtcagtcagcagtcagagcgggatttatcacaatggggaacgtcaaacaacccttttgagcagccaggatcggcagcagacagtgaggatgaagatgacgacgatgatgatataggccgtgaatttgagggtttcatcaggaggcatggacgagcatcagctctgcgtcgtgtgcttgacagcatccaggatgaccttagagctgacagggaaagggaccactccgttctgatcaatgccttcaaccaagccctcgctctgcaaggctcggtacttgacgctgatgaggctcgagatgaccaaggtggatctaacaatgatgatggcttgcttgaagaatatgtcctgggggctgggctgagcctgctgcttcaacatttggctgagaatgacccaaaccggtatggcacccctcctgcaaagaaagaggcggttgaagctctgcccactgtccaaatagcagaggttgtcagctgttcagtctgccttgatgatcttgagctggggtcccatgcaaagcagatgccttgcgagcataagttccactctccttgtatcctgccatggcttgaactccatagctcctgccctgtgtgccggtttgagctgccatctgaagagacgaaagatttgaatgagcctagcaatgtcgacagaacagagagcacccaagaggaagtcagggctgatggccctgaaaatgacagtgagagcagtaacagagcatgggcccttgttccttggttcagtgggctattctcaacacctgaaccgcaaactgccagaggcgctttcaccgatcaacagactccatccgcttctggaaccaacccgaatgctggggaaagttga

SEQ ID NO: 3100 - protein, 330 aa, Sorghum bicolor
MTEAAVTRYWCHGCEKAIEEAMGEEIKCPFCDGGFIEEMIGEEFEGLVSQQSERDLSQWGTSNNPFEQPGSAADSEDEDDDDDDIGREFEGFIRRHGRASALRRVLDSIQDDLRADRERDHSVLINAFNQALALQGSVLDADEARDDQGGSNNDDGLLEEYVLGAGLSLLLQHLAENDPNRYGTPPAKKEAVEALPTVQIAEVVSCSVCLDDLELGSHAKQMPCEHKFHSPCILPWLELHSSCPVCRFELPSEETKDLNEPSNVDRTESTQEEVRADGPENDSESSNRAWALVPWFSGLFSTPEPQTARGAFTDQQTPSASGTNPNAGES

SEQ ID NO: 3101 - DNA, 3735 bp, Sorghum bicolor
atggccatggagatctccccgacgcagtcgccaccgcggacgccgcgtagggcggcgaagccgcggctgttcatcaaggagatggtcctccgcaacttcaagtcctacgcaggggagcagcgcatcggtcctttccacaagagcttctccgctgttgttgggccaaatggcagtggaaagagtaatgtcattgatgcaatgctttttgtgtttgggaagcgtgcaaagcagatgcgcctaaataaggtctccgagctcatacacaattcttccaatcatcagaacctagacagtgctggtgtttctgttcattttcaagaaatcattgacatggatgatgggaactacaatgctgttgagggtagtgactttgtcatctcaagggttgctttccgtgacaacacttctaaatactacataaatgagcgtggaagcaatttcactgaagtaactaaactgctgaagggcaagggagttgaccttgataataatcgctttctgggcactgtacagggtgaggttgagcaaatctccctaatgaaaccaaagtctcaaggtccacatgatgaaggttttctggagtatcttgaagacataatagggacaaaccagtatgttgaaaaaattgaagaagcgtacaagcaacttgaagtgctcaatgaaaagcgaacagcatcagtgcagatgctaaaattagctgagaaggaaagagacagtttagagagtgcaaaaaatgaagctgaaacatacatgctgaaggaactttcgcttctgaaatggcaagaaaaggcaacgaagctggcttctgatgatgctatctcacatgttaatcaatgtcaagagaatgtggcagacctggaaaagaatcttgcctccgaaagggagaagatacagcagaattctcaaactctgaaggaaatggagtctatttacaatagacatgtcaaaaggcaagaggaccttgaaaataacatgaagagctgcaaggaccagtttaaagagtttgagaggaaagatgtaaaatacagggaagatttaaagcatcttaagcagaatatcaagaagctggatgacaaagctgaaaaggatacatcaaaatgtgatgaaaaaacaaaagagatagaggagtcatccaatctcattccacagctggaggcagaaatacccaaattgcaagagcgacttaatgaagaagagaaagtcttagagcagatcaaagcatcctctcgagaacaaactgagaggcttcgtgctgaacttactcaagtacgaattgaacttgaaccatgggaaaatcaaattattgagcataaagggaggttagatgttgcatctgctgagaaaaagttaatgaaacaaaagcaagatgcagctcaagcagaattaactgatgcacaaaatcagatggaaagtataaaggagaaagttgaaacaaaggattcatacattgtagagcttcaagaaaaaatagagaaacaccagaatgaagcatctgaagctcgcaaaattgaacaggaatgccaaaaacaggaggattcactgatccctcgggaacaagccgcaaggcagacagttgcagagatgaaaaccactagggattctgagaagaaccaaagtactgctctgaaagcaattttgcaagccaaggaatcaaatgaaatacaaggcatttatggtaggcttggtgatcttggagcaattgatgcaaaatatgacgtggccatatcaacagcagcttcatctgggcttaattatattgtggttgaaacaataaattcagctcaagcttgtattgagttgttacgtagaaggaaccgtgacgaaactgtaacttgtttgatcctggaaaaacaaacacacctccttcacaaaattaaagagaaagtaaaaacacctgaaggtgttccacgcctttttgatctggtaaaggttaaagatgagaagctgaagttagccttcttccatgtcttggggaatactgttgttgcaaatgatcttgatcaggcttcgcgaattgcatatactgcagcaaaggagttccgtcgggtagttaccctgggtggtgaactatttgagaagtctggtaccatgagtggtggtggtaaaagggtacaacgaggcatgatgggaacagctatccgagaaagcttttcagaagaggctattaaaaaagctgagaatgaacttaccaagcttgttgacgaactcaacgagctgcgcgaaaaaatgaatgatgctaaaaaacactatcgatccatggaagatgctaaatcccgtcttgaaatggaattggcaaaagctaaaaaggaggttgagagtatgaatgcacagtatatttacaatgaaaagcgactagagtctctgaaagccgcttcgcaacccaaagctgatgagcttcgcagaatgaaagagctggatggcatcatatctagtgagcaagctgaactagatagactaacaaagtgttccagcaaacttaaagatcaggctttagaacttcaacagaaaattgaaaatgctggagggaagatgctgaaggaccagaaggcaaaagttggcaacatccaatctgaacttgacaaaacaagttcagaaatcaacagacacaaagttaacataacttcaggtgagaagttggtgaaaagattaaccaagggcattgaggaatccaagaaagatagagaaaagctttctgctgaaaaggagaatatgatgtctatattcaaagagattgagaagaaagcatttgttgttcaagaagagtataagaaaacacaggagatgatagacaaccataaggttgagcttgacaaaactaaggaagaatacaccaaactaaaaaaagcaatggatgaactgagagcctcggaggttgacgctgagtacaaattgcaagatacaaaaaaacttgccaaggagtgggaaatgaaggtgaaaacattcaagaaaagggttgatgaaattcagacaaatgttgttaaacacatggatcaaatccaaaaggatgctgttgatcctgagaaactcaaagtgactctaggtgatgagcaactaaatgacacgtgtgacatgaaaagggcaatggagatggtggcattgttggaggctcagattaaagatttgagcccaaacctggattccatagcagagtaccgcacaaaggctcggttgtatggtgaccgtgttgatgagctaaatgctaccactcaggaacgtgatgatctgaaaaagttgtacgatgggttaaggaagagaaggctagatgaattcatggctgggttcaacataatatctctgaaactgaaggagatgtaccagatgattactcttggaggtgatgccgaactggaacttgttgattccttagacccattttcagaaggtgttgtttttagtgtgaggcctccaaagaaaagctggaaaaacattgccaatttatctggtggtgagaagacgcttagttcgctagctttggtgtttgctcttcaccactacaaacctactcccttatatgttatggatgagattgatgctgcgttggactttaagaatgtatcaattgtgggacattatgtgaaagataggaccaaagatgcacagttcatcattataagtctgaggaacaacatgtttgaactagccgacaggttggttggtatttacaagacggacaactgcaccaagagtataacaatcaacccaggaagcttcgccgagagcatgaaagtagtgtag

SEQ ID NO: 3102 - protein, 1244 aa, Sorghum bicolor
MAMEISPTQSPPRTPRRAAKPRLFIKEMVLRNFKSYAGEQRIGPFHKSFSAVVGPNGSGKSNVIDAMLFVFGKRAKQMRLNKVSELIHNSSNHQNLDSAGVSVHFQEIIDMDDGNYNAVEGSDFVISRVAFRDNTSKYYINERGSNFTEVTKLLKGKGVDLDNNRFLGTVQGEVEQISLMKPKSQGPHDEGFLEYLEDIIGTNQYVEKIEEAYKQLEVLNEKRTASVQMLKLAEKERDSLESAKNEAETYMLKELSLLKWQEKATKLASDDAISHVNQCQENVADLEKNLASEREKIQQNSQTLKEMESIYNRHVKRQEDLENNMKSCKDQFKEFERKDVKYREDLKHLKQNIKKLDDKAEKDTSKCDEKTKEIEESSNLIPQLEAEIPKLQERLNEEEKVLEQIKASSREQTERLRAELTQVRIELEPWENQIIEHKGRLDVASAEKKLMKQKQDAAQAELTDAQNQMESIKEKVETKDSYIVELQEKIEKHQNEASEARKIEQECQKQEDSLIPREQAARQTVAEMKTTRDSEKNQSTALKAILQAKESNEIQGIYGRLGDLGAIDAKYDVAISTAASSGLNYIVVETINSAQACIELLRRRNRDETVTCLILEKQTHLLHKIKEKVKTPEGVPRLFDLVKVKDEKLKLAFFHVLGNTVVANDLDQASRIAYTAAKEFRRVVTLGGELFEKSGTMSGGGKRVQRGMMGTAIRESFSEEAIKKAENELTKLVDELNELREKMNDAKKHYRSMEDAKSRLEMELAKAKKEVESMNAQYIYNEKRLESLKAASQPKADELRRMKELDGIISSEQAELDRLTKCSSKLKDQALELQQKIENAGGKMLKDQKAKVGNIQSELDKTSSEINRHKVNITSGEKLVKRLTKGIEESKKDREKLSAEKENMMSIFKEIEKKAFVVQEEYKKTQEMIDNHKVELDKTKEEYTKLKKAMDELRASEVDAEYKLQDTKKLAKEWEMKVKTFKKRVDEIQTNVVKHMDQIQKDAVDPEKLKVTLGDEQLNDTCDMKRAMEMVALLEAQIKDLSPNLDSIAEYRTKARLYGDRVDELNATTQERDDLKKLYDGLRKRRLDEFMAGFNIISLKLKEMYQMITLGGDAELELVDSLDPFSEGVVFSVRPPKKSWKNIANLSGGEKTLSSLALVFALHHYKPTPLYVMDEIDAALDFKNVSIVGHYVKDRTKDAQFIIISLRNNMFELADRLVGIYKTDNCTKSITINPGSFAESMKVV

SEQ ID NO: 3103 - DNA, 1566 bp, Sorghum bicolor
atgcagcgtggcagcacgcgacaggcccgtcgctgcctcacccgggccaagccgcaggaaggcaggatggcagtcaaggcctcgcgcattcccaaggccccgccggccctcctgttcccgctgccgcggcgcaggtcgccatgcccgttcccgaattttttttttctcgctatcaatgccctctgcccccgagatttggacggatcggcatcggcatccgccgcccccgcccgggcagaaaccaacgccccgcccgacgagcgctggggctctgggctgccgtgcgcgtgccgcccgctcggcgctcgctgctgcgtgctgccgcaggcgcagggtaccaaacgccccacccacccaccggatagaccgtgcgcgggtgccgatttcatggcgcccgagggcccggcgtctcccggggaacgcggcgcggcgcggcgcggcggcgtccctatcgaacccgccgctgggcgccggctggcagtcctcacttgcgggaccagcaagctctcagcaggccccacccgtcatgcacgagtgggtttgccggtgaagaggacgcgcgtgttcgtgcggctcgtgcgtgggtctcggcgtgaagagaagagtcatgcggccgcgcgtgccgcaggcgcggtacggcagggcggtggggtgacaggacgactggacgaggcgtccgtgctccactccaccagctcgcagtggcagccagtgcagtgtggtagggctggcgtcacggcgccagtcccgcgtcgcgccggacgagaccagtcgcacgctgtccagaacaggacgacgaggacccgcaaggcgtcagatcgcgcggcggctaggcggattcatgacgccgtgcgcttttgctctcgcgcccacgcccgagctcagagggcgagagcgtgcggtgcggtgcgggtgcagcagatggactgggacatgagaggaggagggggagggcacggtggcgctgtcggggacggtggtggtgggccgggaggacgcggccttactgtcggaggcgttgctgtcgggggcggcggggaccagcaccagcagcgcgtggaggcgcactaccgcggcgtgcggaagcggccgtggggccggtacgcggcggagatccgcgacccgtggaggaagacgcgcgtgtggctgggcacctacgacacccccgtcgaggccgccatggcctacgaccgcgccgccgtcgcgctgcggggctccaaggccaggctcaacttcaccgctgggcgcggcgcctgcccccgcgccacgcccgtccaggctcgcccgttcccactctcgcacccggcggcgccaggcggccacttcgtcggcgggctcgacgtcacccactcctcgccctggcacgtcctctacctcccgcccagcaggctgcaccaccaggccgtggcggttccgccgccgatgccgcccctcgtcgcagtggcggaggacgtcgtcgcctcgtcgaagccgtccacggcgctggagctccggacggggcctaaggcactcccgttcgacctcaacgagccgccgtcgctgatgttcggctcgcgatctccatga

SEQ ID NO: 3104 - protein, 521 aa, Sorghum bicolor
MQRGSTRQARRCLTRAKPQEGRMAVKASRIPKAPPALLFPLPRRRSPCPFPNFFFLAINALCPRDLDGSASASAAPARAETNAPPDERWGSGLPCACRPLGARCCVLPQAQGTKRPTHPPDRPCAGADFMAPEGPASPGERGAARRGGVPIEPAAGRRLAVLTCGTSKLSAGPTRHARVGLPVKRTRVFVRLVRGSRREEKSHAAARAAGAVRQGGGVTGRLDEASVLHSTSSQWQPVQCGRAGVTAPVPRRAGRDQSHAVQNRTTRTRKASDRAAARRIHDAVRFCSRAHARAQRARACGAVRVQQMDWDMRGGGGGHGGAVGDGGGGPGGRGLTVGGVAVGGGGDQHQQRVEAHYRGVRKRPWGRYAAEIRDPWRKTRVWLGTYDTPVEAAMAYDRAAVALRGSKARLNFTAGRGACPRATPVQARPFPLSHPAAPGGHFVGGLDVTHSSPWHVLYLPPSRLHHQAVAVPPPMPPLVAVAEDVVASSKPSTALELRTGPKALPFDLNEPPSLMFGSRSP

SEQ ID NO: 3105 - DNA, 849 bp, Sorghum bicolor
atggcggggaagcacgggcgcaacggctacgacgacgacaacgtcaaccccttcgcgggaggaagtgttccacctgccaccaattctcgtctctcacctctatcacatgaaccggctgatttctacaatgtggacattcctctcgactcatcaaaggatctgaagaaaaaggagaaagaactccaggctatggaggctgagctaaacaaaagagaacgggaattgaaaaggaaggaagaggcagcatcccgagctggcattgtgatagaagagaaaaattggcctcccttttttcccctcatccaccacgacatttccaatgagatacctatccatctacaaaggatgcagtaccttgcattctcgtcattcttgggattggtagcgtgtctcttttggaatatcatagcaactacaacagcatggattaaaggggaaggtgttatgatctggctgcttgccattatctacttcatatctggtgcacctggggcttatgtgttatggtatcgacctctttataatgcaatgagaactgagagcgctttgaagtttgggtggttttttctattttacatgattcatataatcttctgtgtgtgggcagctgtggctcctccattccctttcaaaggaaaatctttggctgggattttacctgcaattgatgtcataagcaagaatgctattgtggggatattttactttgttggatttggcttgttctgccttgaatcacttctgagcatcggtgtcattcagcaagtatacatgtatttccgtggaagtggaaaagctgcagagatgaaacgtgaggcagcacgtagtgctctaagttcagccttctga

SEQ ID NO: 3106 - protein, 282 aa, Sorghum bicolor
MAGKHGRNGYDDDNVNPFAGGSVPPATNSRLSPLSHEPADFYNVDIPLDSSKDLKKKEKELQAMEAELNKRERELKRKEEAASRAGIVIEEKNWPPFFPLIHHDISNEIPIHLQRMQYLAFSSFLGLVACLFWNIIATTTAWIKGEGVMIWLLAIIYFISGAPGAYVLWYRPLYNAMRTESALKFGWFFLFYMIHIIFCVWAAVAPPFPFKGKSLAGILPAIDVISKNAIVGIFYFVGFGLFCLESLLSIGVIQQVYMYFRGSGKAAEMKREAARSALSSAF

SEQ ID NO: 3107 - DNA, 1464 bp, Sorghum bicolor
atgagggacgaggcgatgggctctgcggcggagctgctggcgccgcggatgctggtgtccccctccagccgcgtccaggagctcgagaggttctcgcattacgtcgctaggcaaattggctttgacgatgtgaaggaatgcccccacctgtgcacgctagcttacgattatctcaggaagaacaagggctatgaagagaatatttttgcattcttccagaataacgtggatcctgaacccctgattgtgaagtttatcgaggagcttgacaaatgtatagttggctacttctccttccattggaaatatgccacttacataattacccaggttctcacggtagaaggtgcgactaaaagaaagttcaagaattttgtgctagaggccaccagggaacagagattcgagagagtgacaagaaacttgaaggttacaaggtttttctccacattggtggaggaactgaaggccataggactatctagccgtgatgattctccacggaatgatgtgatggttccagtagcacactgcaatcgcagcccggttttacttctgatgggtggtgggatgggagctggcaagagcactgtacttaaagatatccttaaggaagcattttggtctggagcagcagcgaattcagtgattgtggaggcagatgcattcaaggaaaccgatgtaatctaccgagccattagctctagaggccaccacaatgacatgctgcagacagcagagctggtgcaccagtcatccttggatgcagcctcctcgctcctcgtcactgcactcaacgaaggccgggatgtgatcatggatggcactctgtcctgggaaccgttcgtgcagcaaacgatagccatggccagggctgtgcacaggcagcgttaccgcatgggacgtggctacaaggtaacagatgatgggacaataactgaggagtactgggagccggttgaggactctaatactgatgaggagaacgaagtaccagcaaggaagccttaccggatcgagctcgttggtgtggtctgtgatgcatatctagcagttgtcaggggaatcaggagagctgtagtcactgggagagcagtgagggtgaagtcgcagctgcagtctcacaagcgatttgctacagctttcaacagttactgcagccttgtcgacaacgcaaggctctacagtaccaacaccttgggtgttcctaagttaataggatggaaggatggcgagagcagcttactggtggatcccgcagaaatcggctgcttggacagactaagaagtttgaacgaggaggccaactgcgtccatgagctatacgccgacggccaaccgacaggaggctcgtcgtcagcatggcaggacctggtcatgtcgccattgagggcatcggcgcagggggagctcaaggctgccatcgaaaggaacgaggcacgcttcaatcctgcattgccgtag

SEQ ID NO: 3108 - protein, 487 aa, Sorghum bicolor
MRDEAMGSAAELLAPRMLVSPSSRVQELERFSHYVARQIGFDDVKECPHLCTLAYDYLRKNKGYEENIFAFFQNNVDPEPLIVKFIEELDKCIVGYFSFHWKYATYIITQVLTVEGATKRKFKNFVLEATREQRFERVTRNLKVTRFFSTLVEELKAIGLSSRDDSPRNDVMVPVAHCNRSPVLLLMGGGMGAGKSTVLKDILKEAFWSGAAANSVIVEADAFKETDVIYRAISSRGHHNDMLQTAELVHQSSLDAASSLLVTALNEGRDVIMDGTLSWEPFVQQTIAMARAVHRQRYRMGRGYKVTDDGTITEEYWEPVEDSNTDEENEVPARKPYRIELVGVVCDAYLAVVRGIRRAVVTGRAVRVKSQLQSHKRFATAFNSYCSLVDNARLYSTNTLGVPKLIGWKDGESSLLVDPAEIGCLDRLRSLNEEANCVHELYADGQPTGGSSSAWQDLVMSPLRASAQGELKAAIERNEARFNPALP

SEQ ID NO: 3109 - DNA, 2991 bp, Sorghum bicolor
atggcggacgtggggagcctcgagaggatgggccgggagctcaagtgccccatctgtttgagcctgttcacttcggcggtgtccatcacctgcaatcacatcttctgcaacgcctgcctgacggagtcgatgaaatctgcctcctgctgccccgtatgcaaggtcccgttccaccggagagaaatacggccagcccctcacatggacaatttggtgtctgttttcaaaagcatggaagctgcagcaggcactagtattgtgtcaacacagctgactcctgcacccaaagttgcagagtgtggtgggaacagtgctgggaagcctaaaaggtcaaataaaaagaagccagcatccaggaataaaaagaatacacccaaagctactaaaacttctgcatcttgctctactgcaaaaccttcaatctccaagaacaaaagaatacacgttacaccattccctgaatctgagacaccaataaggcccaagaaggttatgaagtctgatgagcaaaaaagtaagcagaatggtgatgttaatgaagaggataaagataaaaccctgaattctgatataccagaaagcccttcattgtcaccttttttctggctgagggaagaagaggaaaatgaaggtggcactgctgaaactttgagtgaaccaccatcattggacacacccttgcgtcacaatgcgcctacctttagtgatatcaaagattctgatgacgaaaggtctaatgatatgactcctaatagcaaagctgaggtttcagaaatattcgacagtgaaatctttgaatggagccaaagaccttgctcccctgagctgcgttctaccccactgaaaagtcagggtaaattgaagaatattctagatcaaatcacagaggtggatgatgatgaagatatgaatcttggtggttcatttgataagttagaccttgaaagtaatgtagctcagcctctcaatgccgaggaagttaagaagaaaaagttagcaagacctaggaaaagaaagaattcaaaactgcccagttgtggcaaactatgtacaagaggatctgatgctgagcaccaagttgcaaatatcccagaaagtattgttgcaaagccatggcaaaaggacaatagtaaaaaagagagaaatacttcaaatggaggaaacatggtctctggcagcaacactagagctgtcttctctagtgataaatctatgaatacattttcccctcaagcaggtggtttgggcaatgaagtacctgagaaccagctttcagaaaggatccccaaaaagggtacaaacagtcgaagaaaacttgaaatagcaggggatagtgcagtgaagactgcagagaataaatctgaacaaagagggaagcggataagaagaatctctgatggtgctgtagctgaaaagataagaattctttcagaggctgaaaatgaaatagaattgtttcagcttcacagcctcacaaaaggctgcacccaacataaacccttggacggtagaagtaaaaaaaacattgtatcaaacattagtccaaatacaccaagcattttacctgggagggaccaatttaacattggtccaaatacaccaagcattttacctgggaggtgcccattaaatgaggccatacgcacagttccttcagtaaggaatgtctctgttaagaatggtagtgcgaaatctattgaacaacaagattactcaggaactatcagatcatgcactgcacgcaatgctgtcctgaagaaatgtgagggtaaagcttctaagctttcctgtgctttctgccagtctgatgagatcacagagggatctggagagatggttcactaccataatggaaagcaagtacctgcagcatttgatggaggggccagtgtagtacattgccacaaaaactgtctggagtgggctcctgatgtctactttgaagatgactctgtctttaaccttacaaatgagcttgctagaagtaaaagaatcaaatgtgcttgctgtggaattaaaggtgctgcgcttggatgctttgagacgagttgtcgaaaaagcttccatttcacctgtgctaaattaatcccagaatgtagatgggataatgaaaactttgtgatgctatgccctttgcaccaatcttcaaagttgccaagagaaacttctgggttgaaaaagaagtcgcataggaaactagcaccaaaagggccatctcaagtaaacactagtcaatgtcatggtaataaatggacatggccatctggatcaccagagaaatgggttctctgctgttcagccctttctgctgcagaaaagggtattgtatcagaatttggaaaactagctggtgtgcctatctcaacaagttggagtcctaatgttacccatgttattgcatcaaccgacatgtctggtgcttgcaagcgcacactgaagtttctgatggcaatcctgaatggcaaatgggttatctccattgactgggttaaaacatgcatggaacttatggaaccagttgatgaactgaaatttgaagtttccactgatgtacatgggactgctgagggtcccagattaggtagacaaagagttatcaacaagcaacctaaattattcgacggctttcagttctatctccatggagattactccaagtcctacaggggctacctgcaagaccttgtggttgcagccggtggaactgtcctgcagaggaagcctgtgtcaagaaatcagcagaagttgcttgacgacagctccttcatcctcatcgtctacagcattgagaaccaagacaaggcaaaaccaggatcaagggctggcatcaatactaatcatagtcaagttgatgctcaagctctggcctgtgcctctggtggcaaagttgtgagcagcgcatggattattgactccatagcagcttgcaaggttcaaccctttaagggagccttccatgctgccctacatgtgtgcttgcatgcacggtag

SEQ ID NO: 3110 - protein, 996 aa, Sorghum bicolor
MADVGSLERMGRELKCPICLSLFTSAVSITCNHIFCNACLTESMKSASCCPVCKVPFHRREIRPAPHMDNLVSVFKSMEAAAGTSIVSTQLTPAPKVAECGGNSAGKPKRSNKKKPASRNKKNTPKATKTSASCSTAKPSISKNKRIHVTPFPESETPIRPKKVMKSDEQKSKQNGDVNEEDKDKTLNSDIPESPSLSPFFWLREEEENEGGTAETLSEPPSLDTPLRHNAPTFSDIKDSDDERSNDMTPNSKAEVSEIFDSEIFEWSQRPCSPELRSTPLKSQGKLKNILDQITEVDDDEDMNLGGSFDKLDLESNVAQPLNAEEVKKKKLARPRKRKNSKLPSCGKLCTRGSDAEHQVANIPESIVAKPWQKDNSKKERNTSNGGNMVSGSNTRAVFSSDKSMNTFSPQAGGLGNEVPENQLSERIPKKGTNSRRKLEIAGDSAVKTAENKSEQRGKRIRRISDGAVAEKIRILSEAENEIELFQLHSLTKGCTQHKPLDGRSKKNIVSNISPNTPSILPGRDQFNIGPNTPSILPGRCPLNEAIRTVPSVRNVSVKNGSAKSIEQQDYSGTIRSCTARNAVLKKCEGKASKLSCAFCQSDEITEGSGEMVHYHNGKQVPAAFDGGASVVHCHKNCLEWAPDVYFEDDSVFNLTNELARSKRIKCACCGIKGAALGCFETSCRKSFHFTCAKLIPECRWDNENFVMLCPLHQSSKLPRETSGLKKKSHRKLAPKGPSQVNTSQCHGNKWTWPSGSPEKWVLCCSALSAAEKGIVSEFGKLAGVPISTSWSPNVTHVIASTDMSGACKRTLKFLMAILNGKWVISIDWVKTCMELMEPVDELKFEVSTDVHGTAEGPRLGRQRVINKQPKLFDGFQFYLHGDYSKSYRGYLQDLVVAAGGTVLQRKPVSRNQQKLLDDSSFILIVYSIENQDKAKPGSRAGINTNHSQVDAQALACASGGKVVSSAWIIDSIAACKVQPFKGAFHAALHVCLHAR

SEQ ID NO: 3111 - DNA, 2409 bp, Sorghum bicolor
atgaggggcgttagggcggatggtggcggtggcggcgccggaggcggaggtccgtcctcgtcttccaccgcagacaactcgcgcttcgacgcggcgcagtactccttcttcggcaaggcgcccatgcagggggcggagctcggtggccttttggatggaggtgtagacggcgatggtggtggattcggtggacctgatgatggtggctaccagttctcttctacaggcgaggagattgattgtatcagtaacttgtcggaaattgatgatcttgcaagcacttttgcaatgttgaaccgaagtattagcgggacaaggaatcctggagttattggtgacagacgatcaatttcgagggaaagttctttgactgctgattgggctcaagatgctgacttctccaattgggtagatcaggatatactagatggtgatgaatccctggacagcaaacaatggtgctcgcagctgcaatcttcatctcactttggagagtctaaaccactgtctcgtacatcttcatatcccaatcaaccactacagcaccgctcaagtgaacctattcttttgcacagatctacttcatttacatcctatccaccaccaggtggaagtcctgcattgccttatcctgctcaaggtcttacacggcactcaagcattccatcacctggtgctggtcaccacatgggttctccgagttcatcgctttctggttccccatatcatatgcctggtctatctcatggactgccttatggacgaagcatgtcttacaccactggagatctgtcaatgaacaatgtcctacaaaatgagtggtcaaaccaagctggcccacttgcctttgatcatcttaaccggcggcacagtttattgcagccacagttatctgttccaagtagctcaatgtcttcattgcttttttctcagcagcaccagagattaccaccaggccagccgcctcttcagaattacataaacatgcagcctcacctattctatcatcaccaatctcctgatgttccttcaccaagagacaagcgatcaaggtcaggaagaggaaagcacaacatacgcttttctcaacagccttctgatgcaggtagccagaatagtgagagttcagggataaagttcagatccaagtacatgtcatctgaagagattgaaagtatcttaaaaatgcagcactctggaaatcacagcaatgatccttacatcgatgactattaccaccaagcttgcaaagccaaaagatctgtaacttctcagaagtccaatttctgccctatgtcaataaaggacttcccctcaaaatcccggtctggtgttgatcagcattcatatctacaggttgacgctaatggaggagtttcattctctgccatacgtagacctcgccctcttcttgaagctgatttgcctggatctggtgatggtttttatgatcataagtcatccacaaggccgctggagaaagaaccaatgcttgcagccagaataaccgttgaagattctcttcgtcttcttctggatgttgatgatattgatcggtttttacagtctagccagccacaggatagcagtttccaactgaagcgaaggcgacaggtcctgcttgaaggcttagctacatcacttcagcttgttgacccttttggccccaacaaacctggccattcaggtggattggcccctaaggatgacctaatttttcttcgtattgtttctctgcccaaaggacggaagcttttggcgcgctatcttagacttcttgtctctggaagtgagctgacccggatagtttgcatggctgttttccgacatcttaggagcttgtttgggggcttgccgtcagactctagtgctgcagaaacaaccattggtcttgccaagactgtttcctcttgtgtgcaccatatggaactcagtgctctgagtgcctgccttgcagctgttgtctgttcatcgcagcaaccacctctccgaccacttggtagtgctgctggtgatggggcctctgtggtaatcaaatctgtgctggatagagcgactgtgctactggctgatcctcattccgcagccaactacagcagatcagcacgttcactttggcaagcatcatttgatgccttctttggactcctgacgaagtactgtgacagcaagtatgaaagtattgtgcagaggtttgccatgcagggatccaactccatgggaggacctgaaaccaccaaagcagtcagcagggaaatgcctgttgagctgttacgtgcaagtcttcctcatactaatgaacagcatcgtcagacactgctagattttgctcggaaatctacacatgtatctggtttcagtcctaatgctagccgtggactcatcaattctgaatcagttccaggttaa

SEQ ID NO: 3112 - protein, 802 aa, Sorghum bicolor
MRGVRADGGGGGAGGGGPSSSSTADNSRFDAAQYSFFGKAPMQGAELGGLLDGGVDGDGGGFGGPDDGGYQFSSTGEEIDCISNLSEIDDLASTFAMLNRSISGTRNPGVIGDRRSISRESSLTADWAQDADFSNWVDQDILDGDESLDSKQWCSQLQSSSHFGESKPLSRTSSYPNQPLQHRSSEPILLHRSTSFTSYPPPGGSPALPYPAQGLTRHSSIPSPGAGHHMGSPSSSLSGSPYHMPGLSHGLPYGRSMSYTTGDLSMNNVLQNEWSNQAGPLAFDHLNRRHSLLQPQLSVPSSSMSSLLFSQQHQRLPPGQPPLQNYINMQPHLFYHHQSPDVPSPRDKRSRSGRGKHNIRFSQQPSDAGSQNSESSGIKFRSKYMSSEEIESILKMQHSGNHSNDPYIDDYYHQACKAKRSVTSQKSNFCPMSIKDFPSKSRSGVDQHSYLQVDANGGVSFSAIRRPRPLLEADLPGSGDGFYDHKSSTRPLEKEPMLAARITVEDSLRLLLDVDDIDRFLQSSQPQDSSFQLKRRRQVLLEGLATSLQLVDPFGPNKPGHSGGLAPKDDLIFLRIVSLPKGRKLLARYLRLLVSGSELTRIVCMAVFRHLRSLFGGLPSDSSAAETTIGLAKTVSSCVHHMELSALSACLAAVVCSSQQPPLRPLGSAAGDGASVVIKSVLDRATVLLADPHSAANYSRSARSLWQASFDAFFGLLTKYCDSKYESIVQRFAMQGSNSMGGPETTKAVSREMPVELLRASLPHTNEQHRQTLLDFARKSTHVSGFSPNASRGLINSESVPG

SEQ ID NO: 3113 - DNA, 1248 bp, Sorghum bicolor
atgagccaccggagacgatctcgcgctgccggctcgccgcctggcgacgccggtccggcccctacgccggagaagtcggggcggattcagccgagggcggtgttggggtcggaccggagggtgctggcgctcgcgctggcgttccgcgcagccaacgcgctgctcgtgcgcacctacttcaaccccgacgagcactggcagtgcctcgaggtcgcccaccgcgtcgccttcgggtatggtcaccttacatgggagtggaagcgggggctgcgaagttacctccacccgttgatctttgctgcgctctacaagatcctggcgctactccacctagacactccatgggttatggtgatggctccccgtctcctgcaatctgtgtttgcagcttttggagatctctacttgtataaattttccaaacttattttcaatggtcaggttgcccagtgggcattattttcccagttggttaactggttcatgtttttctgtatcacgcggactctatcaaacagcttggagactgttttgactgtggctggactctattactggtttactgcaatagagtcttccaaggcaacctcaatcgtttcaaagcagcatgctgtctgtgaacaaagtgcctcatcaagaaaagtggctcttctgatagcagccttgtcctgtgccattcgaccaacaagtgctgtaacatggctatatgttggtcttttggattttattcagatgaaatcaaaatgtcgttttgtccttcttgatgtcattccaataggggccattgtccttgcagtaacaacactccttgattggtggatgtttggttcccgtgttatagtaccacttaattttttgaaattcaacctcttctcttcgggaggagactactatggaacacatgtcttccactggtactttacacagggttttccatccatgatttggacattcttaccatttgcaatgtacggtattgtaaagtctcgggaatggagactttcaggtctaattgcttgggtattaggggtttacagcatacttggacacaaagaattcaggttactgcttagctgccatgtcacaactcaaggccaaaaatcagcatgggaaaagaagcctttcaaggttgcaactttctgttattcttcttgtcataaccaatgttcccatgtccttatatatgtccttattccatcaaaggggaacagaagatgttatgtattatttgtcaaaagaagcccatga

SEQ ID NO: 3114 - protein, 415 aa, Sorghum bicolor
MSHRRRSRAAGSPPGDAGPAPTPEKSGRIQPRAVLGSDRRVLALALAFRAANALLVRTYFNPDEHWQCLEVAHRVAFGYGHLTWEWKRGLRSYLHPLIFAALYKILALLHLDTPWVMVMAPRLLQSVFAAFGDLYLYKFSKLIFNGQVAQWALFSQLVNWFMFFCITRTLSNSLETVLTVAGLYYWFTAIESSKATSIVSKQHAVCEQSASSRKVALLIAALSCAIRPTSAVTWLYVGLLDFIQMKSKCRFVLLDVIPIGAIVLAVTTLLDWWMFGSRVIVPLNFLKFNLFSSGGDYYGTHVFHWYFTQGFPSMIWTFLPFAMYGIVKSREWRLSGLIAWVLGVYSILGHKEFRLLLSCHVTTQGQKSAWEKKPFKVATFCYSSCHNQCSHVLIYVLIPSKGNRRCYVLFVKRSP

SEQ ID NO: 3115 - DNA, 639 bp, Sorghum bicolor
atgagcgtgaccaagttcatcaagtgcgtcacagtcggggacggcgccgtgggcaagacctgcatgctcatctgctacaccagcaacaagttccccacggattacatccccacggtgttcgataacttcagcgccaacgtctccgtggatggcaacatcgtcaacctgggcctctgggacactgcggggcaagaggactacagcaggctgcggccactgagctacaggggcgcagatgtgttcgtgctggctttctccctcatcagcagggccagctatgagaatgttcttaagaagtggatgccagagcttcgcagatttgcacccaacgttccggttgttcttgttgggaccaagttagatctccgtgaccacagagcctaccttgctgaccatcctggagcttcgacaatcacaacggcacagggtgaagagctgaggaagcagattggtgctgcagcttacatcgagtgcagttccaaaacccagcagaatgtcaagtctgtcttcgatacagccattaaagtggtccttcaacccccacggagaagggaggcaatgcctgccaggaagaaaaacaggcgtggctccggatgctctataatgaaccttatgtgtggcagcacatgtgctgcttag

SEQ ID NO: 3116 - protein, 212 aa, Sorghum bicolor
MSVTKFIKCVTVGDGAVGKTCMLICYTSNKFPTDYIPTVFDNFSANVSVDGNIVNLGLWDTAGQEDYSRLRPLSYRGADVFVLAFSLISRASYENVLKKWMPELRRFAPNVPVVLVGTKLDLRDHRAYLADHPGASTITTAQGEELRKQIGAAAYIECSSKTQQNVKSVFDTAIKVVLQPPRRREAMPARKKNRRGSGCSIMNLMCGSTCAA

SEQ ID NO: 3117 - DNA, 1119 bp, Sorghum bicolor
atgatctcctggcggcgcagcgcgtcatggctgtcgtcggcgtcccgctcctcgcttggcgctgccgtcggcggggaggcgaaggtcacgccggaggtggatccggcggcagcccaggagatggaggaggacgaggaggccgacgaggagcggtggtcgcgcctgctgccggagctgctcacggagatcatgcggcgcgtggacgccggcgccgagcgctggccgccgcgccgcgacgtggtggtctgcgcctgcgtgtgccggcggtggcgcgacgccgcggtctcggtcgtgcgcccgccgctcgagtgcgggaggatcaccttcccgtcctcgctcaagcagcctggaccaagggatgcaccgatgcactgttttatccggagggacaaaaagaactcgaccttttctctctatctcagcttaacacaggctctaacggataaagggaagtttcttttggctgctcgaaggttcagacaaggagcacatacagaatatatcatctcttacgactatgatgatctgcacccaagaagcagttcatatgttggaaagttgagatctgacttcttggggacaaagtttatcatctatgatagccaggcaccatatgatggtgctaaaccttcgcggagccgatccactcggcgctttgcaagcaagcagataagcccacaggtttcaggtggcaattttgaagttggacaagtgacctataagttcaacttcatgaaatcaagagggccaaggcgaatgcagtgcaatatccagtgccctgtaagtcagggcactatgtcagatccatccaaggagaaaacaccctcgtcaagttccttagatctaaagaacaaagctccaagatggcacgaccatcttcagtgttggtgcttaaatttccatggccgggtgactgtcgcctccgtgaagaacttccagcttgtggccacagccggctctggtggtccatggggcgttggagacgaggaaacggtgatcctgcagtttgggaagatcgaggatgatgcgtttacaatggactaccggcagcctctgtctgctttccaggcgttcgccatctgcctcaccagctttggcacgaagctggcttgtgaataa

SEQ ID NO: 3118 - protein, 372 aa, Sorghum bicolor
MISWRRSASWLSSASRSSLGAAVGGEAKVTPEVDPAAAQEMEEDEEADEERWSRLLPELLTEIMRRVDAGAERWPPRRDVVVCACVCRRWRDAAVSVVRPPLECGRITFPSSLKQPGPRDAPMHCFIRRDKKNSTFSLYLSLTQALTDKGKFLLAARRFRQGAHTEYIISYDYDDLHPRSSSYVGKLRSDFLGTKFIIYDSQAPYDGAKPSRSRSTRRFASKQISPQVSGGNFEVGQVTYKFNFMKSRGPRRMQCNIQCPVSQGTMSDPSKEKTPSSSSLDLKNKAPRWHDHLQCWCLNFHGRVTVASVKNFQLVATAGSGGPWGVGDEETVILQFGKIEDDAFTMDYRQPLSAFQAFAICLTSFGTKLACE

SEQ ID NO: 3119 - DNA, 1002 bp, Sorghum bicolor; identical to SEQ ID NO: 299

SEQ ID NO: 3120 - protein, 333 aa, Sorghum bicolor; identical to SEQ ID NO: 300

SEQ ID NO: 3121 - DNA, 2934 bp, Sorghum bicolor
atgagctctgacgccgcggggggacagcgcagcatcagcaactccacgaggggcgacgcggcggcggcgatgccaacctcatcgccctttgtcgtcggcgacagcagcggcggcgcgggctccccgatccgcgtcgaccgaatggtccgggagcacggccgccgctacgacatcttcgcgtcggacgcgatggataccgacggcgccgagccggcgtcggcttccgcggggcccttcgccgtggatggggtccagtcgcctggccgtgtgtcacccgccaacatggaggatgccggcggcgcggccgctgggcacgccgcgcgaccgccgctcgccggctcccgcagcggtttccgccgcctcggcctccgtggcatgaagcagcgcctcctcgtcgtggccaaccgcctccctgtttccgccaaccgccgcggcgaggaccactggtcgcttgagatcagcgccggcggcctcgtgagcgccctgcttggggtgaaggacgtcgacgcgaaatggattggctgggcgggcgtcaacgttccagacgaggttggccagcgagccctcaccaaagctcttgccgagaagagatgcataccagtgttcctggatgaggagattgtgcaccagtactacaatgggtattgcaacaacatcctgtggccgctgttccactacctaggactaccacaggaggacaggctggcaacaacgaggaactttgagtcacagttcgacgcgtacaagcgtgctaaccagatgtttgctgatgtcgtgtaccagcactaccaggagggggatgtaatctggtgccatgactaccacctcatgttcctgcccaagtgcctcaaggaccatgacatcaatatgaaagtcggttggttcctgcacacgccattcccatcatcagagatttaccgaacactgccatcccgcttggagctgcttcgctcggtgctgtgtgctgatttagtcggatttcatacttacgactatgcgaggcattttgtgagtgcttgcactagaatacttggacttgagggtacccctgagggtgtggaagatcaaggaagactaaccagggttgcagcgtttcctattgggatagactctgatcgtttcaagcgagcattggagcttccagcagtaaaaaggcacatcagtgaattgacacaacgttttgctggtcgaaaggtaatgcttggtgttgatcgacttgacatgattaagggaattccacaaaagattttggcctttgaaaagtttcttgaggaaaacccagactggaacgacaaagttgttctactgcagattgctgtgccaacaagaactgacgtccctgagtatcaaaagctaacaagccaagtgcatgaaattgttgggcgcataaacggtcgattcggaacgttgactgctgtccctattcatcatctggaccgatctcttgatttccatgctttgtgtgctctttatgcagtcactgatgttgctcttgtaacatcactgagagatgggatgaaccttgtgagctatgagtatgttgcatgccaagggtctaagaaaggagttttgatacttagtgagtttgctggggcagcacaatcacttggagctggcgccattctagtaaacccttggaatattacagaagttgcagactcaatacggcacgctttgacgatgccatccgatgagagagagaaacggcacaggcacaactatgctcatgtcacaactcacacggctcaagattgggctgaaacttttgtatttgagctaaatgacacggttgctgaagcactactgaggacaagacaagttcctcctggacttcctagtcaaacggcaatccagcaatatttgcgctctaaaaatcgtctgctcatattgggtttcaattcaacattgactgaaccagtcgaatcctctgggagaaggggtggtgaccaaatcaaggaaatggaactcaagttgcatcctgacttaaagggtcctctgagagccctctgtgaagatgagcgcactacagttattgttcttagtggcagtgacaggagtgttcttgatgaaaatttcggagaatttaaaatgtggttggcagcagagcatgggatgtttttacgcccgacttatggagaatggatgacaacaatgcctgagcatctgaacatggattgggttgacagcgtaaagcatgtttttgaatactttacagaaagaaccccaagatcccatttcgaacatcgtgaaacatcatttgtgtggaactacaagtatgctgatgttgaatttggaaggctacaagcaagagatatgctgcagcacttgtggacaggtccgatctcaaatgcagctgttgatgttgttcaagggagtcggtcagttgaagttcggtctgttggagttacaaagggtgctgcaattgatcgcattttaggggagatagttcacagcgaaaacatggttactccaattgactatgtcctgtgtatagggcatttccttgggaaggatgaggatatctatgtcttttttgatcccgagtacccttctgaatccaaaataaaaccagagggtggctcagcttcacttgaccggaggcccaacggaaggccaccatcgaacggcaggagcaactccaggaacccacagtccaggacacagaaggcgcagcaggctcaggctgcatccgagaggtcatcctcttcaagccacagcagcgcaagcagcaaccatgactggcgcgaagggtcctcggtccttgatctcaagggcgagaactacttctcctgcgccgttggaaggaaacggtccaacgcccgctacctgctgagttcgtcagaggaggttgtctccttcctcaaggagctggcaacagcaacagctggcttccaatccagctgtgctgattacatgttcctggataggcagtaa

SEQ ID NO: 3122 - protein, 977 aa, Sorghum bicolor
MSSDAAGGQRSISNSTRGDAAAAMPTSSPFVVGDSSGGAGSPIRVDRMVREHGRRYDIFASDAMDTDGAEPASASAGPFAVDGVQSPGRVSPANMEDAGGAAAGHAARPPLAGSRSGFRRLGLRGMKQRLLVVANRLPVSANRRGEDHWSLEISAGGLVSALLGVKDVDAKWIGWAGVNVPDEVGQRALTKALAEKRCIPVFLDEEIVHQYYNGYCNNILWPLFHYLGLPQEDRLATTRNFESQFDAYKRANQMFADVVYQHYQEGDVIWCHDYHLMFLPKCLKDHDINMKVGWFLHTPFPSSEIYRTLPSRLELLRSVLCADLVGFHTYDYARHFVSACTRILGLEGTPEGVEDQGRLTRVAAFPIGIDSDRFKRALELPAVKRHISELTQRFAGRKVMLGVDRLDMIKGIPQKILAFEKFLEENPDWNDKVVLLQIAVPTRTDVPEYQKLTSQVHEIVGRINGRFGTLTAVPIHHLDRSLDFHALCALYAVTDVALVTSLRDGMNLVSYEYVACQGSKKGVLILSEFAGAAQSLGAGAILVNPWNITEVADSIRHALTMPSDEREKRHRHNYAHVTTHTAQDWAETFVFELNDTVAEALLRTRQVPPGLPSQTAIQQYLRSKNRLLILGFNSTLTEPVESSGRRGGDQIKEMELKLHPDLKGPLRALCEDERTTVIVLSGSDRSVLDENFGEFKMWLAAEHGMFLRPTYGEWMTTMPEHLNMDWVDSVKHVFEYFTERTPRSHFEHRETSFVWNYKYADVEFGRLQARDMLQHLWTGPISNAAVDVVQGSRSVEVRSVGVTKGAAIDRILGEIVHSENMVTPIDYVLCIGHFLGKDEDIYVFFDPEYPSESKIKPEGGSASLDRRPNGRPPSNGRSNSRNPQSRTQKAQQAQAASERSSSSSHSSASSNHDWREGSSVLDLKGENYFSCAVGRKRSNARYLLSSSEEVVSFLKELATATAGFQSSCADYMFLDRQ

SEQ ID NO: 3123 - DNA, 1230 bp, Sorghum bicolor
atgagtgggcctagcacatcaaagcaagattggggtgtcaattatcgagctttaaatgatttgtttgatatttcactaagtaggagaaatgccttctcttatgaagttggggtacaaatggttgagatatataatgaacaagtccgtgatctgctatcaaatgatattgcacagagaagacttgggatttggagcacttctcaacccaatgggcttgttgttccagacgcaagcttgcactcagttaagtcaacatctgatgtattagacttgatggaaattgggcaagcaaatagagcagttggttcaacagccctaaatgaaagaagtagtcggtcgcacagtatcctaactgtacatgttcgagggttggatttgaagaatggatccacctctaggggttgtctgcatcttattgatcttgctggtagtgaaagggttgagaagtctgaagcaaccggggatagattaaaagaagctcaatacattaacaaatcactctctgcattaggtgatgtgatttttgctttgtcacagaaaagtgcccatgtgccttatagaaacagcaagctaacacaagttcttcaaagttctttaggtggacaagcaaaaactctaatgtttgttcaaataaatcctgatgttgagtcatattcagaaactataagcactttaaagtttgctgaaagggtatctggagtagagttaggtgctgcgagaagtaacaaggagggaaaggatataaaagagctattggaacaggttgcgtctttgaaagacacaatttcacgcaaagatatggaaatagagcagctccaagtcaccaaagacaaagttaaatctccaaatttatcatcaggcgaacgaatgcttaagtctagtgacagagttctatcagatcctctgagttatggtgagatgaatggagattctaaccataatttgacgggtactgcaccagtgagcttagatgaaccagaatatgaggacaatgcatccgatgatggtttatcaggtgaaaccgacaatttgaattcagctgctgagatgacagtggaacggctgcataggtttccgtcaagaataagcagattcactctcacaaaaaatgggcaggcatctatgtctagatcaaaatcaaaggacgctaagactccaagtaatacaaaagctccatcgagccagctgacaggaggttcttcagtcaagggatctaaaagatggcaatag

SEQ ID NO: 3124 - protein, 409 aa, Sorghum bicolor
MSGPSTSKQDWGVNYRALNDLFDISLSRRNAFSYEVGVQMVEIYNEQVRDLLSNDIAQRRLGIWSTSQPNGLVVPDASLHSVKSTSDVLDLMEIGQANRAVGSTALNERSSRSHSILTVHVRGLDLKNGSTSRGCLHLIDLAGSERVEKSEATGDRLKEAQYINKSLSALGDVIFALSQKSAHVPYRNSKLTQVLQSSLGGQAKTLMFVQINPDVESYSETISTLKFAERVSGVELGAARSNKEGKDIKELLEQVASLKDTISRKDMEIEQLQVTKDKVKSPNLSSGERMLKSSDRVLSDPLSYGEMNGDSNHNLTGTAPVSLDEPEYEDNASDDGLSGETDNLNSAAEMTVERLHRFPSRISRFTLTKNGQASMSRSKSKDAKTPSNTKAPSSQLTGGSSVKGSKRWQ

SEQ ID NO: 3125 - DNA, 396 bp, Sorghum bicolor
atgtcttggcagacgtacgtggacgagcacctgatgtgcgagatcgagggccaccacctcacgtcggcggccatcgccggccacgacggcgccgtctgggctcagagcgccacattccccgagttcaagcccgaggacatgaccaacatcatgaaggatttcgatgagccggggcacctcgcgccgacaggcctgtttcttggagccacgaagtacatggtcatccaaggtgaacccggcgctgtcattcgtggcaagaagggatcaggaggcatcactgtgaagaagacagggcaggcactcatcattggcatctacgacgagccgatgactcccgggcagtgcaacatggtggtggaaaggctgggcgactacctggttgaacagggcatgtag

SEQ ID NO: 3126 - protein, 131 aa, Sorghum bicolor
MSWQTYVDEHLMCEIEGHHLTSAAIAGHDGAVWAQSATFPEFKPEDMTNIMKDFDEPGHLAPTGLFLGATKYMVIQGEPGAVIRGKKGSGGITVKKTGQALIIGIYDEPMTPGQCNMVVERLGDYLVEQGM

SEQ ID NO: 3127 - DNA, 1296 bp, Sorghum bicolor
atggcggcgtctaactctaaccccaaaccaatcgcacaatttatgaggaacaataatccattaaaaaagaactattcccagcatttcctgatctacccgtgcggaagcccacagacgagggcgaatcccacgcgccatggcgttcaatttgtagaaggcagggaggtgtccaggcaggcagccttgaatcggagggaagctaccggattcggaggaaatggacggatcgaagtggtgcgacggaaagggggagcaagggggcgcgcatgcgtaccacatcacggcgcagaggcccttgccggcgacggtgtgccagcgcttgttgtgcgggattgtgtagcccttgtaggtggtgccgccatgtgcgccgccgccgcccatcgccgccgactgctcgcctcgccttgtcagtcgtcgcgggtgctcgtctgtggtgcgggtggtgatgctctcctcttcccttctccgtcctcggcgtcctcgccgccgtcatcggcgcgggtggaggcggtggtgctcttcaacgtctgcgacagctacgtgcggcgcccggaccaggcggaccgcgtcatcggcacactcctcggctccctcctccccgacggcaccgtccacgtccgcaactcctacgttgtcccccacagcgagtcggccgaccaggtcgccatcgacatcgactaccaccataacatgtacgcctcgcaccagaaggtgaaccccaaggaagtcatcgtcggctggttctcaactggatttggtgtttctgggggaagtacgctcatccatgagttctattcaagggaagtacaaaaccccatccatcttacagtcgacactggcttcacaaggggggaggcttccatcaaagcctacatctcatccaacctgtcccttggagataggcacctcgctgcgcaatttcaggaaatccctctggatctaaggatgattgaggcagaaaaggctggattcgagatcctgaaatctaccatggtagagaagctccccaatgatctggaaggaatggagtcctcaatggagaagctttacattcttattgatgagatctacaaatatgtcgatgatgttgtggaaggacgcgtggcacctgataacagaattggaaggttcatctctgattctgttgcttcaatgccaaagttgtccccagctgctttcgataagcttttcaatgacaagattcaggataaccttgcgctggtatacctgtcaagcatcacaaggacacaaatcaccatcgcggagaagttgaacactgctgctcaagtgctgtaa

SEQ ID NO: 3128 - protein, 431 aa, Sorghum bicolor
MAASNSNPKPIAQFMRNNNPLKKNYSQHFLIYPCGSPQTRANPTRHGVQFVEGREVSRQAALNRREATGFGGNGRIEVVRRKGGARGRACVPHHGAEALAGDGVPALVVRDCVALVGGAAMCAAAAHRRRLLASPCQSSRVLVCGAGGDALLFPSPSSASSPPSSARVEAVVLFNVCDSYVRRPDQADRVIGTLLGSLLPDGTVHVRNSYVVPHSESADQVAIDIDYHHNMYASHQKVNPKEVIVGWFSTGFGVSGGSTLIHEFYSREVQNPIHLTVDTGFTRGEASIKAYISSNLSLGDRHLAAQFQEIPLDLRMIEAEKAGFEILKSTMVEKLPNDLEGMESSMEKLYILIDEIYKYVDDVVEGRVAPDNRIGRFISDSVASMPKLSPAAFDKLFNDKIQDNLALVYLSSITRTQITIAEKLNTAAQVL

SEQ ID NO: 3129 - DNA, 1281 bp, Sorghum bicolor
atgggggcgtcggggaagtggatcaagtcgctggtggccatgaaggcgcccgagaaggcggcggggcataagggcggccgcaagtggcgtctgtggcggacctcgtccgccgcgtctagggccagcgccggcgagggcagtgcgctggcgtccgaggcttcttcggcgtcggcggactcgttcagttcggtcctcgccgccgtggtccgcgctccccccagggatttcctgctcatcaggcaggaatgggccgccgtccgcatccagaccgcattccgcgcgttcttggcgagacgggcgttgaaggcgctgaggggcatcgtccggctgcaggcgctggtgcgcggccggctcgtgcgcaagcaactggccgtcacgctcaagtgcatgcacgcgctgctgcgggtgcaggaacgcgcccgggagcgccgagcgcgctcctccgccgacggccacggctcccagggccaggacgcgctcaacggccgtgccagttctatcaaagacgctatggaacaatggtgtgaccaccaaggatctgttgatgatgtaagatcaaagttacacatgaagcatgaaggtgcagcaaagagagaaagggctattgcctatgctctgtctcaccagcctcggggttcaaaacacaagggaagaccaagctctcctgctagctgtgttagaagccatgagcctaatcacgacttgagttacttggaaggatggatggcgacaaagccatgggagaccagaatcatggaaggaaatcacaccgactcgcagcttgcgaagaactgcaaggagcagaacttgcctgcctccaagctttccgatgctagctcagtcaaaatcagaagaaacaatgtcacaaccagggtagcagcagcgaagccaccgcctccttcattgctgtcagcctcttcttctgactccgtgtgtgacgagagctctccatcgagatcatcggtgaccctgacgtctgctaccaacaccatcttagcatcagaagcaaggtcagacagtggcaacaacgccggaggaccgaactacatgagcttgaccaagtctgccaaagcgaggctgagtggctgcagcagcagccaccgagggtcgtcgttccagcggcaacggtccggggacatgtcaagggtggccctgtcttcaatcgacacccagagcaacgcaggctcggagatttcagtcacctccaggagactgaacagcatgtccctgaaaggcagccggagcatgccgagaagcttggacaaggagaatgacgtttga

SEQ ID NO: 3130 - protein, 426 aa, Sorghum bicolor
MGASGKWIKSLVAMKAPEKAAGHKGGRKWRLWRTSSAASRASAGEGSALASEASSASADSFSSVLAAVVRAPPRDFLLIRQEWAAVRIQTAFRAFLARRALKALRGIVRLQALVRGRLVRKQLAVTLKCMHALLRVQERARERRARSSADGHGSQGQDALNGRASSIKDAMEQWCDHQGSVDDVRSKLHMKHEGAAKRERAIAYALSHQPRGSKHKGRPSSPASCVRSHEPNHDLSYLEGWMATKPWETRIMEGNHTDSQLAKNCKEQNLPASKLSDASSVKIRRNNVTTRVAAAKPPPPSLLSASSSDSVCDESSPSRSSVTLTSATNTILASEARSDSGNNAGGPNYMSLTKSAKARLSGCSSSHRGSSFQRQRSGDMSRVALSSIDTQSNAGSEISVTSRRLNSMSLKGSRSMPRSLDKENDV

SEQ ID NO: 3131 - DNA, 1206 bp, Sorghum bicolor
atggaggacttcggcggctggagtatgcagtatgcagcagatccatgcctgccaagccgcccgagcgacgacgacggcctcctcggtgcctttctaggcggcggcttcgacctccgttctgaccatggcggtctcagcgacctgccctcgtcgcaccaggtccagaacctcatgccctgccacggcggcgcgagtctttccgtttccgacggattcatgggcctggacacggcggatatgctcgcgagcgtcaccggcgcactggacgacggcctccttgacacgttcgcttacggttcggacgtcgtcgccgccgccgccgaggagcccgcgcagcccaccgcgtcgagcaacgccttctcctccggatacagcagcaccacgggcggcaattacggcaacatctcctccggcgagtccaacacgtgcagcggcggcggcggaggccatgacacggaggttgcgtctccctgcgccctgtcgcggtcgtcggcgctgcctcaggcaacggccgcgctcgcctcgaagcgaaagctggggggcaagtaccctgcggtagccgcgaccacatcaacggaggcgcaggtcgctgccccgtggcgtggcgcaaagcgcgactcggcgacgtcgtcgtcgtcgaccagcatcacgttcgccgccgggcatggtgaccaccatgcggcaggaggatcgtcatcgtcggccggcggcgggtacgagtacgagccggactcggaggcgctagcgcaggtgaaggagatgatctaccgcgcggcggcgatgcggccggtgcaccagctcgtgtgcggggccggcaccgagccggcgccgtcgtcccagagcaagccgcggcgcaagaacgtgcggatctcgagtgacccgcagacggtggcggcgcggctgcggcgggagagggtgagcgagcgcctgcgcgtgctgcagcggctcgtgccgggaggtagccggatggacacggcgtccatgctcgacgaggcggccagctacctcaagttcctcaagacgcaggtcaaggcgctggagagggcgaaccctagcaatggtggctaccacaacagcagcttgctgccgcagagttacacggggacggggagcctcggtgtcggtggtggtggcaccggtgttgccaatggaagagatggcgccattgatggctacgtaaattccaacaggaacatgcacttgtag

SEQ ID NO: 3132 - protein, 401 aa, Sorghum bicolor
MEDFGGWSMQYAADPCLPSRPSDDDGLLGAFLGGGFDLRSDHGGLSDLPSSHQVQNLMPCHGGASLSVSDGFMGLDTADMLASVTGALDDGLLDTFAYGSDVVAAAAEEPAQPTASSNAFSSGYSSTTGGNYGNISSGESNTCSGGGGGHDTEVASPCALSRSSALPQATAALASKRKLGGKYPAVAATTSTEAQVAAPWRGAKRDSATSSSSTSITFAAGHGDHHAAGGSSSSAGGGYEYEPDSEALAQVKEMIYRAAAMRPVHQLVCGAGTEPAPSSQSKPRRKNVRISSDPQTVAARLRRERVSERLRVLQRLVPGGSRMDTASMLDEAASYLKFLKTQVKALERANPSNGGYHNSSLLPQSYTGTGSLGVGGGGTGVANGRDGAIDGYVNSNRNMHL

SEQ ID NO: 3133 - DNA, 684 bp, Sorghum bicolor
atggagaaggaggggaggaaccactaccacacgcggggctcctcgcgcggcggcggtgggggcaccgctacggagcgcgacctgctgttacagtggggcaaccggaagcgccttcgctgcgtcaaggtgcagcgccgcgacgtcgaggccgccgccaccgcggctgccgagaaggcccagcgccgcgccgcggccgcagctgccgcagccgcccagcaccacccaaccggccacacccaccgccgtgttctcaggaactcagaagagtttgcaatcatgaaatcgccagcacgccaacaacagaacaacaggatccacacggttgcttcaccagacagggagtgccctggtagaggtaacaacaacaatggagttccacagacctatccagatgacaagaaaggctcttcatcagggagtgaggggtccatctggccaaagtttgcaatcaccctttcaaacagggaaaaggaagaggatttcctggtgttcaaaggatccaaactgcctcaaagacccaagaaaagagccaaggtcatccagagaaccgtcaattttgtatgcccaggaacgtggctatgtgacttgactctcgaaaggtatgaagtccgggagaagaaggtttccaagaagcgccctaggggattgaaagctatgcatgacatggatagtgactcggaataa

SEQ ID NO: 3134 - protein, 227 aa, Sorghum bicolor
MEKEGRNHYHTRGSSRGGGGGTATERDLLLQWGNRKRLRCVKVQRRDVEAAATAAAEKAQRRAAAAAAAAAQHHPTGHTHRRVLRNSEEFAIMKSPARQQQNNRIHTVASPDRECPGRGNNNNGVPQTYPDDKKGSSSGSEGSIWPKFAITLSNREKEEDFLVFKGSKLPQRPKKRAKVIQRTVNFVCPGTWLCDLTLERYEVREKKVSKKRPRGLKAMHDMDSDSE

SEQ ID NO: 3135 - DNA, 441 bp, Sorghum bicolor
atggcaaccgttcctggggatctgatctggcaggttgtgaggaagaacaactccttccttgtgaagcagtttggcaacggcaatgctaaggtgcagttcaccaaggagcccaacaacctctacaacgtccactcctacaaacactctggcttggcgaacaagaagactgtgactatccagccagctgctggaaaggactcggctgtggtcctctcaactaccaagaccaagaagcagaacacacctgctaagctcagtcacaagtctgtgatgcgcaaggagttccgcaagatggctaaggccgtgaaaaatcaggttagcgacaactactacaggcctgatctgaccaagccggctcttgctaggctgagctcagtgtaccgcagcctccaggttgccaagtctggtgtcaagaagaagaacaggcagcccaagcactaa

SEQ ID NO: 3136 - protein, 146 aa, Sorghum bicolor
MATVPGDLIWQVVRKNNSFLVKQFGNGNAKVQFTKEPNNLYNVHSYKHSGLANKKTVTIQPAAGKDSAVVLSTTKTKKQNTPAKLSHKSVMRKEFRKMAKAVKNQVSDNYYRPDLTKPALARLSSVYRSLQVAKSGVKKKNRQPKH

SEQ ID NO: 3137 - DNA, 177 bp, Sorghum bicolor
atgaaatgttccagattatattctggaatacaaggcacagttaagaagacacatttgacctgcaatgcaacatttattatcgtttggccatttgctatgcagaggcaacagtataatacaaacgggcaccaaatcaaagatgggtcattccaccaccaagcttcatttcaagaatag

SEQ ID NO: 3138 - protein, 58 aa, Sorghum bicolor
MKCSRLYSGIQGTVKKTHLTCNATFIIVWPFAMQRQQYNTNGHQIKDGSFHHQASFQE

SEQ ID NO: 3139 - DNA, 1689 bp, Sorghum bicolor
atggccgctagtggcctcggcctctccacctcgttcctccccggccacgacaccctcctccggcgccggcgccggcggccggcgagcccctccaccgcgtcgttccggccggtgacggcggagctcggcggcgtcgcggcggggctgggccggcagctggtggaggcggtgggcgtggggctcccctgcaccgtcatgcagtgcggcgacgtcatctaccgcagcacgctcccccagaacgatgggctcaccatcacggcccccggcgtcgcgctcgcgctcgccgccgtgtcgtacctctgggccacgcccggcgtcgcgccggggttcttcgacatgttcgtcctcgccttcgccgagcgcctcttccgccctaccttccgcaaggatgacttcgtgctcgggaagaagcttggggagggcgcattcggggtcgtgtataaggcgtcactggcgaaccccgaagcggctaagaagcaaggggatgtggtcgtgaagaaggcaacagagtatggagcagtggagatttggatgaatgaacgtgtcaggagggcatgtgccagtagttgtgcggattttctttatggctttcgcgagaccaaaacaaagggtaagggagctgaagaatactggattatttggcgttttgaaggcgaggatacactttatgatctcatgcaaagcaaggaattcccttacaatgtggagacaaaaattcttggcaatgtccaggacttgccaaaaggtatagcgagagagaataagatcattcaaacggtgatgagacaactcttgtttgctcttgatggacttcattcgacagggattgttcacagagatataaaacctcaaaatgtgatattttcagagggatcacgaaccttcaaaattattgatcttggagcagcagctgacttacgggtaggaattaactatattcctaaagagttccttttggatccaaggtatgctgcaccagagcaatatattatgagcacgcaaaccccatctgctccttctgttccagttgcaacaactttgtctccagtcctgtggcagctgaatcttcctgacagattcgacatatatagcttggggctcatattcttgcagatggcattcccttcactacgaactgacagcagcctcatacaatttaatcgccaactgaagagatgcgactatgacttacaagcctggaggaatctggtggagccacgagcgactgctgagcttcggaggggctttgacatcatggatctagacaatggtatcggatgggaactcctcacgtcgatggtccggtacaaagcacggcaaaggaccagtgctgagggtgcattggcacacccatactttaaccgtgaggggctccttggcctctctgtcatgcaaaacgcacgactgcaactgttccgggcaacccagaaggactacagtgaagccgctcggtgggttatcggcctcatggcaaggtcaggaactgaagaagtgggaggctttacagaagcacagcttcaagagcttagggaaataaaaccgaagaaaggcaacgcccagcggaacgtgcttgcctccgtgctgcgcctgcagaagaagatcgtgaaaacgatcaacgagagcatggacgagctcgccagccagcgcaaaagcatctggtggagccggtggatacccagggaggagtag

SEQ ID NO: 3140 - protein, 562 aa, Sorghum bicolor
MAASGLGLSTSFLPGHDTLLRRRRRRPASPSTASFRPVTAELGGVAAGLGRQLVEAVGVGLPCTVMQCGDVIYRSTLPQNDGLTITAPGVALALAAVSYLWATPGVAPGFFDMFVLAFAERLFRPTFRKDDFVLGKKLGEGAFGVVYKASLANPEAAKKQGDVVVKKATEYGAVEIWMNERVRRACASSCADFLYGFRETKTKGKGAEEYWIIWRFEGEDTLYDLMQSKEFPYNVETKILGNVQDLPKGIARENKIIQTVMRQLLFALDGLHSTGIVHRDIKPQNVIFSEGSRTFKIIDLGAAADLRVGINYIPKEFLLDPRYAAPEQYIMSTQTPSAPSVPVATTLSPVLWQLNLPDRFDIYSLGLIFLQMAFPSLRTDSSLIQFNRQLKRCDYDLQAWRNLVEPRATAELRRGFDIMDLDNGIGWELLTSMVRYKARQRTSAEGALAHPYFNREGLLGLSVMQNARLQLFRATQKDYSEAARWVIGLMARSGTEEVGGFTEAQLQELREIKPKKGNAQRNVLASVLRLQKKIVKTINESMDELASQRKSIWWSRWIPREE

SEQ ID NO: 3141 - DNA, 270 bp, Sorghum bicolor
ggccgagatgcagatccagcggtagcgcgtcgtcggcgggagccttggtgctcggttcctcaccctccgtgcctctgttcattacctcgccgccgccgtcaggccggccgggaccgggacgatgaacaagccgaggagtgggagtggccaacaggggaagcgcagggtaggaggaggaggcggcggcggactcggcggggcgctgaggaagcagatggccaggctctgcatcatccgggagtgcgtcatcatgctcctcttctaccatga

SEQ ID NO: 3142 - protein, 89 aa, Sorghum bicolor
GRDADPAVARRRREPWCSVPHPPCLCSLPRRRRQAGRDRDDEQAEEWEWPTGEAQGRRRRRRRTRRGAEEADGQALHHPGVRHHAPLLP

SEQ ID NO: 3143 - DNA, 759 bp, Sorghum bicolor
atggcaggctctgtgtcgagctcaacggctactctctctctctctctctccggtggattgctggcttgtgctggtatcggccaaggtgcacttgctctagggaaggaaatacatgccagtgtggtgaagatgagcttgcatggaccagttgacccggttgtcgagaacggggttcttgatatgtactcaagccacgccatgccaccgtccaccggtgaacagcatagtgatgaccgctcagctcaacctgaggctggcgagaggcgagcccagcgctcaatagaaagcaagttagtggcaggcaggtcaggtcgcgacctgggccacggccaccggaggcggcagtcccgggaccaagccgttcggcgtcgcgcgatggcgctgcagccgccgccgtccgtccacgccgtcaccatccccttcgccgacctcagggatcggagcaaggacctgagcggcttcatcgaggaaggcttcggaccccgggggctcggcatcgtctccatcaccgacgtacccggttatccggagctcaggagaaggctgctgcgcttggcgccaagaatcgtcaatcttcctgatgatgtgaagaaacaactggaggacccagatagcagttaccactttggttggagtcgtgcggaagagaaattcgagtctggaagatgggtaatgcagcaaggagtgggacagtacattggtgaaagccttgagaagacacttgctaactcaaggtgtcccaagggtcgtctgttgtag

SEQ ID NO: 3144 - protein, 252 aa, Sorghum bicolor
MAGSVSSSTATLSLSLSGGLLACAGIGQGALALGKEIHASVVKMSLHGPVDPVVENGVLDMYSSHAMPPSTGEQHSDDRSAQPEAGERRAQRSIESKLVAGRSGRDLGHGHRRRQSRDQAVRRRAMALQPPPSVHAVTIPFADLRDRSKDLSGFIEEGFGPRGLGIVSITDVPGYPELRRRLLRLAPRIVNLPDDVKKQLEDPDSSYHFGWSRAEEKFESGRWVMQQGVGQYIGESLEKTLANSRCPKGRLL

SEQ ID NO: 3145 - DNA, 753 bp, Sorghum bicolor
atggcgtcgcggcgctgcctcctgcgcctcctctcgagccgcctcgttcctcagagatctcaacatcttgcaccggtctcgatcgcgacccgaaccctgacctctttgtccgagcccctcggctccccagctccccgggccctcgcctccccccggctgtactacccctcgcgctgccacttcgcgacccgctcctccggcgacgaggacgacgaagaagacgaagaagagcactacgacgacgaggggagcgagggggaatggggggacgaggaggaggcggtggcggcgaagaaaccgagcgggaagacggaagaggagaaggtagcggaggcggcggagatcggctacaaggtgttgggaccgctcggggctgacgagaaacccttcaagccctacgagcctgtcttcgctgtcgtacagatcggctcgcatcaattcaaggtgagcaatggcgattccatcttcacggagaggttgaagttctgtgatgtgaatgacaagttggtcctaaaccgagttctcatgcttggttcgcaaactcaaacagttattgggagaccaatactacctgatgctgctgttcatgctgttgtagaagaacatgccttagatgcaaaagtgatcatattcaagaagaaacgcagaaaaaattaccgccgaacaaagggccatcgccaggagttgacaaaactgagaataaccaacattgaaggaatagataagccagagactgctgctgttgccgcctaa

SEQ ID NO: 3146 - protein, 250 aa, Sorghum bicolor
MASRRCLLRLLSSRLVPQRSQHLAPVSIATRTLTSLSEPLGSPAPRALASPRLYYPSRCHFATRSSGDEDDEEDEEEHYDDEGSEGEWGDEEEAVAAKKPSGKTEEEKVAEAAEIGYKVLGPLGADEKPFKPYEPVFAVVQIGSHQFKVSNGDSIFTERLKFCDVNDKLVLNRVLMLGSQTQTVIGRPILPDAAVHAVVEEHALDAKVIIFKKKRRKNYRRTKGHRQELTKLRITNIEGIDKPETAAVAA

SEQ ID NO: 3147 - DNA, 2754 bp, Sorghum bicolor
atgtcgccgccgcagccgccacacacggtgccccgagagacggtggccagcgccgtcgcctccctcaccaagtggatgaagaagcgcgccgcggaggcgcgcccgaacctcctcgccgacgagcgcgacgacctcgtcgtcctccagctctcgctccgccgcgtccccgcctcgcgcagcaccaggccacgcctcctcccgctgccgcatcccgtcgtcgggcacgacggtgcctccgtctgcgtcatctcggacgaccgccccaagtcgcggtccccttccgcctccgacctcctccacgcgtccaagtcgctccacggtctccccgtctccgaggtcatcccgctctccacgctccgcacggactaccgaccctacgagtcgcgccgccgcctcgcggcctcccacgaccttttcatcgccgaccgcgccatcctcccgctgctgcctcgcgtcctcgggaaggcgttctactccaccaagaaggctccgattggagtcgatttcacccgcgtcggttggccggagcaggttcgcaaggtccttggctctgcttttctctacctgcgctcggggacctgctcggggatcaaggtgggtaggctggacatggaggaagcggagatcgtggacaatgtgatggccacggtggaggaggctgtcgagaaggtgccaaagaagtgggccaacgttagggcgctgcatctgaaagctgtggattcagttgccctaccaatttaccaagctgtgccggagttgggtatgaaaatcgaggtgcctgaaattgttgggtctgcggaggtcattgatgctgcagaagcggagactcgcgggaagaagagtgacaagaagaaggcgaatgatggtgccagtggaagagtgatatttggcaatatcagtgccaagaggaagaggaataaaaaggagcagattgaggaggatgttgtgatgcaggaagaagttcaggtggagacagagaaaaagaagaggaagagcactgcggtttctgccgatgacagtcagaaggttgacaagaaggggaaagagaagggtaagcgtggtttggaaaatgagaaggttgacaagaaggggaaagagaagggtaagcgtggtttggaaaatgaggtgaaagaagccagtttggacaagaagaagattaagaaagggaagactgaggagaggaagaagaagaagagcatgaagggtgatggtgaagttggtactgatgaaatacaggaagataagaagatcaagggggagaaatcggatggcaagaccaagaagttgaggaccagggttttcagtgaaacctccactattttttccttcttgagggtgttagatcgtggaagagaaaattggcttcggtccattgattggattcctcaacgtcttggagtccaattctctgctagccatggtggatcattgactggcaccataggatattttcatgaaggggcatttgcattatctgttggttatactactacagaagagcagactacaaatggaacatctgaaggcacaattttcagaaaaggactttccagtatttatgaaaggttcagttttcttatagcttcatcaatcaatcatatgtcaggtcttcctatcttttacatggcttcaggctggtacgaagattggcattcagtgtgcgagatcagtggaatctgttttcaagtgaagatcttacatcgtttctggacaacactacagggatcttgtgaagatataggatggctgcaaagaactcgggcatcactttgttcagttgatgggacaggtcgcttcaaggagattttgcatgacatcagtgtggaaattttgagcataaactaccaattaagttggactggaagcctttttagcaaccacagtccactttacttcaccaatacgaaacgattcttttcaaaaatgggattggcttgccatattgcgaaaattcatagcgaggcgtcagtagagaacaatgcgtgggaactgaaacaatacattgaggagctctactggggatctggtaagcaggttctgctccttggccatagcaaaggtggagttgatgcagctgcagctctttcgttgtactggtctgagctcaagggtaaggttgctggcctggcgttggttcagagcccatatggtggcaccccggtcgcctcagatatccttcgagaaggccagatcgctgataaggagacaaggaggatcatggagctcatcgtatgcaaactaatcaagggtgacatcagggccttggaggacctcacatatgctaagagaaaggacttcatctccaagcacaaactccccatcgatgagctgccgatcatctccttccacactgaagccagcaccgcgcccacggtgctcgcgtcactgactcatgtcgcccaagccgagctcctcccatggctacccctgccacggttcttcctatctgcatctgagtttgtcgagtcaatgctcgcttctctgaaggtccccgtggttgcgcctgtgtctgcagccatggcgctcacagccctccacctgcggctgcgctatggggagaggagtgacgggctggtgacacgacgcgacgccgaggtgcctgggtcggtggtggtgaggcccgagaggaggctggaccacgcgtggatggtttactccacgctgaagatgggcagcgctgaggccgatgcaagcgagatgtgcgaggctctgctggccatgctcgttgagattggcaggaagaaatttcgctga

SEQ ID NO: 3148 - protein, 917 aa, Sorghum bicolor
MSPPQPPHTVPRETVASAVASLTKWMKKRAAEARPNLLADERDDLVVLQLSLRRVPASRSTRPRLLPLPHPVVGHDGASVCVISDDRPKSRSPSASDLLHASKSLHGLPVSEVIPLSTLRTDYRPYESRRRLAASHDLFIADRAILPLLPRVLGKAFYSTKKAPIGVDFTRVGWPEQVRKVLGSAFLYLRSGTCSGIKVGRLDMEEAEIVDNVMATVEEAVEKVPKKWANVRALHLKAVDSVALPIYQAVPELGMKIEVPEIVGSAEVIDAAEAETRGKKSDKKKANDGASGRVIFGNISAKRKRNKKEQIEEDVVMQEEVQVETEKKKRKSTAVSADDSQKVDKKGKEKGKRGLENEKVDKKGKEKGKRGLENEVKEASLDKKKIKKGKTEERKKKKSMKGDGEVGTDEIQEDKKIKGEKSDGKTKKLRTRVFSETSTIFSFLRVLDRGRENWLRSIDWIPQRLGVQFSASHGGSLTGTIGYFHEGAFALSVGYTTTEEQTTNGTSEGTIFRKGLSSIYERFSFLIASSINHMSGLPIFYMASGWYEDWHSVCEISGICFQVKILHRFWTTLQGSCEDIGWLQRTRASLCSVDGTGRFKEILHDISVEILSINYQLSWTGSLFSNHSPLYFTNTKRFFSKMGLACHIAKIHSEASVENNAWELKQYIEELYWGSGKQVLLLGHSKGGVDAAAALSLYWSELKGKVAGLALVQSPYGGTPVASDILREGQIADKETRRIMELIVCKLIKGDIRALEDLTYAKRKDFISKHKLPIDELPIISFHTEASTAPTVLASLTHVAQAELLPWLPLPRFFLSASEFVESMLASLKVPVVAPVSAAMALTALHLRLRYGERSDGLVTRRDAEVPGSVVVRPERRLDHAWMVYSTLKMGSAEADASEMCEALLAMLVEIGRKKFR

SEQ ID NO: 3149 - DNA, 2166 bp, Sorghum bicolor
atggcgtccccggcacgccctaccgctgcatccgtctcgggcgccttcggcctgtcgcccgaccccaagcgctgctccttcgaccaggcgctccggcagaaggattttcaagagaacagactgttgatgtcatttgttaatttccatgagcaagaaaagatttctaaagaaatcgtaacagacgctatagaaagctgtatgaagaaacaagcagataacttgttgaattcactggaagttatcagcggtaggctgtcacaactggagttatattgctataagttggaaagatccattggagaattacgaagtgatgtgatggattatcataacgaagcaaatctcaactttcagtgccttgaaaagcaagtgaaagaggttcagaaatctgtgcaggtcgttcaggagaagcaggagcttgctgaaactcagaaagaaatgagcaaacttcaggtagtacatgaggattctgcacaaaagagtgaaggtaccgctccatcagttttcatgactagagaaaatgaggttgcccttgtgccatttcaacaagtaaatgctgttcagtctcctgctgtgcaattccaaagttgcagtggccttattctacagcaacttgtgccagtccaagaccaccagcgctcgaaccaaactgctgtgtactatatgcgaggccaaagtcatccagaacacagacaggcccaaatgttccaagctgctgctcaatctgtgcagacacacactcggaaaactcagccacagacagtagttgaggtaccccaggtaaccagtcaggcaccagagttttaccctcaaccgcagcatcaatggcaacatcaaactggtcagcaggttcagtcccaagcaaggcaaccacaaccacaggttgtacagcagcagcagtacagcaatatccagcaaggtccagcacagatgattcagctgcaaacgtcctctccacatgctcatagcacaccacaggtcacagtagtatatcctccatatggggctcatcagtctgcatgtggtaacactgaggcacgcaccgggggcatggtcgtgccaccatcctactctacaatttcctcatcccagcggaagcatcatgaagctgctcctatttatgtacaaagcaacacagtttctgttccattggcggagcagcatcagcagcttcattcactcagcaatggctcatttgtacctcagccaagcaaagtcaatccatgtggtgtcacatcatacacggtacaagggaatgcacaggcctacaaccctgcttatggaagcccttccagcaatcctgctgctattgttgctgtccttaatcaacaagcacatagcagtgctcccatggtgcttcatcacttgggacctcagtcagtgcagaaccatccagtagacattgctgaaaaagttgctcggatgggttattcaaaggatcaagttgagggccttgcactccgtatggtgcgcgcagagggatccgacgtcgtggtcctcgtagcagtaggggcaggcgaactcgggcctgacctcctcgtccatgtccagctcctccatccccgcccgatctggcgcaaaagcaagcccaggaagcgcttcgcagccgccaggcgcgagatccagtgctccgagtccatcgggtcgataggtccggcggaagcggagcaagcggacgggtacggctcctcttccttctcccctctctcctccggcggcggtacggtggcagccgcggcgccgcgcctctcctctcctctcctggacccccgctcggcctcaacggcgtggggagcagtcggatcggatcggatcggagcggagctcgccgcagatttttggccgaggatggaggggagctggagctggagcggaggggagggaggggaagccgagggccctctcttatcgggaggtgagagtgagatgtggagagagaggaggaggaggagagggaccagggacgtggcgccgctgttcgccgtgcggtcgccgtccctgccggcccgcgccccgcgccgctccgagcccgtgaaatttcgcgggggtgacgtgtggggcgggaggaggcgcgggacgcgacctgccgtccacgcgcggcgacgttgcgtgggcctgtctgcctgcggaatcgttggatgggaccaccgtaccagtgtccagtag

SEQ ID NO: 3150 - protein, 721 aa, Sorghum bicolor
MASPARPTAASVSGAFGLSPDPKRCSFDQALRQKDFQENRLLMSFVNFHEQEKISKEIVTDAIESCMKKQADNLLNSLEVISGRLSQLELYCYKLERSIGELRSDVMDYHNEANLNFQCLEKQVKEVQKSVQVVQEKQELAETQKEMSKLQVVHEDSAQKSEGTAPSVFMTRENEVALVPFQQVNAVQSPAVQFQSCSGLILQQLVPVQDHQRSNQTAVYYMRGQSHPEHRQAQMFQAAAQSVQTHTRKTQPQTVVEVPQVTSQAPEFYPQPQHQWQHQTGQQVQSQARQPQPQVVQQQQYSNIQQGPAQMIQLQTSSPHAHSTPQVTVVYPPYGAHQSACGNTEARTGGMVVPPSYSTISSSQRKHHEAAPIYVQSNTVSVPLAEQHQQLHSLSNGSFVPQPSKVNPCGVTSYTVQGNAQAYNPAYGSPSSNPAAIVAVLNQQAHSSAPMVLHHLGPQSVQNHPVDIAEKVARMGYSKDQVEGLALRMVRAEGSDVVVLVAVGAGELGPDLLVHVQLLHPRPIWRKSKPRKRFAAARREIQCSESIGSIGPAEAEQADGYGSSSFSPLSSGGGTVAAAAPRLSSPLLDPRSASTAWGAVGSDRIGAELAADFWPRMEGSWSWSGGEGGEAEGPLLSGGESEMWRERRRRRGTRDVAPLFAVRSPSLPARAPRRSEPVKFRGGDVWGGRRRGTRPAVHARRRCVGLSACGIVGWDHRTSVQ

SEQ ID NO: 3151 - DNA, 678 bp, Sorghum bicolor
atggactcggagcactggatctcgcgcctggcggctgcgaagcgcttctacgcggcgcagctcggccacagcgatcgggcggggatggaggagctggacatggacgaggaggtcaggcccgagttcgcctgcccctactgctacgaggaccacgacgtcggatccctctgcgcgcacctggaggaggagcacccgttcgagccccaagccgcggcttgccctgtctgctctgagatggttacgaaggatatggttaaccatattactatgcaacatggatatttattcaagaatcgtcgccggttgcgcagattcatcattccaggcagccaggccctttctttactgagccgagatctacgggaagcccatttgcaggtgcttcttggaggcggacatagatcaagcaacaataacagcaccacaaatatttcagctgatcctcttctgtcatcattcggccttagcttccctacatcagatgcagagcaaacatccaaatcgactctttccattcctgatgatgctacgatgataaaagaaacgcctgctcaggcacggaagttaagtatcgattcgtccctcacaagtgaagaaagggagcagaaacggaagcaagccagcgtcagagccacattcgtgcaagacctgctgctctctactctattcggggactaa

SEQ ID NO: 3152 - protein, 225 aa, Sorghum bicolor
MDSEHWISRLAAAKRFYAAQLGHSDRAGMEELDMDEEVRPEFACPYCYEDHDVGSLCAHLEEEHPFEPQAAACPVCSEMVTKDMVNHITMQHGYLFKNRRRLRRFIIPGSQALSLLSRDLREAHLQVLLGGGHRSSNNNSTTNISADPLLSSFGLSFPTSDAEQTSKSTLSIPDDATMIKETPAQARKLSIDSSLTSEEREQKRKQASVRATFVQDLLLSTLFGD

SEQ ID NO: 3153 - DNA, 807 bp, Sorghum bicolor
atgtcacatagaaatatgctctggacacatcagtccgttaatcctgaatgggagcaaggacatgtccaagttcaaccaggaagttcctattatgcaggcacaagtgattcatccaacctgggcatgcaagttgctgttggaattccaggaaatacagctaatgttggtatatgtgatctgcggaatcatgagcgcccgcatgttcataattcatacccacatgccagtgttacatcgagatttgtcttcccaactactatgtacaaccctagcatgtcagcagcagctgtcaacatatatattcctcagactcaaagctttggactgggcaatgtgctatcaccatctttacataatcatgtttccacaggaactattgatgaaagtagcagcagtgtcaattttggtgatagtgctattggattcatgaaaaggaaaaatgcagtagttgctggaaatcatcattttcttcatggatttgctggctcaagttcatctgttcatgcgcctcagaatcctgtgcgcggaccatggaatgcttcatctcaatcaaattgtttacccggttatgctgcttcaaacctaccagaataccacaatagcaatgggtggccattcttagaagaatcttctgcagatgcttcaaattgtttcagttctgtggctgctcgcccagagttggtacctcatggtaactatttatatccatctcacataagccagtgcaatacatgggttccacaggctgcaagtcatggagtgccacagtggggatatagtaatgccatggtcaatcctccaggttag

SEQ ID NO: 3154 - protein, 268 aa, Sorghum bicolor
MSHRNMLWTHQSVNPEWEQGHVQVQPGSSYYAGTSDSSNLGMQVAVGIPGNTANVGICDLRNHERPHVHNSYPHASVTSRFVFPTTMYNPSMSAAAVNIYIPQTQSFGLGNVLSPSLHNHVSTGTIDESSSSVNFGDSAIGFMKRKNAVVAGNHHFLHGFAGSSSSVHAPQNPVRGPWNASSQSNCLPGYAASNLPEYHNSNGWPFLEESSADASNCFSSVAARPELVPHGNYLYPSHISQCNTWVPQAASHGVPQWGYSNAMVNPPG

SEQ ID NO: 3155 - DNA, 399 bp, Sorghum bicolor
atggccatcgaggcggacgcggcggcggtgacagcggcgagggcggtttcggagacggcgcccatgtccccggccgccgagacggcggcatcagcggcggcggcgcgcccgcgcgggtggctgaggaagctcatcccgagagactaccacctgccccggagcagccggcgctggaggctggccgccccgtccgccgccggcgcgtccaggctcgcctcgtcgctgtctcgctccctcaggtggaagggcctcccggggctctcctccctctccctccgcagcggctccgcggccgccgtcgtcgacgccgtcgcgttccgcgtcatgtacgtcgtcgaggccgtcgtgctcggcctcgcgctctcctgcttcttcctctgctgcggctgccacctctaa

SEQ ID NO: 3156 - protein, 132 aa, Sorghum bicolor
MAIEADAAAVTAARAVSETAPMSPAAETAASAAAARPRGWLRKLIPRDYHLPRSSRRWRLAAPSAAGASRLASSLSRSLRWKGLPGLSSLSLRSGSAAAVVDAVAFRVMYVVEAVVLGLALSCFFLCCGCHL

SEQ ID NO: 3157 - DNA, 2460 bp, Sorghum bicolor
atgggcaaggcgaaggggaagcagcgtcaggacaagttctaccacctcgccaaggagcaagggtaccggagtcgcgcggcgttcaagctgctccagctcgacgcgcggttccgcttcctcccgacggctcgctcggtgctcgacctctgtgccgcgccaggagggtgggtccaggtggccgtcaaccatgcccccgtgggagccttcgtcgtcggcgtcgacctcgtccccatccgccccatccgtggtgcccactcgctcaccgaggatatcaccaccaccaagtgccgcgccgcggtgcggaggcttatggactccaacggcgtctccgccttcgacgtcgtgctccacgacgggtcgcccaacgtcggtggtgcctgggcgcaggaggccacatcgcagtcggctctcgtcattgacgcactgcgccttgctaccatgttcctcgctcccaagggcgccttcatcacgaaggtttttaggtctcaagattacaacgctattatgtactgtcttaaacagttctttgagaaggttgaggcgactaaaccttcggcaagtcggtctacatctgctgaaatttatatcatctgccagaaatacaaggctcctgcaaagattcaaccagaacttctagatataaagcacttgttcagtgttgttccagaacagaccaaatctagggatgttatggatggtaggaaaaagagacaccgtgatgggtatgaagaagggaatacgacattgcggaaagtcggtttggcatcagactttgtatggtctgatgcccaggcgccactggagtttttgggctcttacaatgcaatttcatttgataatccagaatccctgcccataaaaaatcatgagcttacaacagatgatataaaaaatttctgtgaggacttacttctgttggataaaaatagtttcaagcatatcttgaaatggcgaattcgcttacgaaaatcactgtcagcgtcttcacaagtcaccccaaaggtcaatgatgctgtggagaacacaaaggtcacagatgatgatgtgcttctacaagaaatggaagaattgaccagtgtcatcgatagaaataaaaaaagagagaaaaagcgtttgtcaaagcgtcgagcgaaggataaagcacgcaaggccacaggaatgcagattgatgctactggagatgattatggcgatcctgacttgttttctattagtgttattaagggtggaaaacaacttgaagctgttgaatcagcagagcttaatgtggaagatgaaattggagacagtgagaatgaggatactcaagctcttgaagactctgatgaggaaattgattctgatgaggaacagcagaggtatgatgcccagcttgaggagatgcttgatgaagcttatgagcgctttgtaactaaaaagggtggtgaaataaaacaagaacgcaagcgtgcgaaacgaatcaatcctgatgctgatgcagacctgttagagggaggtgaagatgatggtgatgttgaaatggatcaagattttgatgaagatcaagatcaggagaccaatccccttctgttatctctagatgaacagaggccaactaaagagcagattgtaaagcaatggtatagtcaggatgtgttcacagaagctgtaaccggcgttactgagcagagtgacactgaagatgaaagggagagtttgcagaggaataagaagatggatactggcaaaaaggaaaaggtggctaaagcacagcgtttgcaacaagaagattttgagattgtaccagcagaacctgtccgaaacgaagaggattcatcttcatcttctgatgaatcagatcaatcagaggatgatctcgatgattacagaaaggctgaagtactagcctatgctaagaagatgctgaggaagaaacagagagagcagatacttgatgatgcttacaacaagcacatgtttgatgatgaagggttacccaactggtttgttgaggatgaaaagcgacataggcagcccatgaagcctgttacacgtgaggaagtagcagcgatgagggctcagtttaaggagattgatgcccgtccatccaagaaggttgcagaggccaaggctcggaagaagcgtgttgccatgaagaaacttgacaaggcacgccaaaaggcagatgctatagcagaccagaatgacataaacgagcgatcaaagaggaagatgatcgaccagatttacaggaaggcgatgccaaagaggcctcagaaggagtatgttgttgcaaagaagggggttcaggtgagggctggcaaagggaaggtgttggtggatccacggatgaagaaggacaagcgggccagcgggactgggaagaaagggaagaagggcggcaaaggcgcaaaggggaagggtggcctgaaaggcatgagagggaaagctgggaagaaggctgggaaagccccgcggtaa

SEQ ID NO: 3158 - protein, 819 aa, Sorghum bicolor
MGKAKGKQRQDKFYHLAKEQGYRSRAAFKLLQLDARFRFLPTARSVLDLCAAPGGWVQVAVNHAPVGAFVVGVDLVPIRPIRGAHSLTEDITTTKCRAAVRRLMDSNGVSAFDVVLHDGSPNVGGAWAQEATSQSALVIDALRLATMFLAPKGAFITKVFRSQDYNAIMYCLKQFFEKVEATKPSASRSTSAEIYIICQKYKAPAKIQPELLDIKHLFSVVPEQTKSRDVMDGRKKRHRDGYEEGNTTLRKVGLASDFVWSDAQAPLEFLGSYNAISFDNPESLPIKNHELTTDDIKNFCEDLLLLDKNSFKHILKWRIRLRKSLSASSQVTPKVNDAVENTKVTDDDVLLQEMEELTSVIDRNKKREKKRLSKRRAKDKARKATGMQIDATGDDYGDPDLFSISVIKGGKQLEAVESAELNVEDEIGDSENEDTQALEDSDEEIDSDEEQQRYDAQLEEMLDEAYERFVTKKGGEIKQERKRAKRINPDADADLLEGGEDDGDVEMDQDFDEDQDQETNPLLLSLDEQRPTKEQIVKQWYSQDVFTEAVTGVTEQSDTEDERESLQRNKKMDTGKKEKVAKAQRLQQEDFEIVPAEPVRNEEDSSSSSDESDQSEDDLDDYRKAEVLAYAKKMLRKKQREQILDDAYNKHMFDDEGLPNWFVEDEKRHRQPMKPVTREEVAAMRAQFKEIDARPSKKVAEAKARKKRVAMKKLDKARQKADAIADQNDINERSKRKMIDQIYRKAMPKRPQKEYVVAKKGVQVRAGKGKVLVDPRMKKDKRASGTGKKGKKGGKGAKGKGGLKGMRGKAGKKAGKAPR

SEQ ID NO: 3159 - DNA, 1506 bp, Sorghum bicolor
atggcgagcaacagggcatccggcagcgagtacgagagcggcagcgaccacgacggcgcgctgcagaagccgctgctgcccaacagcgggagctggtaccggatggggatggggtcgcgccagtccagcctcaacgccgccggcacctcctccatggccgtcctgcgcgagtcccacgtctccgccttcctctgcacgctcatcgtcgcgctcggccccatccagttcggcttcaccggcggctactcctccccgacgcaggccagcatcatccgggacctcaacctctccatctccgagttctcggtgttcggctcgctctccaacgtgggcgccatggtcggggcgatcgccagcgggcagatggccgagtacatgggccgcaaagggtcgttgatgattgcagcgattccgaacgtcattggttggcttgcaatctcctttgcaaaagactcttcatttctgtatatgggacgcttacttgaaggatttggtgtcggtatcatttcctatgtggtaccagtatacatagcagagatatctcctcagaacatgagaggggctctaggttctgtgaaccagttgtctgtaacccttggtatcatgtttgcctatttgctcggcttatttgttccttggaggcttcttgcagtaataggaaccttgccctgcatagtgttgatacctggcctattcttcattccggaatctccaagatggctggcaaagatgaatatgatggatgattgtgagacttctctacaagttctgaggggattcgatgctgacatcactgcagaagtgaatgatataaagagagcagtaacatcagcaaacagaaggactacaatccattttcaggagttgaaccaaaagaaataccgaacacccctaattataggaattggtctacttgtgctgcaacagctaagtggaataaatggtatactgttttatgcaagtagcatcttcaaagctgcaggtctcaaggacagtgacttggacacatttgcacttggagctattcaggttcttgccactgttgttacaaccatgttcttggacagagctggtcgacgaatcctccttattatttcttctgctgggatgactataagccttcttgtagttgctattgtattttacatcaaggataatctttcacatgactctgacttgtataacatcttaagtatggtgtccttggttggtgtcgtggcctatgtcattgccttctccttcggtatgggtgccattccttggatcataatgtccgagatcctcccagttagcatcaagagtcttgcaggaagctttgcgacccttgccaactggttgacatcctttggaataacaatgacagccaacttgctgatcagctggagtgctggaggtacgtttgcctcctacatgattgtgagtgccttcactctcgtgtttgtaatcatttgggtgccagagacgaagggaagaaccctcgaggagatacaatggtcattccgctga

SEQ ID NO: 3160 - protein, 501 aa, Sorghum bicolor
MASNRASGSEYESGSDHDGALQKPLLPNSGSWYRMGMGSRQSSLNAAGTSSMAVLRESHVSAFLCTLIVALGPIQFGFTGGYSSPTQASIIRDLNLSISEFSVFGSLSNVGAMVGAIASGQMAEYMGRKGSLMIAAIPNVIGWLAISFAKDSSFLYMGRLLEGFGVGIISYVVPVYIAEISPQNMRGALGSVNQLSVTLGIMFAYLLGLFVPWRLLAVIGTLPCIVLIPGLFFIPESPRWLAKMNMMDDCETSLQVLRGFDADITAEVNDIKRAVTSANRRTTIHFQELNQKKYRTPLIIGIGLLVLQQLSGINGILFYASSIFKAAGLKDSDLDTFALGAIQVLATVVTTMFLDRAGRRILLIISSAGMTISLLVVAIVFYIKDNLSHDSDLYNILSMVSLVGVVAYVIAFSFGMGAIPWIIMSEILPVSIKSLAGSFATLANWLTSFGITMTANLLISWSAGGTFASYMIVSAFTLVFVIIWVPETKGRTLEEIQWSFR

SEQ ID NO: 3161 - DNA, 1302 bp, Sorghum bicolor
atggccgccgccgccgcagccgcgtcctcctctgcggcagcttgcttcctctccccgctcccgccgccacgtcgcccgcgtcatttcctcaggcacctcgcgcgcgccgcggccaccaagccggcgcccgcgcccgcgcccgcctccgcctcctcgccgtggccgtgggcgcggcggctcggctcgctggtccccggagagaccgcgggccggctgctgtcgtcggccgcgggctccctcatcgtcgcgctcgcctccgcgtcgctcgtcctcggcgacgccggcgcggcatccgcgttcgtggtctccacgccccggaagctgcaggcggacgagctcgccaccgtgcgcctcttccaagagaacacgccctccgtcgtctacatgacgtacttcgtgtgcgggcaggacgcgttcaccctcgacgtgctagaggtgccacaggggtccgggtcgggctttgtctgggataagagtggccacatcgtcaccaatttccatgtcattcgtggcgcgtcagacctcagggtcacacttgctgatcagtcagtgtatgaagcgcaagttgttggatttgaccaggacaaggatgttgctgttttgcgtatcaaagcaccaaaggataaactaagacctatacctgttggtgtgtcagcagacctactggttggtcagaaagtatatgccattggaaacccatttggccttgaccacactcttacaacaggtgttatcagtggattgcgtcgagaaatcagttcagctgccacgggacgtcctatacaagatgtgatacagactgatgctgctatcaaccctggtaacagtggtggtccactccttgatagttctggaaacttgataggtgtaaacacagctatatactcaccctcaggagcatcatctggcgttgggttttccattccagttgatacagttgggggcattgtggaccaacttataaaatttggcaaggtgaccagacctattttgggaataaagtttgcccctgatcaatctgtagagcagcttggattaagtggagtgcttgtcttggatgctcctccaaacggaccagctggcaaagcgggtctgcaatcaaccaaacgagatccctatggccggcttatcctgggtgatataattacctctgtgaatggtacaaaggtaacaaacggaagcgacttgtatcggatattggatcagtgtaaagttggggaaacggtgaccgtggaagtcttgcgtggcgatcataaagagaagatccctgtggtcctggaaccgaaggctgacgaatcctag

SEQ ID NO: 3162 - protein, 433 aa, Sorghum bicolor
MAAAAAAASSSAAACFLSPLPPPRRPRHFLRHLARAAATKPAPAPAPASASSPWPWARRLGSLVPGETAGRLLSSAAGSLIVALASASLVLGDAGAASAFVVSTPRKLQADELATVRLFQENTPSVVYMTYFVCGQDAFTLDVLEVPQGSGSGFVWDKSGHIVTNFHVIRGASDLRVTLADQSVYEAQVVGFDQDKDVAVLRIKAPKDKLRPIPVGVSADLLVGQKVYAIGNPFGLDHTLTTGVISGLRREISSAATGRPIQDVIQTDAAINPGNSGGPLLDSSGNLIGVNTAIYSPSGASSGVGFSIPVDTVGGIVDQLIKFGKVTRPILGIKFAPDQSVEQLGLSGVLVLDAPPNGPAGKAGLQSTKRDPYGRLILGDIITSVNGTKVTNGSDLYRILDQCKVGETVTVEVLRGDHKEKIPVVLEPKADES

SEQ ID NO: 3163 - DNA, 183 bp, Sorghum bicolor
atgtacaataataaaggggaatataaaattattagacacattctcacgattaacttcttcgagctacaggatcattttttttctctctttccattgtttcctctcaacagtcatagcaagtccagcgcacatcaaaactgggttaaattcccattgagtaaggcaccacggcagcctctctag

SEQ ID NO: 3164 - protein, 60 aa, Sorghum bicolor
MYNNKGEYKIIRHILTINFFELQDHFFSLFPLFPLNSHSKSSAHQNWVKFPLSKAPRQPL

SEQ ID NO: 3165 - DNA, 3387 bp, Sorghum bicolor
atggaagggacgacggcggcggaggtgggcggcgccggcggcggcgcggccggggatgtgcagattaagggcaccaaggagaatgggcagcccgcggcggtggcggcagggccgccgccacagccgtctggcagcgaggcgctggagatgccggccacgccggtcacgcgggacttggactggtccgagcatttctccttcttcacctcgctgggcgggtttggggccagctcggacggcgcgaggggcctcaccagcgtcgggctgtccaattctgagtccaggccggacagcgtgacgcagcgtggcttggaccatgatgcggaagagagggtggaggagctcacattgaagaattgcatcaacaatgatgtccagcctgaggtttctgctggtgggagcacaagcagcggggataagcctactgttattaaaggcctgtggggtaacttcacacggatggcccggagaactagcgatttgcccagcagggaaaacgccgccgcactgagttacggcgacattgcaaacttgagggctgctgatggttctagcagggaaaatctggcgacaagccttgccaacaataatatcatctcaaggaacaatgatgcgtccggaaatgaggcacctatgagtcgtgttggatatgtcaataatgagttcatgacaccgtttcgcagccagcagattctcttgtctccatggtctaatcaggacaatgctcttaaagtaagcagcttctcgaataggattcttgaccggatgagaagtaagactgtggcaccccaatctgtggttctaggatcaccacttaaaagcaaatcaaaaggtaaaggggttgcgtaccaaggcgtacgggaggagatccaagggcaagctaatgcaagacccagagaccctttggacaagattccgactattcctacctcaattcatgattctatggccagagtggaccctatgcttttcactactggtggaaatgtttcaaaatcccactccgagggaacttgcctgagggaactgattaagcctgggcggcaaacaatgaccaagtttgataaaatgcatttgtttaagcaaattcttgatcttgtggataagtgtcatgcacagggttttactttacagcatttgcgaccgtcatattttacgaccctttcttcaaatcaagttaaatatattggttcttataccacacaagacttgccaacatcaatcaaacaagaggttgctagagaagatcttgtgaatagaaaaagggcttttggccatagaattgatcaccaagattctaatggctatggaaatttgatgctgaagtatcagaaggttggcgggcaaggctcagttgctatcaggcgaccagcaaatacattttggactgaccaaatatgtgacaatcaaaatgaagatgtcgatccaggtgtttcgaggcaagaaaattttagttacactgccagagagcgttttaagttcgtcgaaccatatggaaataatacatctggtgctcaacatgtatctagttctggcacccaacaaccagcatttgaattgaggaatcttgaggaaagctggtacaaaagcccggaggagcttagtcaatttaaaggcacattcccttcaaatatctacagccttggggttcttctatttgagctcttttgctgttctgagacatgggaggtgcactgtgctgcaatgtcaaatcttcgccaacgcatcctgcctcgaaattttctttcagaaagtcccaaggaggccggcttctgcctttggttactacatccagatccttgttcaagaccaaaagcaaaagagattcttggatgtgacttgataaatgagggtcgggatttgtccttgttagatcaggcaccagtttccatcagtgaagatgacactgaatctagtttgctgtttaacttcctttctcaactgaaagaagaaaaggagatgctggctgccaaattatcagcagagcttggaagcttagaaacagatatcacagaggttgagagaagacactcagcaagaatgagattgagtttagaggacacggatgtactgccaagttctggtgttttgtcaggagcttctgtgagtgccgttcaaggtgcattgctgtcaggtttgctaccgacatcgtgcaagtcaagtgtatatgaggagagggtaatgagaaatttggtgcagcttgaaaatgcatattactccatgaggtcctctgtggacaccagtgaaactaatgcaatcaaacgtccagataacgaggctttgagggttcgtgaaaatttccatcaacttcacagtgattttgatgctaagggtgagaaaacagaccgtcttggatgcttttttgatggtttatgcaaatatgcccggcacagtaggtttgaggtccgaggaattctgaagaatgcagatatacttaactctccgaatgtcatctgttcattgagttttgatagggatgaagaatattttgctgctgctggagtttcaaagaaaataaaaatatttgaatttgatgcactcttaaatgatcgtgttgatattcattacccactggtagagatgcctagcaagtccaagcttagctgtgtcagttggaacaactatataaagaactacctggcatcaacagactatgatggcactgttcagctatgggatgccagctctggtcaaggattcacacagtttacagagcaccggaaaagggcttggtctgtgagtttttcagaagttgatcctactatgttggcaagtggtagtgatgattgttgcgtcaaagtatggagtattaatcagagaaattgtattgatacaatcagaaatgtggcgaatgtatgctgtgtacaattctctccatactcctcccgcatgctagcttttggttcagctgattacaagatatactgttatgatctgaggaacacaaggataccttggtgtactatttcgggacatggaaaagctgtcagttatgtaaggttcttggatccagaaacacttatctctgcatcaaccgacaacacattgaagatatgggatcttaaccggactaattgcagcggattatctaccgattcttgcagcctgactctgaatggtcataccaacgagaagaattttgtagggctatctgttcatgatggatacataacttgtggctctgaaaccaatgaagtgttttcttactacaaaactttccccatgccaataacttctcataggtttggttctattgacccgataactggacaagtaacaaatgaagacaaccaacaatttgtgtccagtgtttgctggagagggaagtcaaacatggtagtggctgccaactccagtggtagcatcaaagtgcttgagcttgtgtga

SEQ ID NO: 3166 - protein, 1128 aa, Sorghum bicolor
MEGTTAAEVGGAGGGAAGDVQIKGTKENGQPAAVAAGPPPQPSGSEALEMPATPVTRDLDWSEHFSFFTSLGGFGASSDGARGLTSVGLSNSESRPDSVTQRGLDHDAEERVEELTLKNCINNDVQPEVSAGGSTSSGDKPTVIKGLWGNFTRMARRTSDLPSRENAAALSYGDIANLRAADGSSRENLATSLANNNIISRNNDASGNEAPMSRVGYVNNEFMTPFRSQQILLSPWSNQDNALKVSSFSNRILDRMRSKTVAPQSVVLGSPLKSKSKGKGVAYQGVREEIQGQANARPRDPLDKIPTIPTSIHDSMARVDPMLFTTGGNVSKSHSEGTCLRELIKPGRQTMTKFDKMHLFKQILDLVDKCHAQGFTLQHLRPSYFTTLSSNQVKYIGSYTTQDLPTSIKQEVAREDLVNRKRAFGHRIDHQDSNGYGNLMLKYQKVGGQGSVAIRRPANTFWTDQICDNQNEDVDPGVSRQENFSYTARERFKFVEPYGNNTSGAQHVSSSGTQQPAFELRNLEESWYKSPEELSQFKGTFPSNIYSLGVLLFELFCCSETWEVHCAAMSNLRQRILPRNFLSESPKEAGFCLWLLHPDPCSRPKAKEILGCDLINEGRDLSLLDQAPVSISEDDTESSLLFNFLSQLKEEKEMLAAKLSAELGSLETDITEVERRHSARMRLSLEDTDVLPSSGVLSGASVSAVQGALLSGLLPTSCKSSVYEERVMRNLVQLENAYYSMRSSVDTSETNAIKRPDNEALRVRENFHQLHSDFDAKGEKTDRLGCFFDGLCKYARHSRFEVRGILKNADILNSPNVICSLSFDRDEEYFAAAGVSKKIKIFEFDALLNDRVDIHYPLVEMPSKSKLSCVSWNNYIKNYLASTDYDGTVQLWDASSGQGFTQFTEHRKRAWSVSFSEVDPTMLASGSDDCCVKVWSINQRNCIDTIRNVANVCCVQFSPYSSRMLAFGSADYKIYCYDLRNTRIPWCTISGHGKAVSYVRFLDPETLISASTDNTLKIWDLNRTNCSGLSTDSCSLTLNGHTNEKNFVGLSVHDGYITCGSETNEVFSYYKTFPMPITSHRFGSIDPITGQVTNEDNQQFVSSVCWRGKSNMVVAANSSGSIKVLELV

SEQ ID NO: 3167 - DNA, 423 bp, Sorghum bicolor
atggcggatcaggagaccccagctgtggttgaggcacctaccccggttcttggggagccgatggacctgatgactgccctgcagctcgtcatgaagaagtcaggtgctcatgatggccttgtgaagggtcttcgtgaggctgccaaagccatcgagaagcatgctgctcagctttgcgtgcttgctgaggactgtgatcagcctgattatgtcaagctggtgaaggctctctgtgctgagcacaatgtccacctggttacggtgcctagcgctaaaactcttggcgagtgggctgggctttgcaaaattgactccgagggcaaggcaaggaaggttgtaggctgctcctgtgttgtggtcaaggactatggcgaagaatctgaaggccttaacatagtgcaggagtacgtcaaatcgcactag

SEQ ID NO: 3168 - protein, 140 aa, Sorghum bicolor
MADQETPAVVEAPTPVLGEPMDLMTALQLVMKKSGAHDGLVKGLREAAKAIEKHAAQLCVLAEDCDQPDYVKLVKALCAEHNVHLVTVPSAKTLGEWAGLCKIDSEGKARKVVGCSCVVVKDYGEESEGLNIVQEYVKSH

SEQ ID NO: 3169 - DNA, 1767 bp, Sorghum bicolor
atggaggtgcacatcggggtcggagttccggccaccgtccaccgtccaccgggcctctctccttgtcgccggccacctggagccgagggcggacagggaggggcgcagggagccgagggccggacacgagggcggacgcggagggagggcgcgaaggagccgagggccggcgggcgcgtggtgaggcagagagagggccggaagtcgccgccgccgtcgggcgcgtgggcgcagagagagggcaggggcggacgcgtcgcggctctggggagaacgcgactcttcgaagccaaacgcgattcctggggcgtcctggatgcgaacgcgtcctcaaaacagaggaggggcaaaaggacttctgttaccgatctcacagctgtgggtgagggccgtggcactgtgctctcgctcaagttggataggctgtcaggttcaatttctgggctcgccgtagttgatcccaaagggtatttgacagacctgaaaagttgctcggcagctcatccagcattccagcgtggctgtgaggagtgtcccaagaacgaagatgtttggcttgaggcgtgccgtttagccagtccagatgaggcgaaggctgtaattgcccgtggtgtgatgtcaattccaaattctgtgaagctgtggttgcaggcagcaaaacttgagagtagtgatctgaataagagcagggtgttgaggaaagggttggagcacattcccgattcagtccggctatggaaggctgtagttgagcttgcaaatgaggaggatgcaaggctcttgcttcacagggctgtggagtgttgcccattgcatgttgagctttggcttgcccttgtgaggctggagacctatgaccaagcaaggaaaatacttgacaaggcgagggagaagctccccaaggagcctgccatttggattatggctgcaaagctagaggaggcaaatgggaacgcacaatcagttaacaaggtgattgagagaggtatcagatgtctacagagagaaggaatggatattgatagggaagcatggttaaaagaagcagaacccgcagagcgtgctggatcagttttgacttgccaggctattgtgaagaacaccataggcattggtgttgaagatgaggatcagaagcacacatgggttgctgatgctgaggaatgcaagaagcgtggttcaattgaaatagcacgtgccatctatgcacatgcacttactgtgttccttactagtatttggctgaaagcagctcaacttgagaagagccatggaactggggagtcacttgatgcactcctcaagaaagctgtcaactacaatccattagctgaagtattgaggcttatggctgcaaagaaaaaatggttggctggggacatgcctgctgcttgtgccattcttcaggaagcttatgctgctatccccaattcagaagagatctgtctggctgcattcaagctcgagtttgagaacaacgagccagagagagcgaaaatgcttttggccaaggccagtgaaagaggagggacagagagggtttggatgaaatctgccattgttgagcgggaattgggcaatgttggtgaggaaaagagattgttggaggaaggattgacgctgttccctttattcttcaaattctggttgatgcttggacagatggaggactgtcttggtaatggagctaaggccaaggaggttttgagaatggcctcaagcactgccctaattgcatccctctttggctctctcaaactagcctag

SEQ ID NO: 3170 - protein, 588 aa, Sorghum bicolor
MEVHIGVGVPATVHRPPGLSPCRRPPGAEGGQGGAQGAEGRTRGRTRREGAKEPRAGGRVVRQREGRKSPPPSGAWAQREGRGGRVAALGRTRLFEAKRDSWGVLDANASSKQRRGKRTSVTDLTAVGEGRGTVLSLKLDRLSGSISGLAVVDPKGYLTDLKSCSAAHPAFQRGCEECPKNEDVWLEACRLASPDEAKAVIARGVMSIPNSVKLWLQAAKLESSDLNKSRVLRKGLEHIPDSVRLWKAVVELANEEDARLLLHRAVECCPLHVELWLALVRLETYDQARKILDKAREKLPKEPAIWIMAAKLEEANGNAQSVNKVIERGIRCLQREGMDIDREAWLKEAEPAERAGSVLTCQAIVKNTIGIGVEDEDQKHTWVADAEECKKRGSIEIARAIYAHALTVFLTSIWLKAAQLEKSHGTGESLDALLKKAVNYNPLAEVLRLMAAKKKWLAGDMPAACAILQEAYAAIPNSEEICLAAFKLEFENNEPERAKMLLAKASERGGTERVWMKSAIVERELGNVGEEKRLLEEGLTLFPLFFKFWLMLGQMEDCLGNGAKAKEVLRMASSTALIASLFGSLKLA

SEQ ID NO: 3171 - DNA, 1320 bp, Sorghum bicolor
atgccgccggcgctgcgcctgctcgtcgcgacggcgctgctgctgctgtcgtcgtcggcgggggcgcaggattcgtgttggtcggggccggcgccgctgcgcggggcgtggatgtccgtggccagcttcggcgcgcgcggggacgggcagacgctcaacacgggcgcgttcgcgcgcgccgtggcgcgcatcgagcgccgccgcggcgcgcggggtggcacgctgctgtacgtgccgcccggggtgtggctcacgggccccttcaacctcacctcccacatgacgctcttcctcgcccgcggcgccgtcatccgcgccacccaggacacgtcgagctggccgctcatcgacccgctgccgtcgtacgggagagggcgcgagctgcctggcgggaggtacatgagcttgatccacggcaatggtctccaagacgtcttcatcacaggtgagaacggcaccattgacggccaaggcagcttgtggtgggacatgtggaagaagcgcacgctgcccttcacgaggccgcacctgctggagctcatgtactccaccgacgtcgtcgtctccaacgtcgtcttccaggactcgccgttctggaacatccacccggtttactgcagcaatgtagtaatagcgaacgtgactgtgttggcaccacatgactccccaaacactgatggcatcgatctagattcaagcagcaatgtctgcattgaggactcctacatttccgcgggcgatgacctgatttccatcaagagtggctgggacgagtacggcattgcttttggccgtccaagctctggcatcaccatccgaaggataaccgggtccgggccatttgctggctttgcagttggaagcgagacatctggtggcgtggagaatgttcttgtcgagcacctgaatctcttcggcatgggtgttgggatccatatcaagaccaactcaggaaggggaggattcatccggaacatcaccgtctctgaagtgaccttgaatggagctcggtatggtttgaggatcgccggtgacgttgggggccaccctgatgcgtcctacaacccaagtgtgcttcctgttgtcaacagcgtgacgattaagaatgttttgggtcagaacatccggcaggctgggctgataaggggcatcagaaactcggttttcagtaacatatgcctctcaaatgtaaagctctatgggagtgcatccatcgggccatggaaatgccgagctgttagtggtgccgcacttgatgtgcagccatcaccatgtacagagctggctagtacatctgagacaggtttctgtacaagttag

SEQ ID NO: 3172 - protein, 439 aa, Sorghum bicolor
MPPALRLLVATALLLLSSSAGAQDSCWSGPAPLRGAWMSVASFGARGDGQTLNTGAFARAVARIERRRGARGGTLLYVPPGVWLTGPFNLTSHMTLFLARGAVIRATQDTSSWPLIDPLPSYGRGRELPGGRYMSLIHGNGLQDVFITGENGTIDGQGSLWWDMWKKRTLPFTRPHLLELMYSTDVVVSNVVFQDSPFWNIHPVYCSNVVIANVTVLAPHDSPNTDGIDLDSSSNVCIEDSYISAGDDLISIKSGWDEYGIAFGRPSSGITIRRITGSGPFAGFAVGSETSGGVENVLVEHLNLFGMGVGIHIKTNSGRGGFIRNITVSEVTLNGARYGLRIAGDVGGHPDASYNPSVLPVVNSVTIKNVLGQNIRQAGLIRGIRNSVFSNICLSNVKLYGSASIGPWKCRAVSGAALDVQPSPCTELASTSETGFCTS

SEQ ID NO: 3173 - DNA, 858 bp, Sorghum bicolor
atgccggtgcaggtcggagggagcaaggtggcggaccccaggccggccagggtgctggacctctcgcccgccgccgtcgtcggcgacaaggcccgcgcctccgccaagaagaaccaccgccgccgccacaagaaggcctcctcctcccccgccgacgccgccgcatcttccatctcgcccatgcagaggctcttcgacaccagcagggaggtctttgccaactcctacccgggcttcgtcccgccgccggacgccgtcgcgcgcctctcgggcatcctcaatgagctgaaaccacgtgatgttcgggttgccccaagtatgtccgtcttcaaacatgctgaccctaaaagcccccctccagttacttatttgcatttctatgattcctctgagttctcgtttggtatcttctgtttaccgaaatcagcagttattccccttcacaaccatcctgggatgacagtgtttagcaagatactatttggttcaatgcacctcaagtcatatgattgggctaaaagtctgccggatagtaacgataatgcacttcagaactctgatggagctcgtctggccagggtaaacacagatgctgtttttgacgcttcatctgagacggtagttctgtaccctgaaaatggagggaatttgcactgttttacggcattgaccccttgtgccgtgctggatgtgatggggcccccctacaaccgtgatgagggaagggattgcgcgtattacggtgaatcaccgtactcaggttcatgtggtggagatgaacaattttcttggctgaaagaggttcatagcacatttgagatgcaaggcataaagatggagcagcacttcatcatctaa

SEQ ID NO: 3174 - protein, 285 aa, Sorghum bicolor
MPVQVGGSKVADPRPARVLDLSPAAVVGDKARASAKKNHRRRHKKASSSPADAAASSISPMQRLFDTSREVFANSYPGFVPPPDAVARLSGILNELKPRDVRVAPSMSVFKHADPKSPPPVTYLHFYDSSEFSFGIFCLPKSAVIPLHNHPGMTVFSKILFGSMHLKSYDWAKSLPDSNDNALQNSDGARLARVNTDAVFDASSETVVLYPENGGNLHCFTALTPCAVLDVMGPPYNRDEGRDCAYYGESPYSGSCGGDEQFSWLKEVHSTFEMQGIKMEQHFII

SEQ ID NO: 3175 - DNA, 2256 bp, Sorghum bicolor
atgtctccgtggaggggaccctggtctggctgcgccgccccaatggctcctggtggcccagcatcgtcatctcgccgcaagacgtccccgaaggctgccccccgccgccgcgctgccccgccacacccatcatgctcctcggccgccgccccgacggaccaacctatgtgtatgctgcttcttgcttccgtacttacttactggcaacaagatgtcacaccatgtcagtcactcaatctcctgctcaatccttcctcttgcgcttgccacagcgactggtgtaacctcgacaggtgcaagcgcgtcaagcccttccgctgcggggagctcgacttcgagcagcgcatcaccaacgccctcaccctcgccgccacaggcaacaggtccacctggagctacaacaagggcaggtacgcccgcatggaggacgccattctccaggccctcgacatagagaaggagcgagctctcggctcaaaaaccaaggcctacctccatgctgccagctgctctcccagtcccaaaactgaaatgaccaacgggcaagtcaaagatgctacagcaaaggatgcttctccaaccattcagccgtcaccgctgctgttgccgctccccctgccaccgctgccgcccaagcggaagcgcaagacgccctatgactctgaggacgatgcgcccaaagggtcccgccgcatgagggacctcagggacatcggatccaagacggtccccccaatggacttggtgaatgctgccgcaatctcggctaccaagtatgatgatctgcctaatgatggacaggtcaaaagaattgtgcactctcaggccaccacaaagaggaagcatgctgacacgcatcaggaccaaccttgtgggatccccaggaagaaggataggtctcgcccgctctcggagctctgcaatggagacatgtggaatggttccagaccaaatggccagaaggccgatgaacatttgttgggtgtggctacatgttcaagcagctcctctggcacttcaaccttggatactccattggacacgaatagctgtcatcgcagcgcagcattcaaaacagatcaagcaaagggcacagaaatatcctgcatgacaaggctactcagtgacgattcccggcatgggaatgattttgtcgaaactccccctgctgcacaaaaaatcctggaatcagagaatcctacctggaaatccaataagcaaattcatgactcccggaaagctgagaaacgtgcacgcaaaaatattaagatgagaaccataagttctgttgatcaggagggcaagaacaggacaagagattctaatgatcgtgaccaccacaaaacaaagatagggaagcacaaagtagcaagagatgaggttgtccttttggagaaaaggctggagaagcattctttgaacaagcctgctgaacatgatactaaaatgcatattgccgtagttcctagtggtatggattgtgttggcgcagttcagcagcagcactgtcaaagcaagtgtgatcctgaagagtcattagaaaccttaagcaaccattcaaactgtgagagtggttcagtatcatctctagtgtttgagaagccactgcaggtattgtcgcccgaaaagaaaccgctgggtcatgaaagatgtcatgcagtgaagccaatcaagacgctgcatttgaaccccaccctttatgatgtggagttgagtgtgctggggagcagcaactcgggacgccgtgtgccccttgtttctctaatgagtaggtgcaatcgtaaacctgtcgtggggtatccagtctccgtggaggtcagtgatgatgtgtttgaccgtcctttatcaaggaaagatgtacagcagcctgctacaagcagtgtgaatggaatagtattgaagaaggatgaaactgagagtttacaatgtcttgtgccatcatcagcacagacatcccggccaaaacccaaaagccgcagcaggagggcatcagagaaggaagtggacaagttatggcagccacataccaaaaaaccagcttcctcgtcaagaaagatgcggaggctttcctcttttgcttcaggccagagagacggcgacgacaggaagtcggcggtggggaaagtggcaggcgcaactattgcgtgcatcccgctccgagttgttttcagcaggatcaacgaggcgctgagcttctcagttaatgagaatgccctagctgggtgcggggctgctccccggctgaggaggaggtga

SEQ ID NO: 3176 - protein, 751 aa, Sorghum bicolor
MSPWRGPWSGCAAPMAPGGPASSSRRKTSPKAAPRRRAAPPHPSCSSAAAPTDQPMCMLLLASVLTYWQQDVTPCQSLNLLLNPSSCACHSDWCNLDRCKRVKPFRCGELDFEQRITNALTLAATGNRSTWSYNKGRYARMEDAILQALDIEKERALGSKTKAYLHAASCSPSPKTEMTNGQVKDATAKDASPTIQPSPLLLPLPLPPLPPKRKRKTPYDSEDDAPKGSRRMRDLRDIGSKTVPPMDLVNAAAISATKYDDLPNDGQVKRIVHSQATTKRKHADTHQDQPCGIPRKKDRSRPLSELCNGDMWNGSRPNGQKADEHLLGVATCSSSSSGTSTLDTPLDTNSCHRSAAFKTDQAKGTEISCMTRLLSDDSRHGNDFVETPPAAQKILESENPTWKSNKQIHDSRKAEKRARKNIKMRTISSVDQEGKNRTRDSNDRDHHKTKIGKHKVARDEVVLLEKRLEKHSLNKPAEHDTKMHIAVVPSGMDCVGAVQQQHCQSKCDPEESLETLSNHSNCESGSVSSLVFEKPLQVLSPEKKPLGHERCHAVKPIKTLHLNPTLYDVELSVLGSSNSGRRVPLVSLMSRCNRKPVVGYPVSVEVSDDVFDRPLSRKDVQQPATSSVNGIVLKKDETESLQCLVPSSAQTSRPKPKSRSRRASEKEVDKLWQPHTKKPASSSRKMRRLSSFASGQRDGDDRKSAVGKVAGATIACIPLRVVFSRINEALSFSVNENALAGCGAAPRLRRR

SEQ ID NO: 3177 - DNA, 1014 bp, Sorghum bicolor
atggactccgccgccgccgctctcctcgactcctccgcctccgcctcttcctccgccgccgccaacggcaacgccaaggagatgcccgcccgactcctcgcccaccgcaccgcccacaacatgtcctcctcctcgctccgcaagaagtccgacctcgcgctcctccgcaaggtcccctgcgccacgctccgccgcctcctcgacaacttccaggaggtcctgctcgccaccaagctcgccctcctcttccccgccgtcctcctcgcgctcgccgcgcgaatcttccaattcggccaggaatgggtctttgtgcttagcttgatcggtctcgttcctcttgctgagcgacttagctttctgactgagcaggttgcgttttacacagggcctactgtgggtggactgttgaatgcaacatttggaaatgtaacagaggtcatcattgcaatctttgcgctgtatgaaggcaaggtagtggtggtgaaatgctccctactcggctcagtcttgtccaacttgttgcttgtgcttggaacctcccttttccttggtggcctggctaaccttggaactgagcagctatacgacagaatgcaagtagatgtcagcacaggacttctgattcttggtgtgctatgccactctctgccactgatgctgaggtatgctgtgagctccggggagcacgcggtatcttcttgggattcagaactggagctatcccgagcatgcagcattgtcatgctccttgcctatgtagcctaccttttcttccaactgaaaacccaccgccaactctttgagccccaagaggtcgaagatgatggtgatgattcagtctctcaagacgaggtggtactgggattttccagtgccatgatttggctgggggtcatgactctgatgacagcagtcctatcagagtttgttgtgagtacaattgaggacatcaccctcggagtatctttgggttctgctacacagatttccatgtttgtggtgggtgttaactaa

SEQ ID NO: 3178 - protein, 337 aa, Sorghum bicolor
MDSAAAALLDSSASASSSAAANGNAKEMPARLLAHRTAHNMSSSSLRKKSDLALLRKVPCATLRRLLDNFQEVLLATKLALLFPAVLLALAARIFQFGQEWVFVLSLIGLVPLAERLSFLTEQVAFYTGPTVGGLLNATFGNVTEVIIAIFALYEGKVVVVKCSLLGSVLSNLLLVLGTSLFLGGLANLGTEQLYDRMQVDVSTGLLILGVLCHSLPLMLRYAVSSGEHAVSSWDSELELSRACSIVMLLAYVAYLFFQLKTHRQLFEPQEVEDDGDDSVSQDEVVLGFSSAMIWLGVMTLMTAVLSEFVVSTIEDITLGVSLGSATQISMFVVGVN

SEQ ID NO: 3179 - DNA, 678 bp, Sorghum bicolor
atgatgactggcaatgaaagtgccatggatcaaactatcaaggatgcaggcatcggcaccatcccaaatgaccctctcctgagtgaagtgttatatgagtgcgagaaggaactcatggagaagtctgcaatcgaagagacaatttctgaacttatggatgttaagattcctatgctgcaagttgaagaaatcccaagccaagctgaacaagttcttatacagacccaactcccggccatggagaaagagaagcaatccattcctgaatgctcgctccagaaaagtgttagttctggatgcctcaactcagcagattggatgaatggacctgtcaggccaaactttctagatttccaagggctggactttgaggcagcatttgggatgaggagagcttacagtgaaggagacattcagaaccttggagccaacacgcctcgaccagcggcgcacgcagcaaatgctcaaacgtcttgtgagaggcttgtaaccatcagtgacctcaagactgaagaaaggaagcaaaagctttccaggtataggaagaagaagatcaaccggaattttggcaggaagatcaagtatgcttgcaggaaggctctagcagacagccagccaagagtgcgagggaggtttgccaagatcgaagaatgcgacctgctgaaaccaagcgtttag

SEQ ID NO: 3180 - protein, 225 aa, Sorghum bicolor
MMTGNESAMDQTIKDAGIGTIPNDPLLSEVLYECEKELMEKSAIEETISELMDVKIPMLQVEEIPSQAEQVLIQTQLPAMEKEKQSIPECSLQKSVSSGCLNSADWMNGPVRPNFLDFQGLDFEAAFGMRRAYSEGDIQNLGANTPRPAAHAANAQTSCERLVTISDLKTEERKQKLSRYRKKKINRNFGRKIKYACRKALADSQPRVRGRFAKIEECDLLKPSV

SEQ ID NO: 3181 - DNA, 732 bp, Sorghum bicolor; identical to SEQ ID NO: 43
  misc_feature (328)..(372): n is a, c, g, or t

SEQ ID NO: 3182 - protein, 243 aa, Sorghum bicolor; identical to SEQ ID NO: 44
  misc_feature (110)..(124): Xaa can be any naturally occurring amino acid

SEQ ID NO: 3183 - DNA, 228 bp, Sorghum bicolor
atggtcggcgggccagacaggaacgacggcttcaaggactcgcgcaacaccttcgggcagaacgagccgacgcttgtaggcaacgccggcctcgtggcggccctggtggctctcaccaacagcggcaggggagtcggcattaccgccgtcgacaagaacaccatgttctccgccgtgccgccaatgttccctgccgcgccgccgccgccgtcgtcatggaagccgtga

SEQ ID NO: 3184 - protein, 75 aa, Sorghum bicolor
MVGGPDRNDGFKDSRNTFGQNEPTLVGNAGLVAALVALTNSGRGVGITAVDKNTMFSAVPPMFPAAPPPPSSWKP

SEQ ID NO: 3185 - DNA, 573 bp, Sorghum bicolor
atgggtggtgtcaccgtgacgacgccgctctgctacctggcagtggccgcggcctcggccctgcttctgctgagcaccgccgtggcgccgtgcagcgcgcaggtggtggtgaccatcgaggaggcgtgccggatggcgacgagcggcggcgcggggaaagtgagctacgaccactgcgtggcgtcgctggcgtcggacgcgcggagccgcgacgccgcggatctgcaccacctggccgcgctggccgcgcggatcgcggtggagcacgcggcggcgacggaggccaagatcgaggacctgggcgaggtggaggagagcccccacgcgcgcgcgcgcctgcaccactgcctggacctctacaacgccgccgccgacgtcctgcgcgacgcgctcgacaacctccacgcccgcgtctacggcaaggcgtcccagcagctggccgccgcgctgggcgccgccgagagctgcgaggacgtctggaagggcgaggagcacgtccccgtcgccgcgcacgacagggagtacggccgcatggcgttggtcgcgctcggcctcaccagcggcatcgcttga

SEQ ID NO: 3186 - protein, 190 aa, Sorghum bicolor
MGGVTVTTPLCYLAVAAASALLLLSTAVAPCSAQVVVTIEEACRMATSGGAGKVSYDHCVASLASDARSRDAADLHHLAALAARIAVEHAAATEAKIEDLGEVEESPHARARLHHCLDLYNAAADVLRDALDNLHARVYGKASQQLAAALGAAESCEDVWKGEEHVPVAAHDREYGRMALVALGLTSGIA

SEQ ID NO: 3187 - DNA, 582 bp, Sorghum bicolor
atggagatccctggctgtgtatccagcatcaatcccaaggtggagccttgcgaggacgaggaaccgccattaccgccgccgtttcaagcttcatcagacgagtgggaggtgaccccgctgtccggcgacaaccccttcttcaccagcgtcatgtgcaagagccaagtccagaacccctttcagctggtcatcccggttcgtttccaccgccacctcccggagacgcgcgcgccggcggtgctaatgtgccgcggccggtcgtggacggtgagctactgcggcgtcggcaagtggaagaggcttcagggggcgtggagggacttcgcccgcgacaacgggctccggctcggggacgcctgcgtcttcgagctcgtcgtgcccactgccgccggtgccggaactgaagctgctgctgctgctgcaagtgaaagagacggaaacgacagcagcggcagcagcaaggagaaggaggggaagacgatggaggtggtgttccgggtgcaggtactccgcagcggcctgccggaggagatcgcctcccggggcgccacctccgacgacccactcgtcatcctggactaa

SEQ ID NO: 3188 - protein, 193 aa, Sorghum bicolor
MEIPGCVSSINPKVEPCEDEEPPLPPPFQASSDEWEVTPLSGDNPFFTSVMCKSQVQNPFQLVIPVRFHRHLPETRAPAVLMCRGRSWTVSYCGVGKWKRLQGAWRDFARDNGLRLGDACVFELVVPTAAGAGTEAAAAAASERDGNDSSGSSKEKEGKTMEVVFRVQVLRSGLPEEIASRGATSDDPLVILD

SEQ ID NO: 3189 - DNA, 2853 bp, Sorghum bicolor
atgggcgtgtcaaggccgccaagcacccctgcatcaaagggtgagcacacaccgatgtcgactcctggtggtagctcaagggccaaggaggagaagatttttgttacagtgagggtgaggccactaagcaagaaggagctggctgtgaaggatgatgtggcatgggaatgcgctgatagccagacaatcttgtacaagggccccacgcaggaccgagctgcaccgacatcttacacttttgataaagtgtttggacctgctagccaaacagacgtggtctatgaagagggagctaaggatgttgcaatgtctgcattgacaggcattaatgccaccatttttgcatatgggcaaaccagcagtggtaaaacattcacgatgagaggcgttacagagagtgctgtttgtgatatttatagacacatagataatactcctgagagggaatttgtgataaaaatatctgctatggaaatttacaatgagattgtgaaggatcttctacgacctgactctgctccccttcggttgttagatgatcctgagaaaggaaccattgtggagaagttgcaagaagagattgctaaggacagccaacatctgaggcatctaatcagcatttgtgaagaacaaagacaggttggggagactgcactaaatgacactagttcacgttcccaccaaatcattaggctgactcttgagagcaggctccgtgaagtttcaggatgtgttaaatctttcgttgctaacctgaactttgttgaccttgctggaagtgaacgagctgcacaaacacatgccataggtgcaaggctgaaagaaggttgtcatataaatcgcagcttgttgactttgactactgtcatcagaaagctaagttcaggaaaaagaagtgggcacataccctacagggactcaaagctgacacgcattttacagctttctttgggtggaaatgcaagaacagcaatcatctgtactatgagcccagccctgacacatgtagaacaatctagaaatactctattctttgcaacctgcgcaaaggaggtcacaaatactgcaaaagttaatatggttatatcagataagcaattggtgaaacaccttcagacagaacttgctagactagaatcagagctgaggacccctgaccgtgctgcctcttctgatatcctcataatggaaaaggacaggaagattagagagatggaaattgaaatagaggaactcaggaaacagcgagataatgcacagtcagagcttgaagaactgcggaagaagaagagtgatcaccagccagggtggaatccctttgattcgccacaaaaagcacgcaagtgccttacattttcaggatcactagagccaagtaacaaaatcaagatgatgaggagctcgattaggcaatcatctactgctccatttatgttgaagcatgaaatccgcaagctggagcagctacaacagcagcttgaggttgaagcaaaccgcgccatcgaagtacttcacaaagaagttgaatgccacaagcatggcaaccaggatgctgcggaaaccatcgctaaacttcaggcagaaatcagggagatgcaatctgttaggtctgagaacagagacgtggagatgattacagatgaaggaaatggatctgatttgaaagatgagatttctagacttcatatgcaagacaatgatattgccaaacttgaggcgaagttagaaaatgtgcaacggtctattgacagattggtgatgtcacttccaaatgttgccatgccgtgtaatgagactaccccaaagtcaaacagatcaaagaagaagaagaggctccttcttcctctgggtgtgagcaacaacatcaacagagcaaatcttctcagagcaccttgctctcctcattcttccagtaggccttcagaatcagaagttgagaacagggccccagagggtgacactatgtctgttgagggttcagaaaaggctacccccaccaagagtgaagatggagatatatcatctcgtgacgaaacaccacgctacaggcgctccagttcagtcaatatgaaaaagatgcagaggatgttccaaaatgctgcagaggaaaacgtgaggagcatccgggcctacgtgactgaactgaaggagcgagttgcaaaacttcagtaccaaaagcagctgctagtctgccaggtcctcgagttggaatctaatgaaggcaagtcgaatggagaggataattctgggcctgtacaggatggtcctgattcatgggacagattattcaaggagcagatgcagtgcattattcatctgtgggatcagtgtcatgtatcgatcatacacaggacccagttctacctgttattcaggggtgacagggctgatcagatatacatagaagtcgaagtaagaagactggtatggctgcaacaacactttgctgaggtcggtgacgcaagccctggcgctgttgatgaccctgcagtttcacttatctccagtatgaaggcattgaggaacgagcgagaatttctcgcgagaaggatggggtcaaggctgacggacgaagagcgggagcgcctcttcatcaagtggcaggtgcccctggacgcgaagcagcggaagctgcagctggtgaacaagctctggacggatcccaacgacccggcgcacattgaggagagcgcggacctggtggctcggctggtgggcttctgcgagggtggcaacatcagcaaggagatgttcgagctcaactttaccgtccccacgagcaagaagccgtggatggtgggctggcaacccatctcgaacatgatcagggagaagacccagcagctctggtga

SEQ ID NO: 3190 - protein, 950 aa, Sorghum bicolor
MGVSRPPSTPASKGEHTPMSTPGGSSRAKEEKIFVTVRVRPLSKKELAVKDDVAWECADSQTILYKGPTQDRAAPTSYTFDKVFGPASQTDVVYEEGAKDVAMSALTGINATIFAYGQTSSGKTFTMRGVTESAVCDIYRHIDNTPEREFVIKISAMEIYNEIVKDLLRPDSAPLRLLDDPEKGTIVEKLQEEIAKDSQHLRHLISICEEQRQVGETALNDTSSRSHQIIRLTLESRLREVSGCVKSFVANLNFVDLAGSERAAQTHAIGARLKEGCHINRSLLTLTTVIRKLSSGKRSGHIPYRDSKLTRILQLSLGGNARTAIICTMSPALTHVEQSRNTLFFATCAKEVTNTAKVNMVISDKQLVKHLQTELARLESELRTPDRAASSDILIMEKDRKIREMEIEIEELRKQRDNAQSELEELRKKKSDHQPGWNPFDSPQKARKCLTFSGSLEPSNKIKMMRSSIRQSSTAPFMLKHEIRKLEQLQQQLEVEANRAIEVLHKEVECHKHGNQDAAETIAKLQAEIREMQSVRSENRDVEMITDEGNGSDLKDEISRLHMQDNDIAKLEAKLENVQRSIDRLVMSLPNVAMPCNETTPKSNRSKKKKRLLLPLGVSNNINRANLLRAPCSPHSSSRPSESEVENRAPEGDTMSVEGSEKATPTKSEDGDISSRDETPRYRRSSSVNMKKMQRMFQNAAEENVRSIRAYVTELKERVAKLQYQKQLLVCQVLELESNEGKSNGEDNSGPVQDGPDSWDRLFKEQMQCIIHLWDQCHVSIIHRTQFYLLFRGDRADQIYIEVEVRRLVWLQQHFAEVGDASPGAVDDPAVSLISSMKALRNEREFLARRMGSRLTDEERERLFIKWQVPLDAKQRKLQLVNKLWTDPNDPAHIEESADLVARLVGFCEGGNISKEMFELNFTVPTSKKPWMVGWQPISNMIREKTQQLW

SEQ ID NO: 3191 - DNA, 150 bp, Sorghum bicolor
atgtcttgtttcttttggcagatgcatctttcaagttttgctcactcaaaggttttactgaagacaggcgaagtttttcaactccgcaaaactgggcagaatggcccacttcattacatctttggcaacggattgtccgattgctgctag

SEQ ID NO: 3192 - protein, 49 aa, Sorghum bicolor
MSCFFWQMHLSSFAHSKVLLKTGEVFQLRKTGQNGPLHYIFGNGLSDCC

SEQ ID NO: 3193 - DNA, 1740 bp, Sorghum bicolor
atggcttcgacattcggtgccacttctacagttggccttatggctgctccagcagggaagaatgtgcgccttcagaggagggctaacttcagagtaaaagcagccaaggagctgtacttcaacaaggatggctcagctatcaagaagctccagactggagtcaataagcttgcagacctagttggagttacacttggaccaaagggaaggaatgtcgttttggagagcaagtatggctctcctaagattgttaacgatggtgttacagttgcaagagaggttgagctggaggaccctgtggaaaacattggagctaaattggtcaggcaagctgcagctaagaccaatgatctagctggagatgggacaaccacctccgtggtccttgctcagggactgattgctgagggtgttaaggttgtggcagctggtgctaatcctgttcagattactcgtggtattgagaaaacagcgaaagcactagttgaagaactacgtaagttgtccaaggatgttgaagatagcgagcttgcagatgttgctgcagttagtgctggcaacaactatgaaatcggtaacatgatagcagaggccatgagcaaggttggtcggaagggtgtggttacccttgaagagggaaggagttctgagaactttctctatgttgtggagggaatgcagtttgaccgtggttatatctctccctactttgtaacagacagtgagaaaatgtctgccgagtacgagaactgcaagcttcttttggttgacaagaagatcaccaatgcaagggatcttatcaacgttttggaagaagccatcagaggtgcatacccaatcctgataattgctgaggatattgagcaggaggctcttgctactcttgttgtcaacaagcttagaggatcattgaagattgctgccatcaaagcccctggttttggagagcgcaagactcagtacttggatgatattgccatccttactggagcaactgtaatcagagatgaagttgggctgtcacttgacaaggctgacaaatcagtccttggaacagctgcaaaggttgttcttaccaaagagtcaacaacaattgttggtgacggcagcacccaggaagaagttactaaaagggttgcgcagattaaaaatctgattgaggcagcagaacaagaatatgaaaaggaaaagctcaatgagaggatagctaagcttgctggtggtgttgctgtcattcaggtgggagcacaaacagaaactgaactaaaagagaagaagttgagagttgaggatgccctaaatgcaactaaggctgctgttgaggaaggtattgttgttggtggagggtgcactcttttgcggcttgcagctaaagtcgatgccatcaaagatacactggagaatgatgagcagaaggttggagctgaaatagtaagaagggccctgagctacccacttaaattgattgctaaaaacgctggtgtcaatggcagcgttgtcactgagaaggtcctttctaacgataacttcaagtatggttacaatgctgctactggacagcacgaggacttgatggctgctggtatcattgaccccaccaaggtggtgagatgctgcttggagcatgccgcatcggtggccaagaccttcctgacatcagatgttgtggtcgtcgatatcaaggagccggaggccgcgcccctcgctaacccgatggacaactctggctatggatactga

SEQ ID NO: 3194 - protein, 579 aa, Sorghum bicolor
MASTFGATSTVGLMAAPAGKNVRLQRRANFRVKAAKELYFNKDGSAIKKLQTGVNKLADLVGVTLGPKGRNVVLESKYGSPKIVNDGVTVAREVELEDPVENIGAKLVRQAAAKTNDLAGDGTTTSVVLAQGLIAEGVKVVAAGANPVQITRGIEKTAKALVEELRKLSKDVEDSELADVAAVSAGNNYEIGNMIAEAMSKVGRKGVVTLEEGRSSENFLYVVEGMQFDRGYISPYFVTDSEKMSAEYENCKLLLVDKKITNARDLINVLEEAIRGAYPILIIAEDIEQEALATLVVNKLRGSLKIAAIKAPGFGERKTQYLDDIAILTGATVIRDEVGLSLDKADKSVLGTAAKVVLTKESTTIVGDGSTQEEVTKRVAQIKNLIEAAEQEYEKEKLNERIAKLAGGVAVIQVGAQTETELKEKKLRVEDALNATKAAVEEGIVVGGGCTLLRLAAKVDAIKDTLENDEQKVGAEIVRRALSYPLKLIAKNAGVNGSVVTEKVLSNDNFKYGYNAATGQHEDLMAAGIIDPTKVVRCCLEHAASVAKTFLTSDVVVVDIKEPEAAPLANPMDNSGYGY

SEQ ID NO: 3195 - DNA, 348 bp, Sorghum bicolor
atggaggaggcgaggtacgtgaaggtggcgtcccggttcttcctcgccggcggcaaggggaacgccggcggcgatgggtgcggtgaccgccgccacttcctcgacgcatgcttcctgtgcaagcgggacatcacctcggaccgccacatcttcatgtacaagggcgacgcggcgttctgcagcgacgactgcaggcaggagcagaggggcatggacgccgcgctcaaggccgccaggcgccgccaccgcctgctgcgccgcaccgcctctttgccggcgtcgtcgtcggccgccgcgtgcaccgccaacaaggccgccactactggcgggaactggaatatcgctgtg

SEQ ID NO: 3196 - protein, 116 aa, Sorghum bicolor
MEEARYVKVASRFFLAGGKGNAGGDGCGDRRHFLDACFLCKRDITSDRHIFMYKGDAAFCSDDCRQEQRGMDAALKAARRRHRLLRRTASLPASSSAAACTANKAATTGGNWNIAV

SEQ ID NO: 3197 - DNA, 2346 bp, Sorghum bicolor
atgaacggaactcatccctggacctccatgtccgggggtgcatgttctaaccttggatatgccagggacatgaatggtaatgttccaattagcaccacaaattcctctgggccaagtattggagttagctcgttggtgactgacgccaactcgtcactttccggtggtgctcagttacagccaagtactagcatgaatggtgattcattgatgcgtgttcctgcatcaccaatgtcattttcatccaataacatctctggctcttcagtcattgacggttccatcatgcagcaaagtccaccccaagagcaggtgcagaaacggaggtcttcaagtgtaacatcacaacctgtgatcgatgctggaggtgcattgcatgctcagaagaaatcaaggattgatgttagtccgggtgatatcatgcagcaacagctgattcagcagctgatccatggtcagaattctcttcatttccaggggcaacagaacccacagcttcaagctttgattcagcagcataaactggcacaacttcagcaacggcagcagcagcatttgttgcaaccattttctcagatgcaacaaccccaagttggtattcctcggctgcctcaacttaggccaccactggcacaggctggaatgcagttaagtggtcctgttaggactcctatcgagagtgggatttgttctcgcaggatactgcagtatttatttcacaagcgtcatcgtccagagaataaccctataacatactggaggaagcttgttgaagagtactttgcacctcgagcaagagaaagatggtgtgtctcttcttatgacaacagagggaattcttcagctgctgcaccacagaaatctctggatacatggcgatgtgacatttgcaatacacatggtgggaaaggatatgaagctacctatgaagtacttcctagactctgccaaattagatttgaccatggtgttattgatgaatacttgtactttgactcacccaacgaattccggttgccaaatggacaaatggtgctggagcatgcaaaagttgttcaaaaaagtgtttatgaacatctacatgttatacatgagggacatctgagaatcattttcacaccagaactgaagataatgtcctgggagttctgttcacggcgccatgaggagtacatcactcgcaagactatagcaccacaggttaataatctgctgcaagttgcccagaaataccaagctgttgccagtgaaagtggatcagcggggatatcaaacaatgatgcacaaaccatctgcaacatgtttgtcactgcatcacggcaactggcaaaaaatctagagcatcacaccttaaatgaacatgggctttctaaaagatatgtacgctgcctgcagatatcggaggtggtgaatcacatgaaggacttgattgagttcagccacaagaacaatcttggtcctaaagagagcctgaacagttattcgaaaaccatggcgaagtttcagaatatgcctgattcaagacagctcatggctgctgctaaccttgccaataaccagagcaacaccaaactaatgggggtcaaacaagagccaagtacttctgtgaacaatcagactcctggtgttggaaccattggcaataacactctacagaatgccacacctctaaacagctaccagaatatgctcagaagctccagtgcaaatccgattttgctgcagcaggaggcatcaagtgtcttcaaaggtcctgcggcaatgcacaatggcatacagctggaagcggccagatccttccgtggacctaaccaagtgcagttccaacaccccacgtcatttcagcagcctatgccgcagcaaaacaatttccagggttttggtgttagcccacaataccagcaacatgtgcttaatcagcttctgcaggaagttaagaataataacaaccgcacaaaagcacagcaaccacctccagatgctcctaatgcgagcggtagtctcgcatcaggagttgctatccccaacgttgctgctactggggagcagggacaacatatcaataatagcaacagtaaccataacagcgcggtgaagggtgctgctccagctggcactggccctagcaatgtgatcaacaatagcacagccagcattgcccctggcagaaacaacagcttcaagtcggtgagcagcagtccagctgctgctgctgctaccactaccgctggcaatgccgtgaactcaaaggtcgatgactccttccttcaactggaggacctcgatgacacaatcactaacgcactggtggaaagcgggctgttcggtgcaggacaagggtggtag

SEQ ID NO: 3198 - protein, 781 aa, Sorghum bicolor
MNGTHPWTSMSGGACSNLGYARDMNGNVPISTTNSSGPSIGVSSLVTDANSSLSGGAQLQPSTSMNGDSLMRVPASPMSFSSNNISGSSVIDGSIMQQSPPQEQVQKRRSSSVTSQPVIDAGGALHAQKKSRIDVSPGDIMQQQLIQQLIHGQNSLHFQGQQNPQLQALIQQHKLAQLQQRQQQHLLQPFSQMQQPQVGIPRLPQLRPPLAQAGMQLSGPVRTPIESGICSRRILQYLFHKRHRPENNPITYWRKLVEEYFAPRARERWCVSSYDNRGNSSAAAPQKSLDTWRCDICNTHGGKGYEATYEVLPRLCQIRFDHGVIDEYLYFDSPNEFRLPNGQMVLEHAKVVQKSVYEHLHVIHEGHLRIIFTPELKIMSWEFCSRRHEEYITRKTIAPQVNNLLQVAQKYQAVASESGSAGISNNDAQTICNMFVTASRQLAKNLEHHTLNEHGLSKRYVRCLQISEVVNHMKDLIEFSHKNNLGPKESLNSYSKTMAKFQNMPDSRQLMAAANLANNQSNTKLMGVKQEPSTSVNNQTPGVGTIGNNTLQNATPLNSYQNMLRSSSANPILLQQEASSVFKGPAAMHNGIQLEAARSFRGPNQVQFQHPTSFQQPMPQQNNFQGFGVSPQYQQHVLNQLLQEVKNNNNRTKAQQPPPDAPNASGSLASGVAIPNVAATGEQGQHINNSNSNHNSAVKGAAPAGTGPSNVINNSTASIAPGRNNSFKSVSSSPAAAAATTTAGNAVNSKVDDSFLQLEDLDDTITNALVESGLFGAGQGW

SEQ ID NO: 3199 - DNA, 1437 bp, Sorghum bicolor
atggcagccgccgctgccgacgacgacgccaagctcgaatccttcctccaatggttccaggccaacggcgccgacctccgcggctgcacgatccgcgcatgcggcggcaagggcttgggcgtcttctccaccgccgccccggagccaggcgccaacgacggggtggcgatggtggtgccgctcgatctcgccatcacgccgatgcgggtgctgcaggacccactcattggcccgcggtgccacgcgctcttcgaggagggacgcgtcgacgaccgcctcctcgtcatgctcttcctcatggccgagcgccgacgccctggctcactctggaagccatatttggatatgcttccgagcaccttcgggagctccctttggtttactgaggaagagcttgccgaactggaagggacgacgctgcatcgggctacggtgatccagaggaagtcattgcaatcctcatttgatgagaaggttaaaggactcgttgaggagcttttacatgtcgatgaatcagaaagctcaattgaagtgctgtttgaggacttcctttgggcaaactcaatcttctggactcgagcactgaacataccactgcctcattcttatgtttttccggggtcctgtggcgatgaacaaatcagaaccggcaatgatgcttgctattctagcccccctgcccaacaggaaattgatgttacggctaaggatcatagtgctgacgacaattctaaatcaagtaacacagagtcaatttgggttgagggccttgtcccaggaattgatttctgcaatcataatgtaaaggcactggcaacatgggaagttgattctgtgggaaatgctactggaattcctgcttcaatgtacctcttgcttgctgataaaagttctgctgaggctggagcagagatctgcataaactatggcaacaaaggaaatgaggaactattgtacctatatggatttgtggttgacaacaatcctgatgattatctcatggttcattatcctttggaagctcttagacagatccagtctgctgatacaaaaatgcagctactagagatgcagaagggcgaattgagatgcctcctacccagaagattgcttgataatggattttttggtatccattccagtgaagataaggatagcaagaaaaatactagtccattttcaagttttagttggagtggtcaacgcaaagttccatcatatcttcacaaaaatgttttccctcaggaatttatgagtaccctacggacgattgccatgcaagaacatgagcttgaacaagttgcttctttacttggagaggttggatctagtgaagatagagaaacatctgatgcagagatccaaagtgctatttgggaggtctgtggtgatcagggtgcactgggtttgcttgtggatcttcttggggtcaagtaa

SEQ ID NO: 3200 - protein, 478 aa, Sorghum bicolor
MAAAAADDDAKLESFLQWFQANGADLRGCTIRACGGKGLGVFSTAAPEPGANDGVAMVVPLDLAITPMRVLQDPLIGPRCHALFEEGRVDDRLLVMLFLMAERRRPGSLWKPYLDMLPSTFGSSLWFTEEELAELEGTTLHRATVIQRKSLQSSFDEKVKGLVEELLHVDESESSIEVLFEDFLWANSIFWTRALNIPLPHSYVFPGSCGDEQIRTGNDACYSSPPAQQEIDVTAKDHSADDNSKSSNTESIWVEGLVPGIDFCNHNVKALATWEVDSVGNATGIPASMYLLLADKSSAEAGAEICINYGNKGNEELLYLYGFVVDNNPDDYLMVHYPLEALRQIQSADTKMQLLEMQKGELRCLLPRRLLDNGFFGIHSSEDKDSKKNTSPFSSFSWSGQRKVPSYLHKNVFPQEFMSTLRTIAMQEHELEQVASLLGEVGSSEDRETSDAEIQSAIWEVCGDQGALGLLVDLLGVK

SEQ ID NO: 3201 - DNA, 1590 bp, Sorghum bicolor
atggcttctcattcccagctctcctccaacgccgcaaccgctggcctgtgcttgctttcagctctcgccatggccttgctggcggtgaccatctacatcataggtgttcttgtgtccttcgccgtcttctgcatcaaagagtttgcttggagtcggagagctcatgatcgaccaccgctcgtcgggactatgttccggatgctcaagaatttcgacaggctcttcgatgagcaggtggagtacgcgcttgcccatcgaaccagcaggctgctctttcctaatcctgggcacagtgagctctggacctctgatccacaagtaattgagcatatcctcaagaccagcttcagtaaatacagtaagggcgacttcaacactcaaatcatgaacgatctctttggaaatggaattttcgcaaccgatggggagaagtggcggcaccagaggaagttagcgagccatgagctctcaaccagagtgcttcgtgacttcagcagtggtgtgttcagaacaaatgcggcaaaactaacagaggtggtctcatctgcagcaaccaatagaacttccatagacatgcaggatcttttgatgaaaacaactatggattcaatcttcaaagtgggattcggttttgagctgaacacactatctggttcagatgaacctagcatccaattcagcaaggccttcgacgatgcaaactttcttgttttccatcgatatgttgatatattctggaaactgaaaaggtttcttagtattgggtcagaagctaagctaaagaggaacattgagatcattgacaactttgtaattcagttgatccatcaaaagagagagcaaatgaagaatggacgtgatcataaggcaagagaggatatactaacaagattcatattagcaagtgaagaggaccctgaaatgatgaatgaccgttacctgcgtgacatagtcctcaacttcctaatcgccgggaaagacaccacagcaaataccctgacctggttcttctacatgctatgcaagaatcccgtggtgcaggataaagttgcccttgaaattaatgagtcacttgagtgggccaaggaagataacagcactgaaaacttcactgcaagattgaatgaaagtactattgaaaacatgcattatctccatggtgcgatcaccgagacactacgtctgtatcctgccgttgcagtggatggtaagatggcagatgaagatgataccctgcctaatggctatagagtggttaaaggagatggagtgaactacatgatttatgccatgggaaggatgacatacctctggggcaaggatgctgaagaattcaaacctgaaaggtggcttgtgaatggagttttccagcaagagagcccttacaagtttgcagcttttaatgcggggccccgcatctgcttggggaaggaatttgcatacaggcagatgaagatcatggctgctaccctgttacatttcttcaggttcaaactagaagatgaatccaaggaaccgacatacaaagtcatgtttaccctccacatcgacgaaagtcttcacttgtatgcatacccatgttcagcatag

SEQ ID NO: 3202 - protein, 529 aa, Sorghum bicolor
MASHSQLSSNAATAGLCLLSALAMALLAVTIYIIGVLVSFAVFCIKEFAWSRRAHDRPPLVGTMFRMLKNFDRLFDEQVEYALAHRTSRLLFPNPGHSELWTSDPQVIEHILKTSFSKYSKGDFNTQIMNDLFGNGIFATDGEKWRHQRKLASHELSTRVLRDFSSGVFRTNAAKLTEVVSSAATNRTSIDMQDLLMKTTMDSIFKVGFGFELNTLSGSDEPSIQFSKAFDDANFLVFHRYVDIFWKLKRFLSIGSEAKLKRNIEIIDNFVIQLIHQKREQMKNGRDHKAREDILTRFILASEEDPEMMNDRYLRDIVLNFLIAGKDTTANTLTWFFYMLCKNPVVQDKVALEINESLEWAKEDNSTENFTARLNESTIENMHYLHGAITETLRLYPAVAVDGKMADEDDTLPNGYRVVKGDGVNYMIYAMGRMTYLWGKDAEEFKPERWLVNGVFQQESPYKFAAFNAGPRICLGKEFAYRQMKIMAATLLHFFRFKLEDESKEPTYKVMFTLHIDESLHLYAYPCSA

SEQ ID NO: 3203 - DNA, 1902 bp, Sorghum bicolor
atgggctgcgcgcccatgggccacatcctctacgacgaggtcatgcgctacaaccccaagaacccctactggttcaaccgtgaccgcttcgttctctccgccggccacggctgcatgctccagtacgccctgctccacctcgccggatacgacagtgttaaggaggaggatttgaagcagttcaggcaatggggaagcaagacaccgggccaccctgagaactttgagactccaggagttgaagttaccactggaccccttggtcagggtatcgccaatgctgttgggttggcgcttgctgagaagcacctggctgctcgcttcaacaagcctgacagtgagattgtcgaccactacacgtatgttattttgggagatggttgccaaatggagggtattgccaatgaagcttgctccttggctggacactggggtcttggcaagctgattgctttctacgatgacaaccacatttccatcgatggagatacagagattgcattcacagaggacgtgagcacccgctttgaggctcttgggtggcacacgatctgggttaagaatgggaacaacggctatgatgacatccgtgcagccattaaggaggcgaaggcagttactgacaagcccaccttaatcaaggtgactaccacaatcggttttggatcgcccaacaaggccaactcatacagtgtgcatggaagtgcattgggtgccaaagaggttgaagcaaccaggcagaaccttggatggccctatgagccgttctttgttccagaggacgtcaagagccactggagccgccacacacctgaaggtgctgcacttgaggctgattggaatgctaagtttgcagagtacgagaagaagtatgcagacgatgcagcaaccttgaaaagtatcatcacaggagagttccctactggctgggctgatgcgcttcctaaatacactccagagagcccaggagatgccaccaggaacctctcccagcagtgcttgaatgcacttgctaatgttgtgcctggtcttattggaggtagtgctgatcttgcgtcctccaacatgactctgcttaagatgtttggtgacttccagaaggatacggctgaagagcgcaatgtccggtttggagtcagagaacacggaatgggcgccatttgcaatggcattgctctgcacagtccagggtttgttccatactgtgctacattctttgtcttcactgattacatgagaggtgccatgaggatctcagctctgtctgaggctggagttatctatgttatgacccacgactctattggtcttggagaagatggtccgacccatcagcccattgagcacttggtgagtttccgtgcaatgccgaacatattgatgctccgccctgctgatggcaatgagaccgccggagcatacaaagttgcagttctcaacaggaagaggccatctattctcgctctttccaggcaaaagcttcctcacctgcctggtacctcaattgagggagtcgagaagggtggatataccatctctgacaactcaactggcaacaagcctgacctcattgtgttgggtactggctctgaactggagattgcggaaaaggctgccgatgagttgaggaaggaggggaagacagtccgtgtcgtctcatttgtttcttgggaacttttcgatgaacagtcagatgaatacaaggagagtgtcctgcctgcagccgtcaccgcaagaatcagcattgaggccgggtctactctcggctggcagaagtatgtcggagcccagggcaaggccattggcatcgacaaattcggtgcgagtgctcctgccggaacgatctacaaggagtatggcatcactgtggagagcgtcattgcggcggccaagagcttttaa

SEQ ID NO: 3204 - protein, 633 aa, Sorghum bicolor
MGCAPMGHILYDEVMRYNPKNPYWFNRDRFVLSAGHGCMLQYALLHLAGYDSVKEEDLKQFRQWGSKTPGHPENFETPGVEVTTGPLGQGIANAVGLALAEKHLAARFNKPDSEIVDHYTYVILGDGCQMEGIANEACSLAGHWGLGKLIAFYDDNHISIDGDTEIAFTEDVSTRFEALGWHTIWVKNGNNGYDDIRAAIKEAKAVTDKPTLIKVTTTIGFGSPNKANSYSVHGSALGAKEVEATRQNLGWPYEPFFVPEDVKSHWSRHTPEGAALEADWNAKFAEYEKKYADDAATLKSIITGEFPTGWADALPKYTPESPGDATRNLSQQCLNALANVVPGLIGGSADLASSNMTLLKMFGDFQKDTAEERNVRFGVREHGMGAICNGIALHSPGFVPYCATFFVFTDYMRGAMRISALSEAGVIYVMTHDSIGLGEDGPTHQPIEHLVSFRAMPNILMLRPADGNETAGAYKVAVLNRKRPSILALSRQKLPHLPGTSIEGVEKGGYTISDNSTGNKPDLIVLGTGSELEIAEKAADELRKEGKTVRVVSFVSWELFDEQSDEYKESVLPAAVTARISIEAGSTLGWQKYVGAQGKAIGIDKFGASAPAGTIYKEYGITVESVIAAAKSF

SEQ ID NO: 3205 - DNA, 441 bp, Sorghum bicolor
atgaacatccagaggaagcctggagattggaactgcaagaactgccagcacctcaacttcagccgccgtgattactgtcagcgttgccgtgacccacgccctgacttgcagttcagtgacagctatagcacgggtggtgtgctgacctccctggacatccgtccaggtgactggtactgcagctgcggctaccacaactttgccagccgcagcagctgcttcaagtgcggcaccatcgtcagggacttcccagcaggacaaggtgcagccggtgctgaggttgacttcgctcgtggacgcgacagcgccgcagttcgtgctgggtggaaagctggcgactggatctgcacaaggcctggttgcaacgtgcacaactttgctagcaggatggagtgctataggtgcaatggaccaagggaggcagcaggcaccgggaagtaa

SEQ ID NO: 3206 - protein, 146 aa, Sorghum bicolor
MNIQRKPGDWNCKNCQHLNFSRRDYCQRCRDPRPDLQFSDSYSTGGVLTSLDIRPGDWYCSCGYHNFASRSSCFKCGTIVRDFPAGQGAAGAEVDFARGRDSAAVRAGWKAGDWICTRPGCNVHNFASRMECYRCNGPREAAGTGK

SEQ ID NO: 3207 - DNA, 735 bp, Sorghum bicolor
atgccgccgaacaccgtgacctccgcgtccgtcgaccagaaccttgccctcgccaagcaatgctcgcgagaggccgccctcgctgggttcaaggcagcagctatcgggaccgtcgcctctggaattgccaccctggttagcgtcaggatgctgccatgggctaaggccaacatcaaccccgctggccaggccctcatcatctccacagttgctggcatggcgtacttcatcgcggcagacaagaagatcctcgcgctggcgaggcagcactcctacgagaacgcacctgatcacctcaaggacacctccttccagggcaccggccgtccgcacccagggttcttcaggccaagtatcactatccacttggatgacaactggtccttcctctgctgcttcaggagcctcaggtggattgagggcatcctgcagctggtgcacttcctcatggaggatgttggtataggcctcaagattgaccacataccccgccatatgacactgacgggcgggtcccgcccgtcagcttcgccttctacctcgcgccaccgctccggcgacctccaccgcaacaccggtgagctcccggcttccgcagcgaggcgcgctagcttccccagatccttgcgcacccgtagacctcctttacacccgctctcccctaccctagctgccacggccatggacgcggcggacggccaccccggccgagccaatgccggccactacgcttga

SEQ ID NO: 3208 - protein, 244 aa, Sorghum bicolor
MPPNTVTSASVDQNLALAKQCSREAALAGFKAAAIGTVASGIATLVSVRMLPWAKANINPAGQALIISTVAGMAYFIAADKKILALARQHSYENAPDHLKDTSFQGTGRPHPGFFRPSITIHLDDNWSFLCCFRSLRWIEGILQLVHFLMEDVGIGLKIDHIPRHMTLTGGSRPSASPSTSRHRSGDLHRNTGELPASAARRASFPRSLRTRRPPLHPLSPTLAATAMDAADGHPGRANAGHYA

SEQ ID NO: 3209 - DNA, 492 bp, Sorghum bicolor
atgagcaacctaccgtcgcacctgaccagcctgcaagtgccccgccggggggccgtcgtcgtcgtcgccggagacgtggacgcggtggacccctacgacgtcccgcagccgcagacggccacctgctgcacggcgctgcagcgtggcgtggcttccgacgggctcgcgcagccgcggtacgcgccgctgcggacgctagcaaccgtcgacgacgacgacgaagaagaggatgatggcgatgaccatgattccaataacggcaaggacgacaagcaggacgacgacgacagcgccgccgcgatgacgacgaccacgatgaggagcgacagcaatagcagcagcaggaggagtaataacaagaagatggtgcgcaagtgcaagtcgacggtggatgagttgaaggtgtcgcagctcatccagggcccccggctccggcgcagcgtcggcatgcgccgggattggagcttcgagaacctcggcaacgccgcctag

SEQ ID NO: 3210 - protein, 163 aa, Sorghum bicolor
MSNLPSHLTSLQVPRRGAVVVVAGDVDAVDPYDVPQPQTATCCTALQRGVASDGLAQPRYAPLRTLATVDDDDEEEDDGDDHDSNNGKDDKQDDDDSAAAMTTTTMRSDSNSSSRRSNNKKMVRKCKSTVDELKVSQLIQGPRLRRSVGMRRDWSFENLGNAA

SEQ ID NO: 3211 - DNA, 801 bp, Sorghum bicolor
atgccaccaccgccggcgccgcgcttcctctcgctcgcctcgccgcctgcgctcctgcccgtacaccaccaccacaaccaccccaggagcctactacccccgctcgttgcctccaccaggaaggccgccgcgcttcccgcgtgtcccgtcgcgtccccgcgccactccgactacttcgaccctcgggccccgccgccgccgcgcggggacggcggcgggtacgggcgggcccccaacggcgcgcaggacgggagggtcttcaccagctacagcatctacaagggcaaggccgcgctctcgttcgaccccaggccgccgcagttcgtgccgctcgattctggggcatacaaggtggccaaggagggattcgtgctgctgcagttcgcgcccgccgtggccactcgacagtacgactggacgcgcaagcaggtgttctcattatctgtgtgggagataggaaccctgcttactcttggtccaacagattcttgcgagttctttcatgaccctttcaaggggcggagtgaagaaggtaaagtgcgtaaggttctaaaggttgagccaacaccagatggcaatggtcgctttttcaacctcagtgtccagaaccgacttatcaatgttgatgagagcatttacatccctataaccaagggagagtttgctgtcattgtatcaactttcaattacatcataccacacctcatgggctggagcacatttgcaagttcaatcaaacccgaggagtcgcgcttatacagcaggcctcagtccacatcagagtacgaatggcgaaggtga

SEQ ID NO: 3212 - protein, 266 aa, Sorghum bicolor
MPPPPAPRFLSLASPPALLPVHHHHNHPRSLLPPLVASTRKAAALPACPVASPRHSDYFDPRAPPPPRGDGGGYGRAPNGAQDGRVFTSYSIYKGKAALSFDPRPPQFVPLDSGAYKVAKEGFVLLQFAPAVATRQYDWTRKQVFSLSVWEIGTLLTLGPTDSCEFFHDPFKGRSEEGKVRKVLKVEPTPDGNGRFFNLSVQNRLINVDESIYIPITKGEFAVIVSTFNYIIPHLMGWSTFASSIKPEESRLYSRPQSTSEYEWRR

SEQ ID NO: 3213 - DNA, 402 bp, Sorghum bicolor
atggcggacaacaacgacgacgacgacaaccggaggaaccgcgggcagacgacgacgacactgatcgccggcgcggggctcggcttgctcaccgtcaactcgggcctcgccatctaccgcgccaggggcgacgacgtggccgccgtcctcttcgtcgcggggtcgtacctcaccttgctccttctgttcgtctgcctccgcgcctacgagctggcggcgcccgggtcgccggccagggagcgggcgaggcgagccgtgtggccgctcaccacgctgctcaccgtggccttcgcgtggaaggtggcggcggtcatgccttcgcctgctgcggccgccgtcgtctgggcgctcgccgtcgccaccaccgtcggcggtttcgttgctctgtacgtgcagcgctga

SEQ ID NO: 3214 - protein, 133 aa, Sorghum bicolor
MADNNDDDDNRRNRGQTTTTLIAGAGLGLLTVNSGLAIYRARGDDVAAVLFVAGSYLTLLLLFVCLRAYELAAPGSPARERARRAVWPLTTLLTVAFAWKVAAVMPSPAAAAVVWALAVATTVGGFVALYVQR

SEQ ID NO: 3215 - DNA, 990 bp, Sorghum bicolor
atgatagaagaagccgtggcaagcctgctcaaggacgatggtgccactgccaacgcatactgcagtggcatggcgatcgctgacctgggctgttcctctggtccaaacacgctcgtgcttgtgtccatggccattgacgccgtccgccgccactgctcggagctccagcaggagccaccagagctctgcatacacctcaacgacctcccaagcaatgacttcaactcggtcatcaggagcctggccacgtacataaaaacccaagaaagctccagtcctcctgtcttggccagcatcgttcctggctcatttcacgggcggctcttcaacaagcgtagcctccatctagtctgctccaccgctagcttccactggctctcaaaggcacctgaagacctggtgaggaacggaatcccgttttacgacagggacgaggtggtgaggcgtgctcgacgttccatagtcatcaaggcctatgctcggcagtttaacgatgacttcacacggatcttgcatctgcgagctcaagagatggttcccggaggtcggatggttttctcccttcttggacaccgttctgatgataagccggagagtgccattctgcttttggaattcacaaatgccatcctacacgaaatggcgtcaaagggtttgatcgataatgagaaacttgactctttctacataccaatatacgggccgtcagagaaggaggtgcgagagataatagaagctgagggttcattttcaatcgacaagatggctgtccatgaatctcttgatggcattgacgcgccgaagacagcggcgcgcgctctgagagctgtaatggaggcgatcatagcgcagcatttcgggccatctgcagatgctatggacgagttcttaaagatcacggagaagttcatcgagatggcgcctctagatgcgttctctccaaacaaatccagcgctttcgttgctgcgtccctcaccaggaggacatga

SEQ ID NO: 3216 - protein, 329 aa, Sorghum bicolor
MIEEAVASLLKDDGATANAYCSGMAIADLGCSSGPNTLVLVSMAIDAVRRHCSELQQEPPELCIHLNDLPSNDFNSVIRSLATYIKTQESSSPPVLASIVPGSFHGRLFNKRSLHLVCSTASFHWLSKAPEDLVRNGIPFYDRDEVVRRARRSIVIKAYARQFNDDFTRILHLRAQEMVPGGRMVFSLLGHRSDDKPESAILLLEFTNAILHEMASKGLIDNEKLDSFYIPIYGPSEKEVREIIEAEGSFSIDKMAVHESLDGIDAPKTAARALRAVMEAIIAQHFGPSADAMDEFLKITEKFIEMAPLDAFSPNKSSAFVAASLTRRT

SEQ ID NO: 3217 - DNA, 1974 bp, Sorghum bicolor
atgccgcccccgccgccgctccacctccgcctccgtctctccctcgtcccgccccaccctatctctccttctctccgccatgcctcccgctcaccctccatcgcgtcctgccctctcgcggtgcgccccttcgcccaacgccgcggtgggcgcccgctctgcgccgtgcggggcggggccgaggccgaggcggagggcttcgcgtggccggatgggtccgaggaggaggagctgcggcggctcctggagctgctccctagggaactgaggcggcgggtggagacccacccggagctccctgcgctcgtggaggtggtcatggacctcggccggcccccgctcgcgcgcttcccgtcaggagacttcctcctctcccaccgccccatctcctttgacgacctccgacatgccacctcccaggttggggactttggagcggataatcgtgctggaatcagccggacgctgcaccggatcagcgcgattaggaaccggaagggcgtcattgtaggcctcacttgccgtgtcgggcgtgcagtgcccgggagcgctaatttgcttcaggacttggttaaggatggtggctcgttgctgctcatcggcccacctggggtggggaagactactgtcataagagaaattgcccgtatgttagctgatgactataagaagcgggtgatgattgtcgacacatctaatgagattggtggggatggtgatattcctcacccaggaataggcaatgcacgtaggttgcaagtgcctaaccaagacatgcagcataaggtactgatagaagctgtggaaaaccatatgcctcaggcaattgttattgatgaaattggaacgaaactagaggccatggctgcaagcaccattgcacagaggggcatacagcttgttgcaactgcccatggtgtaacgatagagaatctgatcatgaacccctcactagagatgcttgtgggaggaatacagagtgtcacacttggtgatgaagaagctaaccggagaggagttcaaaaaactgtcctagagcgcaagggcccatcaacatttacatgtgctgcagagatcgtctcgaaaaaagaattacgtgtccatcgtagtctggaagccacagtagatgctctactcgcaggcaagctgcctaatgttgaaattcggaagttgggttcaaagggattgatgcaggaagtttctgtgcaaaaggaacgatcacatcttggtatctctgatgcaactgaatttgaccgtgactctctaaggaatgccagaagaagcttggactctgcatttaatcttgactctgctgaagggcatatagagaggacagacggagatggttcaagcttgaatctatatgcatatgggatctccgagtcgactgccttgcaagccattcaacagctggagttggaggacattgttactttaacttataatatcagtgaagctgatgcagtgatcgcgttacattcaaagctcaagaagaattctcagattcaggctttggtgaaatctcaagatataccggttttcttcgtgaagacaaactccctgtctcaaatcactcgggcacttcgtgctcttgttgacgatcacatggacgagctgatagactacgatgataaggaagaagcaagatctcccgaggaaactgatgctctggaggaggcaaggctggcaatcgagcaagtagtgatcccgaaaggcgagagcgtgcagctactgccgaggccatcaagcatcatctcatcccaagtggatctcgtcgaaagcttcagcctccagtgggaggtcataggccaggagcctcacgcgtacgtgacgatccttccgcacttcgcgccaaaagaagctgaagctatccagaaagaaaccccagcggcggggctcgccgattcagagagctccgatgacttggatcatgcccagaatggcatcaccaggctacctttcctacccgattag

SEQ ID NO: 3218 - protein, 657 aa, Sorghum bicolor
MPPPPPLHLRLRLSLVPPHPISPSLRHASRSPSIASCPLAVRPFAQRRGGRPLCAVRGGAEAEAEGFAWPDGSEEEELRRLLELLPRELRRRVETHPELPALVEVVMDLGRPPLARFPSGDFLLSHRPISFDDLRHATSQVGDFGADNRAGISRTLHRISAIRNRKGVIVGLTCRVGRAVPGSANLLQDLVKDGGSLLLIGPPGVGKTTVIREIARMLADDYKKRVMIVDTSNEIGGDGDIPHPGIGNARRLQVPNQDMQHKVLIEAVENHMPQAIVIDEIGTKLEAMAASTIAQRGIQLVATAHGVTIENLIMNPSLEMLVGGIQSVTLGDEEANRRGVQKTVLERKGPSTFTCAAEIVSKKELRVHRSLEATVDALLAGKLPNVEIRKLGSKGLMQEVSVQKERSHLGISDATEFDRDSLRNARRSLDSAFNLDSAEGHIERTDGDGSSLNLYAYGISESTALQAIQQLELEDIVTLTYNISEADAVIALHSKLKKNSQIQALVKSQDIPVFFVKTNSLSQITRALRALVDDHMDELIDYDDKEEARSPEETDALEEARLAIEQVVIPKGESVQLLPRPSSIISSQVDLVESFSLQWEVIGQEPHAYVTILPHFAPKEAEAIQKETPAAGLADSESSDDLDHAQNGITRLPFLPD

SEQ ID NO: 3219 - DNA, 2802 bp, Sorghum bicolor
atggaagcagcggcggcggcgccgccggcagtggcgtcgtccgcatctgcatcggcttccgcgggccggtcgcgcccatctaccagcgctgcccaggacaccactattacggctgtgcaagctggagaagaaaatgctgcctccccctatgttttatctgttattgactcgttaaaaaagaggattacagcagatcgtttgacttacattaagaataggataggggagaataagattaatctcagcagctatacacagaggacttacaatttatcaaaaaataggcaaattaatacatcaaagggtactgatttggcatcaaatttgctcacaaaaaggcaagatgatgcgctatgcaccctgcatagttatgatattactccggttgacaaagatggtggcaattttcaagatgaaaatcctttctcctcatcaaatgttatttttggtggaaatcttggtcccaagaatgctattagaccaattaaattaccagaagtgccaaagctcccaccttatacaacatggatatttttggacaggaaccagaggatgacagaagaccaatctgtacttggtcgacggaggatttactacgataccagttgtggtgaagctctaatttgcagtgacagtgaagatgaagccattgaggatgaggaggaaaaaaaggaatttaaacattctgaagatcgcattattcggatgacaattcaagaatgtggcatgtctgatgctgtactgcaaacactagctcgatacatggagcgggctactgatgacataaaggccaggtatgaaatcctgcatggtgagaaaactaaggattcttgcaagaaaggaactgagcataatgccaaagtggaagatttgtaccgtgacaaagatttggatgcagcattggattcctttgacaatctgttttgtcgacgatgtctagtgtttgattgcaagctacacggctgttctcaagatttagtatttcctacagaaaaacagacagcttggagtggtgttgatgatggtgtaccctgtggtattcattgctataaactggcctctgaaccagattctgtagctggagttgatcacatgcttattgatgttgaggagcccgctcgctcatcagacaatgtgatgaaccagccaggcccaaataagaaaaagaacggctccagtggaaggaaggctaaatctcaacaaagtgaaagctcttcaactgcaagggttatctcagaaagcagtgactcagaagtacatccaataagcaataaatctccacaacactcccctagtccctcaaaagttaaaattgggccgaaaggtggaatcagaaagattaccaatagacgaatcgccaagagaattcttatgagtgtgaagaaaggacaaagggaaatggcatcatctgattctaattctgttagtggatcctctttggcaagggacatgaagcttagatctgatacacgaaatggaaataaggaattaattgtatcctcacaacagaattctccaagcacaagaagttccaaaaggaagagtacacctcaaattgggaataactcggtttctgctgaagtttataatgattcaacagaggaagcaaataaccgtcattcagcaactgatggttatgatagttcaaggaaagaagaatttgtcgatgagaatatatgcaagcaggagggttacttgagatcctggaatgcaattgagcagggacttctggtgaaaggattagagatttttggaaggaacagttgtttaattgctcggaaccttcttggtggaatgaagacgtgcagagatgtttttcagtatatgaattatattgaaaacagcagtgcatctggagctcttagtggtgttgattctcttgttaaaggatatattaagggtactgagttgcgcacaaggtcaaggtattttagaaggcgaggtaaagtccgtcgtttgaagtacacctggaaatctgcaggttaccatttcataaggaagaggattactgaaaggaaggatcagccttgtcgacaatataatccatgtggttgtcaatctgcatgtggaaagcagtgtccatgtcttacaaatgggacatgctgtgagaaatactgcgggtgtccaaaaatttgcaagaaccgttttcgaggatgtcactgtgcaaagagccagtgtcgcagccgccaatgtccatgttttgctgctgacagggaatgtgatccggatgtttgcagaaactgctgggttgggtgtggtgatggtacattaggagttccaaaccagagaggagataattatgaatgccggaacatgaaactgcttcttaaacaacagcaaagggtcttacttggaagatcagatgtctctggctggggagcattcctcaagaatagtgttaccaaacatgaatatcttggtgagtacactggggaactaatctcacacaaagaagctgataagcgtggaaagatatatgatcgtgagaactcatcattccttttcaacctgaacaatgagtatgttcttgatgcatacagaatgggtgacaagctgaaatttgccaaccatgcccctgacccgaattgctatgccaaggttatcatggtagctggtgatcatagagtgggcatattcgccaaagaaagaatcctcgctggcgaagagttattctatgattaccgctatgagcccgacagagctcctgcttgggcccggaagcctgaggcttcgggagcaaaggatgatgggcaaccgtccaatgggcgtgcaaagaagctcgcccaaaacacaagaggctga

SEQ ID NO: 3220 - protein, 933 aa, Sorghum bicolor
MEAAAAAPPAVASSASASASAGRSRPSTSAAQDTTITAVQAGEENAASPYVLSVIDSLKKRITADRLTYIKNRIGENKINLSSYTQRTYNLSKNRQINTSKGTDLASNLLTKRQDDALCTLHSYDITPVDKDGGNFQDENPFSSSNVIFGGNLGPKNAIRPIKLPEVPKLPPYTTWIFLDRNQRMTEDQSVLGRRRIYYDTSCGEALICSDSEDEAIEDEEEKKEFKHSEDRIIRMTIQECGMSDAVLQTLARYMERATDDIKARYEILHGEKTKDSCKKGTEHNAKVEDLYRDKDLDAALDSFDNLFCRRCLVFDCKLHGCSQDLVFPTEKQTAWSGVDDGVPCGIHCYKLASEPDSVAGVDHMLIDVEEPARSSDNVMNQPGPNKKKNGSSGRKAKSQQSESSSTARVISESSDSEVHPISNKSPQHSPSPSKVKIGPKGGIRKITNRRIAKRILMSVKKGQREMASSDSNSVSGSSLARDMKLRSDTRNGNKELIVSSQQNSPSTRSSKRKSTPQIGNNSVSAEVYNDSTEEANNRHSATDGYDSSRKEEFVDENICKQEGYLRSWNAIEQGLLVKGLEIFGRNSCLIARNLLGGMKTCRDVFQYMNYIENSSASGALSGVDSLVKGYIKGTELRTRSRYFRRRGKVRRLKYTWKSAGYHFIRKRITERKDQPCRQYNPCGCQSACGKQCPCLTNGTCCEKYCGCPKICKNRFRGCHCAKSQCRSRQCPCFAADRECDPDVCRNCWVGCGDGTLGVPNQRGDNYECRNMKLLLKQQQRVLLGRSDVSGWGAFLKNSVTKHEYLGEYTGELISHKEADKRGKIYDRENSSFLFNLNNEYVLDAYRMGDKLKFANHAPDPNCYAKVIMVAGDHRVGIFAKERILAGEELFYDYRYEPDRAPAWARKPEASGAKDDGQPSNGRAKKLAQNTRG

SEQ ID NO: 3221 - DNA, 1476 bp, Sorghum bicolor
atggcgcaccggctgctgcgggacgcgcaggcggacgggtgggagcggtcggacttccccatcatctgcgagtcatgcctaggcgacaacccctacgtccggatgttaagagctgaatatgacaaagagtgcaaaatttgtgcacgcccctttactgtcttccggtggcggcctggtcgagatgcaaggtacaagaagactgagatctgccagacatgttgcaagctaaagaatgtctgccaggtctgcctgctggatcttgaatatggactgcctgttcaggtccgggatacagcactcgctatcaattctaatgatgcgattccaaggagtgatgtcaatcgtgaatattttgcagaagagcacgataggagggccagagctggcatagactatgattcttcctatgggaaggctcgtccaaatgataccattctgaagcttcagaggacagcaccatattacaagaggaacagagctcatgtttgtagtttctttgtgcgtggtgaatgtacaagaggagctgagtgcccttatcgtcatgagatgcctgaaactggggagttatctcagcagaacattaaagatcgctactatggagttaatgacccagttgcactgaaacttttgagcaaggcaggtgagatgccatccctgacaccgccagatgatgagactataaggaccctctacattggtggactcgatagcagaataactgaacaggatttgagggatcaattttatgcccatggtgagattgagtccataaggatggtacttcaacgtgcaatcgcgtttgtgacatatactacaagagaaggcgcagagaaggctgcagaggagcttgctaacaagctagtcatcaagggtgtgcgcctgaagctgatgtggggcaagcctcaggctccaaagcctgaggaggatgagtctgggaggcaggggcaggtttcccatggaggactgctccctagggctgtcatatctcagcagcagagcagtgaccaacctcaaccccctgggatggaggaccaacagcaacaggctgcaccagcatcgtactacttcaacattccagcaccagcagcaacggagcggactctgtacccatccatggatccacagaggatgggtgctatagtaaaatcacaggacagtgaaggcaaacctgggctgcagcaagccgggcaaggtcagccatcaagcagctcagcacagggtggctatcctgcaccaccgccatactaccatggtcagtatccaccatactatccacctcccccaccgtatggtggctacatgcctccaccgcgcatgccctacccaccacaatatccaccttaccagcctatgttagcaccaccagcacaggcacaggctagttcatctcagcaaccacctcaagcaggtgcaggacagcagccgcctcatggccctccagctcagcagcagccacaaccgcaaattcacaactga

SEQ ID NO: 3222 - protein, 491 aa, Sorghum bicolor
MAHRLLRDAQADGWERSDFPIICESCLGDNPYVRMLRAEYDKECKICARPFTVFRWRPGRDARYKKTEICQTCCKLKNVCQVCLLDLEYGLPVQVRDTALAINSNDAIPRSDVNREYFAEEHDRRARAGIDYDSSYGKARPNDTILKLQRTAPYYKRNRAHVCSFFVRGECTRGAECPYRHEMPETGELSQQNIKDRYYGVNDPVALKLLSKAGEMPSLTPPDDETIRTLYIGGLDSRITEQDLRDQFYAHGEIESIRMVLQRAIAFVTYTTREGAEKAAEELANKLVIKGVRLKLMWGKPQAPKPEEDESGRQGQVSHGGLLPRAVISQQQSSDQPQPPGMEDQQQQAAPASYYFNIPAPAATERTLYPSMDPQRMGAIVKSQDSEGKPGLQQAGQGQPSSSSAQGGYPAPPPYYHGQYPPYYPPPPPYGGYMPPPRMPYPPQYPPYQPMLAPPAQAQASSSQQPPQAGAGQQPPHGPPAQQQPQPQIHN

SEQ ID NO: 3223 - DNA, 561 bp, Sorghum bicolor
atgaagagagcggagtggaaaaaaccggtagactactggtttgatccaaagagtcaggaaaaatctgctaagaataaagtgaaccgtggccaagtgcgccttcaccaaaggactggatctaggagctacattgcccatcgatacagcctggaacaaatggtggcagagaaggagagggatccagatgaaggagaagaacaaaggtccccctcaaagattgttgctgagagtctaagccacatcagctgttcctcaaccttccttccaaatcttggtgtcaacaaaacggtgaagactgctaggtccacgacagcagcagtagaagcacgcctacaggctgaatttgaggcaaggctgcaagctgaaagagacgaagctgaaagagacgaagctgctaggaagcaggaagagttgcaagaacagcttcgagcacaacagcagtctcttttagagaatcaaaacttgttgcgccagacacaagaagagatgaaggggatgcatagtaagtttgaagagaataatgcactgctgcgagctgtgctaaaacttcagaaggattga

SEQ ID NO: 3224 - protein, 186 aa, Sorghum bicolor
MKRAEWKKPVDYWFDPKSQEKSAKNKVNRGQVRLHQRTGSRSYIAHRYSLEQMVAEKERDPDEGEEQRSPSKIVAESLSHISCSSTFLPNLGVNKTVKTARSTTAAVEARLQAEFEARLQAERDEAERDEAARKQEELQEQLRAQQQSLLENQNLLRQTQEEMKGMHSKFEENNALLRAVLKLQKD

SEQ ID NO: 3225 - DNA, 2361 bp, Sorghum bicolor
atggtgtacacagctgaggacctgatcaagaatgcccaggtggtagccatcatcgcagcgcctcaagtgtctgccgaagcagatttgcttgcccaactgggcagccgcaactgcattccagtcctctccttttcttgtgtttctccaaccttgcatctgcacacggtaccttactttgtgcaaacatcacccaaggagtcctctcaggttgctcccattgtcgacatcgtcacctctttcttaggacgtgaagttgtcatcgtgtatgaagattcaccttatggaattggcattcttcagccactcaccgaggcactgcagagcagcagtgtccacacaattgatagtgtggttgttccaattggtgtgactgatgatcacttcgaccagatgctctatcgcctcaagaacatgtcagcaaggctgttcgttgtaaacatgcgcacagctcttgctgtccatctattttctcgggccaaggatgctggcatggtgactgaggattatgtctggattgccactgttgctctaggcaatgtagtggatggcctcagccctgatgacattgataacttgcaggggattttgacactgcggccttatgttcagggtacaagcttggctaggttcaaggcaaggttccacttggagaatctgaacactgaccgtgtgcacaccccaagtgttctgctgttccgggcatacaatacggcatgggctacttgtatagcagctgagatcgctggggtatccaggttggctatccgggtggcagaaatagatttgagcagacatgacttcaggatggtcaatagagaggtgcagccaccatcttatgagattgtgcacgtgaacaggaaaggtgcattgggagtaggtttatggacaccaccactgtctttgcaaccacaaaaactaagtagaaaaggatatagctttgacaatagcagaaggtctgtgttctggagagaagatacagtaaggacctctaaagggagggagaagacaggctttccacttaaccttgacactaaacattcacttaacctagagtccaagagaagaaatgccagaaaattagtgggaggaagatcggggaagttgtgcagaagctataatgagaagctactcaggattggtgtgccacagaaagatggtttcaaagcttttgtgaatgtttctcgtccttatttcttttgcaaggataatgctactcgtcctagtaccacaaaacaagtcactggctacatcattgatgtatttgagactgctatggagaagctgcagcaccccccatgctatgacttctgtgtcttcgatggttcttacgatgagctagtaggcaacgtgtctttagggatccttgatggagcagcaggtgatgtgaccataactgccaatcgaacaggacaagtggactttacaatgccatacacacagtctggtgtgtctttgcttgtgctatctgagagtgacttagaaccaatccagtggaccttcttagcaccactgacaaaggaactttggttcgcaactgtgggtttcttcttcttcactgggtttgttgtgtgggtgattgagcgacccagaaatccagagtaccaaggatcaagtctgagacagttcagcaacgcttcatattttattttctccactttgacattttctcatgtgctggtactagtgcagagctatacggcaagtttttcatccattttaaccgcagagaggctccatcctacagtgaccaacctggaccagctccttgtcaatggtgattatgttgggtaccagcataattcatttgtgtactccatgttgagagatcgaggtttcagcaaacataggttgattccttattcgagggaagatgagtacgcagatgctttgaggaaggggtccatgaatggaggcgtgtcagctatcgtggatgaggtcccctatttaacatctttcctcttctctgatgctcgataccagaacgagttccagattgttggtcacatatacaagaccccaggacttggcttcgtatttcctcaaggttttcctctgttgcataatatttcaactgccatcttgaacattactgaagggaatgagggttcacagtttgaagaaaaatggtttggtacggctgcgacaacaccaacagtttccaacaagccttccactcctctaactttgcagagcttctccggtctgttcctcaccagcggattcttctcttctctcatgatgctgataagcattatgaggctggctcatgccagatggaccgaactgagacacggggacgcagatcccatggacaatatttccggggacgaagaatttcgtcagctgcaccctgaagcgtaa

SEQ ID NO: 3226 - protein, 786 aa, Sorghum bicolor
MVYTAEDLIKNAQVVAIIAAPQVSAEADLLAQLGSRNCIPVLSFSCVSPTLHLHTVPYFVQTSPKESSQVAPIVDIVTSFLGREVVIVYEDSPYGIGILQPLTEALQSSSVHTIDSVVVPIGVTDDHFDQMLYRLKNMSARLFVVNMRTALAVHLFSRAKDAGMVTEDYVWIATVALGNVVDGLSPDDIDNLQGILTLRPYVQGTSLARFKARFHLENLNTDRVHTPSVLLFRAYNTAWATCIAAEIAGVSRLAIRVAEIDLSRHDFRMVNREVQPPSYEIVHVNRKGALGVGLWTPPLSLQPQKLSRKGYSFDNSRRSVFWREDTVRTSKGREKTGFPLNLDTKHSLNLESKRRNARKLVGGRSGKLCRSYNEKLLRIGVPQKDGFKAFVNVSRPYFFCKDNATRPSTTKQVTGYIIDVFETAMEKLQHPPCYDFCVFDGSYDELVGNVSLGILDGAAGDVTITANRTGQVDFTMPYTQSGVSLLVLSESDLEPIQWTFLAPLTKELWFATVGFFFFTGFVVWVIERPRNPEYQGSSLRQFSNASYFIFSTLTFSHVLVLVQSYTASFSSILTAERLHPTVTNLDQLLVNGDYVGYQHNSFVYSMLRDRGFSKHRLIPYSREDEYADALRKGSMNGGVSAIVDEVPYLTSFLFSDARYQNEFQIVGHIYKTPGLGFVFPQGFPLLHNISTAILNITEGNEGSQFEEKWFGTAATTPTVSNKPSTPLTLQSFSGLFLTSGFFSSLMMLISIMRLAHARWTELRHGDADPMDNISGDEEFRQLHPEA

SEQ ID NO: 3227 - DNA, 339 bp, Sorghum bicolor
atggtgaagggacgcacggggcagcgcgtcaggctctacgtccggggcaccatcctcggatacaagaggtccaagtcgaaccagtacgagaccacgtcgctcgtgcagatcgagggggtcaacaccaaggaggacgtcgcgtggtacgccggcaagcgcatggcgtacatctacaaggccaagaccaagagcagtgagacccgctacaggtgcatctggggtaaggtcacccgcccgcacggcaactccggtgtcgtccgcgccaagttcaagtcgaacctcccgcctgagtccatggggcgcaaggtcagagtgttcatgtaccctagcagcatctaa

SEQ ID NO: 3228 - protein, 112 aa, Sorghum bicolor
MVKGRTGQRVRLYVRGTILGYKRSKSNQYETTSLVQIEGVNTKEDVAWYAGKRMAYIYKAKTKSSETRYRCIWGKVTRPHGNSGVVRAKFKSNLPPESMGRKVRVFMYPSSI

SEQ ID NO: 3229 - DNA, 3531 bp, Sorghum bicolor
atggaggaggatgacatagattttagccctttccttagggaaggatctccgtctgagacctcatcaagccttacatcagaagcagaatgcgaggtgcatagttctgacaatcgaccaagtggccagacatatttgcaggatactgtagttaatgaaaatacaagtgacagtgcacttcctcaaaatagactgtcgtctcaagatcttgtcaacaaaatatttccagaagaaacgtctacccaggttaatcttgagaatggattggaaaaagacgctttaggaagcaaagctgcttgctctccaacagtgcaaaaccctcatcacctatctctcaaaattagtgaggaagatgcaatttgcaggcggacgagggcaagatactcactagcaaactattcacttgaagaattggagacctttcttcaggaatcagatgacgatagtggcaatgacacacaggcattacagggggatgaaaaccaggatgaagatgataatgatgcagactttgagctcgagattgaggaggccctagaaagtgacgctgatgaaaatgctgagaactatgacgccacaaatcatagaaaagagaaagatggacgtaggcctcagactaggcagaggcgtccatttaccaagttgtctggggctggtagctatcatcaggaatccgataaaacaaattttagaccaattgtgccatatattccatctgcattggtgactcctgctcatgcttttggatggcaatatcctacccagaatgcccttcgcccttcatccttggtttcagtaccgtgtgcacctttagcatgtggatttactgatcagcaactcgggcaactgcatgtgttgatatatgagcatgttcagctccttatccaaacattttccctatgtattcttgattcgtctaaacaagatgtggctaataatgtcaaaaggatgatagttgagttggttggctttcgtgatcaagcattggctaggagtgctactcaacagcatatcgtttttgaatcccggcatctctcatctagttttgtttcttctgaaattttggaatgccaatggatgccgttaatcaagagtcctgttatatccatccttgatgtcgcaccacttgagttggccctcggctatttaagtgatgttgcaactgctgtcgtgaaatatagaaaaagtcatgttgatggcactgctgacaaaacccgcaggaaagagcccctgtttcctttaccagtgattaacagttgcaaagaagtgaataatgtttctcaagatagatcaaatagtgtgcctacagcatcatctccttcatctgggcggttgcagcagaagaaatcgttggctgctaccctgcttgagcgtactgaaaagggcacagttgctcttgttcctgctgacattgcaagattagcacagagattcttttcacttttcaattttgcactctttcctcataagccacctccttcacctatggccaatagagtgtttttcactgatgcagaggacagattgttagctctaggaattctggaatataataatgattgggaagcaatacaaaagcgctttcttccttgtaaatcaaagcatcagatatttgtgagacaaaagaatcgtagctcctccaaagctcctgataatccagttaaggatgtgcgccgtatgaaggcatctccattgactgtcgaggagaaagaatgtatcaaggaggggttgaggatattcaaaaacgactggaaatcagtttggaagtttgtagtgccacatagagacccttcactgctccaacgtcagtggagagttgcaagtggagtccagaaatcttacagtaaaagtgatgctgaaaaagaaagaaggcgaacatatgaagcaaagaggagaaagctgagagtatccatgcccaattcacgccgtgggcaagaggctgataacaatgcttctgaagatgctgaaaatgatgatgattcatatgtcaatgaagcatttttggaagacacagatagtatgccttgtcagcaatcaggcacagacctcgatgaagaatgtggtactgcaggtggttacattgaaccccagaaactaagtggtgcgaaacttgatgtaaccacctcatacataccttttatgtaccgcccctctgatggcccatcatatgtgagagcaccttccactgcagctcaggtggtatcatgtggatctctggaccaactgccagcttcccaattgagtaaacagaaaggtagttgtgtggtcaagttggctccagacttgcctcctgtgaaccttcccccttctgtccgtgtcctatctcaggtggaattttatcggaactcaacacactttcatggcacctcggataatgcagcaaaggatatgtatcccgtgccacctttgacctcctttacagaaagtgctgatagacagctaaatctgttccctgatcacagagctaattctagattgcagcagaatgggatctctagtgataatgctacagaagatggtgctgagcaagatttgcagatgcatcctttactgtttaagtatcctcgagatgtttcgtcatatagtcacccggttcaaaatcttattaatcagtcaagaaaatatgatcttttcccctttgagaaagttcaagttgagagaagtaacaaccagactacaggttccaccgaaaatggtactgtaaatgctaacaccatcgacttccatcctctcttgcaaagaacggaaggttatgtgcataatgaagtaccagaatatgataataaccttgactgccatcagtctgataataacatgagcgaaatcccagtagatgaccaatcaacagctgggcaagcatccacaagcccttatgagagggagacaagtattgacttgaacattcatttgtgttctccaatggccataaatgattcaaatgacttcagaagtagttttagcagatcaaatgttcaagatgaagtttctaggaaggacaaatctagtgttccagagcttgaggttgtaaattcctattcccatcattgcattcaagaacctaatgaagaatcaatgcaaggaattgtaatggagcaagaagagttaagtgattccgaggaagatagccagcatgttgagtttgaatgtgaagaaatggatgattctgaagaggagcaagttcagagtccagaagcctctccaattcaaaataagggtatctcagcatcagttgtttgtggggaagttcatgttagtaatgaccacagtcaaatccagcaaggatctgttcaaaaggataaacagggtgcaagctcaatgcagaaaactcaagttccttctcggtcagtgaggagtaagctgaagccggaaactgctaactgcacaggatctagggcgagccaacattcgtccacttctcacacagctgaaactagccggagcaaaaccagaaattctaaagtgccacagggacagtcaagtgctgaacgcaagcccaatgattcaagaactagaaaaactctggccccaagatga

SEQ ID NO: 3230 - protein, 1176 aa, Sorghum bicolor
MEEDDIDFSPFLREGSPSETSSSLTSEAECEVHSSDNRPSGQTYLQDTVVNENTSDSALPQNRLSSQDLVNKIFPEETSTQVNLENGLEKDALGSKAACSPTVQNPHHLSLKISEEDAICRRTRARYSLANYSLEELETFLQESDDDSGNDTQALQGDENQDEDDNDADFELEIEEALESDADENAENYDATNHRKEKDGRRPQTRQRRPFTKLSGAGSYHQESDKTNFRPIVPYIPSALVTPAHAFGWQYPTQNALRPSSLVSVPCAPLACGFTDQQLGQLHVLIYEHVQLLIQTFSLCILDSSKQDVANNVKRMIVELVGFRDQALARSATQQHIVFESRHLSSSFVSSEILECQWMPLIKSPVISILDVAPLELALGYLSDVATAVVKYRKSHVDGTADKTRRKEPLFPLPVINSCKEVNNVSQDRSNSVPTASSPSSGRLQQKKSLAATLLERTEKGTVALVPADIARLAQRFFSLFNFALFPHKPPPSPMANRVFFTDAEDRLLALGILEYNNDWEAIQKRFLPCKSKHQIFVRQKNRSSSKAPDNPVKDVRRMKASPLTVEEKECIKEGLRIFKNDWKSVWKFVVPHRDPSLLQRQWRVASGVQKSYSKSDAEKERRRTYEAKRRKLRVSMPNSRRGQEADNNASEDAENDDDSYVNEAFLEDTDSMPCQQSGTDLDEECGTAGGYIEPQKLSGAKLDVTTSYIPFMYRPSDGPSYVRAPSTAAQVVSCGSLDQLPASQLSKQKGSCVVKLAPDLPPVNLPPSVRVLSQVEFYRNSTHFHGTSDNAAKDMYPVPPLTSFTESADRQLNLFPDHRANSRLQQNGISSDNATEDGAEQDLQMHPLLFKYPRDVSSYSHPVQNLINQSRKYDLFPFEKVQVERSNNQTTGSTENGTVNANTIDFHPLLQRTEGYVHNEVPEYDNNLDCHQSDNNMSEIPVDDQSTAGQASTSPYERETSIDLNIHLCSPMAINDSNDFRSSFSRSNVQDEVSRKDKSSVPELEVVNSYSHHCIQEPNEESMQGIVMEQEELSDSEEDSQHVEFECEEMDDSEEEQVQSPEASPIQNKGISASVVCGEVHVSNDHSQIQQGSVQKDKQGASSMQKTQVPSRSVRSKLKPETANCTGSRASQHSSTSHTAETSRSKTRNSKVPQGQSSAERKPNDSRTRKTLAPR

SEQ ID NO: 3231 - DNA, 1470 bp, Sorghum bicolor
atggacttctcagctggttcctacttctcatcatggcctgtcaattctggttctgagagctacagtttggctgatggttcagtggaatcatatggaggagaaggaagcatggcaccttcaagctatttcatgacagctagatcagatcacaatttaaaattcagtgtgcatgaacaggattccactatgcttccaaatgaacagttgacctatgctggtgctggccagactgatctgttacctggtgatactctatctagggataagctttgtgaaaatcttctggagcttcaacgactgcagaataacagcaatctgcagagtaatttagtggccccaggagtgcttcagcacaattcaacacctggggtctttcatccacagttgaatactcctggactttcagaactgcctcatgccttatctagttcaattgatagtaatggaagtgaagtttctgcttttcttgctgatgtaaatgctgtttcttcagccccaactttgtgttcagcattccaaaatgcttcttcgttcatggaaccagtgaatctagaagctttcagttttcaaggagcacaaagtgattctgttttgaacaaaacaagccattcaaatgggaatatctcagtgtttgacagtgctaccttggcatcacttcatgacagcaaagaatttatcactggtaggctcccctcatttgctagtgtcaaggaagcaaacctagcttctagtggtttcaagactcagaagcaggagcaaaatgcaatgtgcaacgttcctctccctgctttcactgcacgtaatcaaatgtcagttgctgcaacgcaaggagcactgatccctcaaaagattccttcatggatcaatgaaaacaaaagtgagggtcctgttagccatccttctgatgtacaaacccaaccaaattcggctggaaatggtgttggcgtgaagccacgagtaagggctcgtcgtggacaggcaactgatcctcacagtattgctgaacggcttcgcagagagaaaatttcagataggatgaaaagtctgcaagatctcgtcccgaattccaataaggcagacaaggcatccatgctggatgaaataattgattatgtgaaatttcttcagcttcaggtcaaggtcttgagcatgagtaggctaggagctccaggagcagttcttccccttctcacagaatctcagactgagggttaccatggtcaacctctgtcggctccaaccaacacacaaggattactggatgcactagactcggaagacgccttcgtctttgaggaagaggttgtgaagctaatggaaaccagcatcaccagcgcaatgcagtaccttcagaacaaggggctctgcttgatgccagttgcccttgcttccgccatatccacccagaaaggtgtgtccgctgctgcaatccctcctgaacggcgaaataaagacatgctcctcccatga

SEQ ID NO: 3232 - protein, 489 aa, Sorghum bicolor
MDFSAGSYFSSWPVNSGSESYSLADGSVESYGGEGSMAPSSYFMTARSDHNLKFSVHEQDSTMLPNEQLTYAGAGQTDLLPGDTLSRDKLCENLLELQRLQNNSNLQSNLVAPGVLQHNSTPGVFHPQLNTPGLSELPHALSSSIDSNGSEVSAFLADVNAVSSAPTLCSAFQNASSFMEPVNLEAFSFQGAQSDSVLNKTSHSNGNISVFDSATLASLHDSKEFITGRLPSFASVKEANLASSGFKTQKQEQNAMCNVPLPAFTARNQMSVAATQGALIPQKIPSWINENKSEGPVSHPSDVQTQPNSAGNGVGVKPRVRARRGQATDPHSIAERLRREKISDRMKSLQDLVPNSNKADKASMLDEIIDYVKFLQLQVKVLSMSRLGAPGAVLPLLTESQTEGYHGQPLSAPTNTQGLLDALDSEDAFVFEEEVVKLMETSITSAMQYLQNKGLCLMPVALASAISTQKGVSAAAIPPERRNKDMLLP

SEQ ID NO: 3233 - DNA, 1386 bp, Sorghum bicolor
atgcagagcctcctcctgcccaccgctgccgcggccccggtggcggctccgcggggccggcggagtctcccggggcgcctctccgtgcgcgcctccgcgacggcggcagcggcgccgcggcgggagacggatcccaagaagcgggtggtgatcacggggatggggctggtctccgtgttcgggaacgacgtagacgcttactacgaccgcctgctggccggggagagcggcatcgggcccatcgaccgcttcgacgcctccaagttccccacccgcttcgccggccagatccggggcttctcctccgagggctacatcgacggaaagaacgaccgccgcctcgacgactgcctccggtactgcatcgtcagtggcaagaaggctctcgaggccgccgggattggcctcggctccaagcccatggaaaagattgacaagacccgggctggtgtgcttgtgggcactggtatgggtggcctcacggtgtttcaagatggtgttcagaatctcattgagaagggatacagaaaaataactcctttcttcatcccatatgctataacaaacatgggttctgccctgcttggaatggacattggtttcatgggtccaaactactccatctcaactgcctgtgctacctcgaattactgtttctatgctgcagcaaaccatatccgtagaggagaagctgatataatgatagctggtggcactgaagctgcaattattccaattggtgttggtggctttgttgcctgtagagcactgtcacagaggaatgatgacccgaaaacagcatccaggccttgggacaaggatcgtgatggttttgtcatgggtgaaggagccggagtcctggtcatggagagcctagatcacgcaatgaaacgtgatgcaccaataattgcggagtatttaggaggtgctgtgaactgtgatgcttaccatatgactgacccgagagctgatggtcttggtgtttcatcttgcatcaagcaaagtctcgaagatgctggtgtggcacctgaggaggtcaactatattaatgctcatgcaacatcaacccttgctggtgatctggcagaggtgaatgccatcaagcaagtcttcaaggacccatctgggatcaaaataaatgcaaccaagtccatgataggacattgccttggtgcagcaggcggtttggaagccattgctactattaaagcgataactactggatgggtgcatccaagcataaaccaatttaaccccgaggaagctgttgaatttgacactgtacctaatgtaaaaaagcagcatgaagtgaacgttggtatctcaaattcctttggatttggaggtcacaattctgttgtagtatttgcgccatttaagccataa

SEQ ID NO: 3234 - protein, 461 aa, Sorghum bicolor
MQSLLLPTAAAAPVAAPRGRRSLPGRLSVRASATAAAAPRRETDPKKRVVITGMGLVSVFGNDVDAYYDRLLAGESGIGPIDRFDASKFPTRFAGQIRGFSSEGYIDGKNDRRLDDCLRYCIVSGKKALEAAGIGLGSKPMEKIDKTRAGVLVGTGMGGLTVFQDGVQNLIEKGYRKITPFFIPYAITNMGSALLGMDIGFMGPNYSISTACATSNYCFYAAANHIRRGEADIMIAGGTEAAIIPIGVGGFVACRALSQRNDDPKTASRPWDKDRDGFVMGEGAGVLVMESLDHAMKRDAPIIAEYLGGAVNCDAYHMTDPRADGLGVSSCIKQSLEDAGVAPEEVNYINAHATSTLAGDLAEVNAIKQVFKDPSGIKINATKSMIGHCLGAAGGLEAIATIKAITTGWVHPSINQFNPEEAVEFDTVPNVKKQHEVNVGISNSFGFGGHNSVVVFAPFKP

SEQ ID NO: 3235 - DNA, 522 bp, Sorghum bicolor
atgtccccttctgccatcttcgtcttcctcctcgtctctgcgctgcatatgctggagtgcatcctcgatctcgtgaagaggaggggatccatttctgatgaacagctcaaactgcgtgtacagatcacggaacttctcaaggaggctagtgctttgtcaacgccctcaacgtttgcgcaagccgcaaaactgaagcggttggctgctgctaaagagaaggagttggcaaagatgcaagagctgaacattaaagggaagcagtctttatatgaacagtatggaaaagctctgctggccactaaggttctaatctatgttgtgttcattctgtggttttggagtactccagtaactactgttcctaagcaccttctccagcccttcggatggatgttttcctggagaggtgtagatgcttctacaggccgtgttgtggttggaattctcccatggctatttttgacctctcatgtcagcaagctactgagcgagaaacttgcgcccatatttctgcatccttag

SEQ ID NO: 3236 - protein, 173 aa, Sorghum bicolor
MSPSAIFVFLLVSALHMLECILDLVKRRGSISDEQLKLRVQITELLKEASALSTPSTFAQAAKLKRLAAAKEKELAKMQELNIKGKQSLYEQYGKALLATKVLIYVVFILWFWSTPVTTVPKHLLQPFGWMFSWRGVDASTGRVVVGILPWLFLTSHVSKLLSEKLAPIFLHP

SEQ ID NO: 3237 - DNA, 1731 bp, Sorghum bicolor
atgaagacggagatccgggtccacccgccacccacccacatcacgtcacgtgaaagcgcggtggcaaccgtcttctcttcggcgtgtacacgtagagacgtgaggggccacgtatcagtcatgcatcgtgcaacacggcccgtgacccggcgcaaggagaaacagcagcggaccaggtatatcccctcccgaggaaagtgctacggccacgcgtaccagctcacggccatgtgggtccgtccagtcagtgactccgtgagctgggtacgggtgcgcgtagcggcgtctcggaaggcgcctttctcgagacctccgctcgccgcggccgccgacgcgtcgccctcgtcatccccacggaagtccggcgaagatgcgccgccgcccgccgggggcacgccgccggcggcggcggccggcgtcaccccgtgcgagcaggccaggaaggcactgtgtgtgcggtcgccgtttgacggggaggaggctgctgggcgggacgcctggctgccatcccgagttgccagatgggcggcggtgggcgacgtgcggaagaatcataagaagagccagccccagcagcagcagcagccggagccagcacctcccctggagcagcaccccagagtgcctgctgggtgcaagggcttttgggagcagttggagccctattttcgggagttcacagcggaggatttcgaggaattagtgacgaagcatcaattctgccccagccagattgatccatattttgtgataccagttgtgggcagtagtaaggagttaggggagaattcagatctatctcatgcttttgaagcagatgaaagcccagatttgagttcgaatttggacaagcataacgagttggataggagcaaagaggatattcgggacagcttggatgatattggagccagtgtagagctggtcacccaagatgagagtagtaaagagaattgtgatcaggacatgcaggaagtgattgtgcagcaagaggagcagccggttgaaatcgtgttagatcaaagcaggactaatagtaatgttttaccgggatgcagagaggatctgttgccttctttgagctggctcttaggagcaaggcgacggtttgtgctcacttcagagcgcccaaacaagaagaggaagctcttaggtgctgatgctggtctagagcagcttgttctgctgccatcccctgaaggagcatgcaggacttccttccatcctatatgtgcaagagagttcaagcttcagattgagatatgggggaagtttggtcatgataatgttgagatgcgagcattttgtgcaaagcattctgctatcaaaagcatcagctccatacagaatgacaaaagtgtatctgaactggactgcgctcaagctgagccgcatgatggaaaacctgttactgggaatgaacaacaactagttgaccaaggaaaggttagtcttgctgacatagaatcggagctgggtctttgttcagaatcagtggaagctgctcttcagcctgatgagacaactgcttactcccctggcctgaagttgaaaatgatcaagtggctgcagaactctgagcgtgcaccttctgttcaagcctatcgtcaacaatatggacctgaggaagtcaagagtatgaaacaaatgagggttgaattggaactgttacgcttcctttgtgagaggattgttaagagagagaaagtgaaggggccattgtggccatag

SEQ ID NO: 3238 - protein, 576 aa, Sorghum bicolor
MKTEIRVHPPPTHITSRESAVATVFSSACTRRDVRGHVSVMHRATRPVTRRKEKQQRTRYIPSRGKCYGHAYQLTAMWVRPVSDSVSWVRVRVAASRKAPFSRPPLAAAADASPSSSPRKSGEDAPPPAGGTPPAAAAGVTPCEQARKALCVRSPFDGEEAAGRDAWLPSRVARWAAVGDVRKNHKKSQPQQQQQPEPAPPLEQHPRVPAGCKGFWEQLEPYFREFTAEDFEELVTKHQFCPSQIDPYFVIPVVGSSKELGENSDLSHAFEADESPDLSSNLDKHNELDRSKEDIRDSLDDIGASVELVTQDESSKENCDQDMQEVIVQQEEQPVEIVLDQSRTNSNVLPGCREDLLPSLSWLLGARRRFVLTSERPNKKRKLLGADAGLEQLVLLPSPEGACRTSFHPICAREFKLQIEIWGKFGHDNVEMRAFCAKHSAIKSISSIQNDKSVSELDCAQAEPHDGKPVTGNEQQLVDQGKVSLADIESELGLCSESVEAALQPDETTAYSPGLKLKMIKWLQNSERAPSVQAYRQQYGPEEVKSMKQMRVELELLRFLCERIVKREKVKGPLWP

SEQ ID NO: 3239 - DNA, 1125 bp, Sorghum bicolor; identical to SEQ ID NO: 315

SEQ ID NO: 3240 - protein, 374 aa, Sorghum bicolor; identical to SEQ ID NO: 316

SEQ ID NO: 3241 - DNA, 1662 bp, Sorghum bicolor
atggcgaagctgctggtcgacgtcaacgtcaagcggcggagctgggcggtcagtgccgtgctcgccgccgtcgtgatgaccgtgcctctcttcgtcatcatccacagtgattttggagcgtcggggatttggattcagactgccgtggccggcttacgcaaaggttcaaatgatctctccatgcagccgaggtcagcgcggcgccacgataagcttctcggcggcctactggtcgacggcttcgacgaagaatcctgccacagccggtaccaatccgccatgtaccgtcgaaaccccggcaggcaaccctcgacgtacctcatctccaagctccggcggcacgagtccctgcaaaggcggtgtggtccaggcaccgccgcctacagcaacgcccttgcgcagctgaaatccggcaagagcgtcgcgtctccgccggagtgcaggtacatagtctccgtgcccatcgaaggcctcggcaacaggatgctcgccgccgcgtcggcgttcctgtacgcgctgctcacggaccgtgtcgtcctcgtcgaccccagcaacgacatggacaacctgttctgcgagccgttcctcggagccacgtggctgctgccgccggacggcttcccgctggcaagctacgccaacttcagcatcgacaccgccgagacctacgggaacatgctgaagaacaaggtgatcggcgcgggcgcggacgccggcgcgcatgcgcaggtgccggcgttcgcgtacgtgtacctccacagcgacgccggcatccacgacaagaacttcttctgggacgaagaccagaggctgctccggcgcgtgcagtggctggtgatgaggacggacaactacatcgtgccggggctgtttctcaccaaggcgttccaggacgagctcgacctgatgttcccggagcgcgacgccgtgttccaccacctggcccggtacctgttccaccccaacaaccacgtctggggcctcgtcgcgcgctactacgacgcctacctcgccggcgccacgcagctcgtcggcatccaggtgcgcgtcttcggcgcccagccgaactcgccggagctcctggagcagatcacctcgtgcgcgcagaagcacaagctgctcccggaagtgctcgcgacgggaggtgagccgacgatgttgccagcggcgtcccgtgatgccaaggagtctaaatctaaagccgttctcgtcacgtccctcaagccctggtaccaggagaagatgaggagcatgtactgggagcacgcgacggccacaggggaggtggtgagcgtgcaccagccgagccacgaggagtaccagcggttcggcgtcaagtcgcacgacaccaaggcgtgggcggagatctacctgctgagcctgacggacgtgctggtgaccaccagccagtccacgttcgggtacgtcgcccaggggctcggtggcctgaggccgtgggtgatgtacaagccggcgaacggcacagtggtgccggacccgccgtgcggccgggacgtgtcaatggacccgtgttttttccagccgccgaagtacaatttctggcagaaccaatggctggatgccagtaagattgtgccacacgtccagcgctgccccgacttcccttgggggggactgaagcttgttggtgggaatgaatag

SEQ ID NO: 3242 - protein, 553 aa, Sorghum bicolor
MAKLLVDVNVKRRSWAVSAVLAAVVMTVPLFVIIHSDFGASGIWIQTAVAGLRKGSNDLSMQPRSARRHDKLLGGLLVDGFDEESCHSRYQSAMYRRNPGRQPSTYLISKLRRHESLQRRCGPGTAAYSNALAQLKSGKSVASPPECRYIVSVPIEGLGNRMLAAASAFLYALLTDRVVLVDPSNDMDNLFCEPFLGATWLLPPDGFPLASYANFSIDTAETYGNMLKNKVIGAGADAGAHAQVPAFAYVYLHSDAGIHDKNFFWDEDQRLLRRVQWLVMRTDNYIVPGLFLTKAFQDELDLMFPERDAVFHHLARYLFHPNNHVWGLVARYYDAYLAGATQLVGIQVRVFGAQPNSPELLEQITSCAQKHKLLPEVLATGGEPTMLPAASRDAKESKSKAVLVTSLKPWYQEKMRSMYWEHATATGEVVSVHQPSHEEYQRFGVKSHDTKAWAEIYLLSLTDVLVTTSQSTFGYVAQGLGGLRPWVMYKPANGTVVPDPPCGRDVSMDPCFFQPPKYNFWQNQWLDASKIVPHVQRCPDFPWGGLKLVGGNE

SEQ ID NO: 3243 - DNA, 2166 bp, Sorghum bicolor
atggcgacacggctcgcctccatcttctcgcccgtgcgcagccccacctccgccccggcccaccttctccaccgcactctccccagcttcagcaaccggcgagcgcatccctcgcagccccgcatgtcctcctcttcagccgcctcctccgcgccgcccgctgcagcggcggcggccggcggcgagaagcctgcggtggcgccgtacgggtcttggaggtcgcccatcactgcggacgtcgtctccggcgcggataggcgtctcggcggtatcgccctcgctggggatgggcgccttctctggatcgagggccgccccgaggagaaagggcgtatggttattgtaaaggaggaagataatcctgtggatgtcatacctcaggaatttgcagcacgcaccctggctcaagaatatggaggtggtgcatttgcagttgacaagagtgttgttgtgttctcaaattacaaggatcaacgtctatacaagcaaacaataggaattggtgctccacctgtgcctcttacacccgattatggtgctccgagtgtcagttatgctgatggtgtatttgatcctcacttcagccgttatgttactgtgatggaagatcgtcgaaaggatagcttgaatcccaccacaacaattgctgctgtagacttgagtggcagtgatgttcatgaaccaaaggtgctgatcagtggcaatgatttctatgcatttcctcgcattgatcaaagtaaaaagcggatggcatggattgaatggagccatccaaacatgccctgggataaatcagagctctgggttggttactttgctgagaacggagacttgaccaaacgggtctgtattgccggtggcaatccactgctggttgaatctcctagtgaacctaaatggtctcccaaaggagaactgttttttgttactgacagagggagtggattttggaacatttataaatgggttgaacaaaccaatgagattgttccagtgtattcactagacgctgaatttacaactccattgtgggtttttggcatcagctcatatgattttcttggaaacagcaaccacattgttttcagttataggcagcaaggaaggtcacatcttggtgtgcttgattgtgattcagcttctgtttcattgcttgacacccctttctctgatttatctgatgtggttgctgcagatgattacttctatgttggaggtgcttctgcaagtattccacggtcaattgctaaggtgacattaaatgagagcaaaacaaaagtagtcaatttctcaatagtctggtcctcctcaccagacctcgtacaatatagacctttcttcagcacaccagaacttgttgagttccctacatccaaacctggccagaaagcttatgcctatttctacccaccgtcaaatcccaattttcaaggtttggctgatgaaaaacctccgttgcttgtcaaaacacatggaggacctactgctgaaacacgtgctattctggacctcaatgtccagtattggacaagtagaggttgggcatatgtggatgtcaactatggaggaagcactggttatggaagagagtatcgggagagactattggacaaatggggtattgtcgatgttgatgattgttgcagctgtgcgagattccttgtggagagtgggaaagtagatgggcaacgcctttgtattactggtagatcagcaggtggatacactactttagcttcactagcattcagagacatgttcaaggctggagcttctctgtatggtgttggggacttgactctgttgagagcagagacgcacaaatttgagtcccattatatggacaatcttgtaggaaatgaaagagcttactatgagagatcaccaatcaactttgtcaaccagtttacgtgtccagtcattttgtttcaagggttagaggataaggttgtgccaccagatcaggcacgcaaaatatacaatgccttgaaagagaaaggtttgcctgttgctttggtggaatatgaaggagagcagcatgggttccgcaaggccgagaacatcaagttcaccttggagcaaatgatggtgttctttgcgagactagttgggaaatttgaggtggcagacgatataactccaatcaagattgagaacttcgattga

SEQ ID NO: 3244 - protein, 721 aa, Sorghum bicolor
MATRLASIFSPVRSPTSAPAHLLHRTLPSFSNRRAHPSQPRMSSSSAASSAPPAAAAAAGGEKPAVAPYGSWRSPITADVVSGADRRLGGIALAGDGRLLWIEGRPEEKGRMVIVKEEDNPVDVIPQEFAARTLAQEYGGGAFAVDKSVVVFSNYKDQRLYKQTIGIGAPPVPLTPDYGAPSVSYADGVFDPHFSRYVTVMEDRRKDSLNPTTTIAAVDLSGSDVHEPKVLISGNDFYAFPRIDQSKKRMAWIEWSHPNMPWDKSELWVGYFAENGDLTKRVCIAGGNPLLVESPSEPKWSPKGELFFVTDRGSGFWNIYKWVEQTNEIVPVYSLDAEFTTPLWVFGISSYDFLGNSNHIVFSYRQQGRSHLGVLDCDSASVSLLDTPFSDLSDVVAADDYFYVGGASASIPRSIAKVTLNESKTKVVNFSIVWSSSPDLVQYRPFFSTPELVEFPTSKPGQKAYAYFYPPSNPNFQGLADEKPPLLVKTHGGPTAETRAILDLNVQYWTSRGWAYVDVNYGGSTGYGREYRERLLDKWGIVDVDDCCSCARFLVESGKVDGQRLCITGRSAGGYTTLASLAFRDMFKAGASLYGVGDLTLLRAETHKFESHYMDNLVGNERAYYERSPINFVNQFTCPVILFQGLEDKVVPPDQARKIYNALKEKGLPVALVEYEGEQHGFRKAENIKFTLEQMMVFFARLVGKFEVADDITPIKIENFD

SEQ ID NO: 3245 - DNA, 1983 bp, Sorghum bicolor
atgttctcgtcggaggaggacgagcccttcgcggcgcagacgcttgcggacttcctcttcgaatcctacgccgacgacattcaccgcatcctcctcgacgacgatccctccaagctccatttcccgcttgttattgaattcgctgagcttatggagttcgaccccaagttcgccggcaagctctacttagatccctgtacgtacctgcccttcctcagagacgccgcacaatgggcccaggacaaggtgttgaagaaactggggaatttgaaaaccacagagacgaagaagtccgtgcatgtgcgtattgatgtcactggatcgccgctagaattccctgaggtctccccaagtattggaaaggtgagggtgaagcatatgaggaaattgattgctctgaagggaactgtgatcagatcaggtggtgtgaagatgattgagtatgagaggtgctacatgtgcaggaagtgcaaacacagctttgaggtctatcctgagctggaggctaggaatcgtataaatcttcctccattgtgcccaaaggcttcaagaggctgtacaagtgcttcttttcagttcgtagaaggtagcaccatttgccatgattaccaagaaatcaaaattcaagagaatgtacagcttcttggtattgggtctataccccgctccatgcctgtaattttgatggatgaccttgttgatagcattaaagctggagatgatgtcattattacgggtatattatctgccaaatggtctcctgatattaaggatgtgcggtccaaccttgatcctatgctgcttgctaattatgtgaggagaacaaatgagctgaagtctgatatagacattcctgcggaaactggagacaagtttgggtgtttctgggaagaccatgctcccctagaaggaagaaatttaatcttgaaaggcatctgtcctcaaatttatgggctattcacggtgaagcttgcagttgctcttacattaattggtggagtgcagcatgttgatgcttctggaacaaaggttcgtggagaatcccatatgcttcttgttggtgatccaggtactggtaaatcccagtttttgaagtttgctgctaaattgagcaaccgctctgtgatcacaactggtcttggaagcaccagtgctggtttaactgtcacagctgtcaaggatggaggggagtggatgcttgaggctggtgctcttgttttggctgatggtggtttatgctgcatagatgaatttgacagcatgcgagagcatgacagaacaacaatacatgaagccatggagcaacagacaataagtgttgcgaaggctggattagttacaacactcagtacaaggactactgtcttcggtgccacgaatccgaaagggcaatatgaccctgatgaaagtttgtctgtgaatacaacactttcagcaccactgttgagtagatttgatatagttcttgttcttctggatacacaaaatactgcttgggatgaaatagtttcatctcatatattggagaatttagatgaaaagaaagataagacaaatgcttctgatgtagagtggacactccccaagttgagaaggtacatcaattatgtaaggagacagtttaaaccagtgctgacaaaggaggcagaaagagttatctcgagctattatcagctacagagaaaatcaggaacacataatgcagcaaggacaacggtgcgcatgcttgaaagtttgataaggctagcacaagcacatgcaagactaatgttcagaaatgaggttagacaacttgatgccattgctgccatattgtgcatggaatcctccatgacaacatctccaatagtggacattgttggaaatgctctgcactcaaattttacagatgaccctgatgaagaatgtatcctaacatgtgattttgtagcctgcttattcaagaatatcaaggacttgagtcatttcttcagtaaaaactaa

SEQ ID NO: 3246 - protein, 660 aa, Sorghum bicolor
MFSSEEDEPFAAQTLADFLFESYADDIHRILLDDDPSKLHFPLVIEFAELMEFDPKFAGKLYLDPCTYLPFLRDAAQWAQDKVLKKLGNLKTTETKKSVHVRIDVTGSPLEFPEVSPSIGKVRVKHMRKLIALKGTVIRSGGVKMIEYERCYMCRKCKHSFEVYPELEARNRINLPPLCPKASRGCTSASFQFVEGSTICHDYQEIKIQENVQLLGIGSIPRSMPVILMDDLVDSIKAGDDVIITGILSAKWSPDIKDVRSNLDPMLLANYVRRTNELKSDIDIPAETGDKFGCFWEDHAPLEGRNLILKGICPQIYGLFTVKLAVALTLIGGVQHVDASGTKVRGESHMLLVGDPGTGKSQFLKFAAKLSNRSVITTGLGSTSAGLTVTAVKDGGEWMLEAGALVLADGGLCCIDEFDSMREHDRTTIHEAMEQQTISVAKAGLVTTLSTRTTVFGATNPKGQYDPDESLSVNTTLSAPLLSRFDIVLVLLDTQNTAWDEIVSSHILENLDEKKDKTNASDVEWTLPKLRRYINYVRRQFKPVLTKEAERVISSYYQLQRKSGTHNAARTTVRMLESLIRLAQAHARLMFRNEVRQLDAIAAILCMESSMTTSPIVDIVGNALHSNFTDDPDEECILTCDFVACLFKNIKDLSHFFSKN

SEQ ID NO: 3247 - DNA, 570 bp, Sorghum bicolor
atgggccagtctctgatgaagttcttcttcgacagctcctgccagaaagaagtgaaggttgtgatgcttgggctggacgccgccggcaaaacgacgatcctgcaccggctacacgtcggcgaagttctgtcgacggtgccgacaatcggtttcaacgtggagaaagttgagtacaagaatgtggccttcacggtgtgggacgttggagggcaggacaagctgcggccgttatggaggcaatacttgagcaactcggacgccttgatatacgttgttgattcgacggacagggaccggattggggttgccagggaggagttccaggccatcgtcaaggacccgctcatgctcagcagcgttcttctagtgctcgccaacaagcaggatatgaaaggcgcgatgagcccttccgaagtggggcagcgcctgggcctgtacgacctcaagaacagggcgtcgcgtgccgtgggggcctgcgcgctcaccggcgagggtctgcacgaggggctcggttggctggcggcgaccctcaaggacgcgcacacatggggaacctccgtccgcttctag

SEQ ID NO: 3248 - protein, 189 aa, Sorghum bicolor
MGQSLMKFFFDSSCQKEVKVVMLGLDAAGKTTILHRLHVGEVLSTVPTIGFNVEKVEYKNVAFTVWDVGGQDKLRPLWRQYLSNSDALIYVVDSTDRDRIGVAREEFQAIVKDPLMLSSVLLVLANKQDMKGAMSPSEVGQRLGLYDLKNRASRAVGACALTGEGLHEGLGWLAATLKDAHTWGTSVRF

SEQ ID NO: 3249 - DNA, 957 bp, Sorghum bicolor
atgacgacgacgcagctgatccgcctcgtggtcctcaccgtcgctctgctgggcgccgcggcgccgcggcgcgcggcggcgttgaacccgcgcatgctgttcctggtgaagcccgacccgatcgtgcttcgggaccacggcggcgcgctgctcacggggaacaacctcaccgtcaacctgctcttctacgggcgcttcaccccagcgcagcgcgggatcgtcgccgacttcgtccgctccctctcggactcggccgcgcctcgcctgccgccgtccgtggcgtcgtggtggcgcaccacctcgctgtaccgcggtggcggtgcgcgggtgcggctcggcaggcagatcctcgtcgacgagcgcctgtcgtcgtcgtcgctgggccgcccgctctcgctgggcaacgtcacggcgctggcgcgggccgcggggcaccaccggggcgccgtcaccgcggtgctcacggccgccgacgtccccgtggcgtccttctgcgtgtcgcggtgcggcggccacggccacgaccgcggcggcgcgcacggccgggcgcggtacacgtacctgtgggcggggaacccggcgcagcagtgccccggccagtgcgcgtggccgttccacgggccgacatacggtccccagaccccgccgctggtgccgcccaacggcgacgtcggcgtcgacggcatggtcatcagcctcgccgccctcctcgccggcacggtcaccaacccgtacggggatgggtactaccagggcgacgccgccggcgccgggctggaggctgccacggcgtgcgccgggatcttcgggagcggggcctaccccggctaccctgggaagctgctcactgacccggccaccggcgtgagctacaacgccgtcgggcttggcgggaggaagtacctgctcccggcattgtgggacccgacgacctcgcagtgcaagacacttgtctag

SEQ ID NO: 3250 - protein, 318 aa, Sorghum bicolor
MTTTQLIRLVVLTVALLGAAAPRRAAALNPRMLFLVKPDPIVLRDHGGALLTGNNLTVNLLFYGRFTPAQRGIVADFVRSLSDSAAPRLPPSVASWWRTTSLYRGGGARVRLGRQILVDERLSSSSLGRPLSLGNVTALARAAGHHRGAVTAVLTAADVPVASFCVSRCGGHGHDRGGAHGRARYTYLWAGNPAQQCPGQCAWPFHGPTYGPQTPPLVPPNGDVGVDGMVISLAALLAGTVTNPYGDGYYQGDAAGAGLEAATACAGIFGSGAYPGYPGKLLTDPATGVSYNAVGLGGRKYLLPALWDPTTSQCKTLV

SEQ ID NO: 3251 - DNA, 561 bp, Sorghum bicolor
atgaaaggatccagcgagcatggcgagacctcgaaggcggcgcccctgggcaggggtggtgtcagtaaaggagtgtccgtgcttgatcttatacttcgcttcattgccatcatcggcacccttgctagtgccattgcaatgggcaccaccaacgagacgctgcctttcttcacacagttcatccgcttcaaggcgcagtacagtgatctccctactctcacgttctttgtcgtggcaaattctattgtctgcgcctacctcatcctttcgctcccactatctatagtgcacatcatcaggagcagggctaaatacagcaggctgctcttgatctttcttgacgcggcaatgctagcattggtgactgcgggagcatctgcagcagcggctattgtgtacttagcacacaaaggcaatgtcagggcaaactggcttgccatctgccagcagttcgactcattctgcgagcgtatctctggatccctcattggttcgttcggagccatggttatgctgatactgctgatattactctccgccattgccctagccaggcgctag

SEQ ID NO: 3252 - protein, 186 aa, Sorghum bicolor
MKGSSEHGETSKAAPLGRGGVSKGVSVLDLILRFIAIIGTLASAIAMGTTNETLPFFTQFIRFKAQYSDLPTLTFFVVANSIVCAYLILSLPLSIVHIIRSRAKYSRLLLIFLDAAMLALVTAGASAAAAIVYLAHKGNVRANWLAICQQFDSFCERISGSLIGSFGAMVMLILLILLSAIALARR

SEQ ID NO: 3253 - DNA, 1359 bp, Sorghum bicolor
atgaggggagcgcacgagccactgcatccccacaagcagatgaagacatcgtcttcttccagagagggcaaccatgggtatttcgtgcccagacccgtctgcgcttggcttgtctgcggcttcgtcgccatggctctcctccacgtcctctgctgcactccccccggcacccaagaagccgtcttgtctccactgctccagtacgtcgacgacacctacaacttcgtctcatctgggccggagagctgcaactacacggaggggagatgggtgtatgcgccgggccacggccggcggtacaacggcacggagtgcgacgtgaaggacagccagaactgcatccgcaacgggcggccggacacggggtacctggactggcggtggcagccggcggcggcggggtgccggctgccggcgttcgacgccgcggcgttcctgtcgtccgtgcgcggcaagcacgtggccttcgtgggcgactccatggcgcggaaccaggcgcagtccctggtctgcctcctggtgggcggcgccggcgtcccgcaccgcgtcgtgtaccgggacccggactacccgcgcaagttcaacctgtggcggtacgcgttcccggcgcatgacgtgacggtgtccttctactgggcgcccttcatcgccagggccacgggcaaggcgctgaacgacagcctgccgcagaacatgaaccacgtgcacctcgacgcgctcgacgaccggtgggtcgccgacgccgacggcatggacgtcgtggtgctctccatcgcgcactggccgctgaacggcgccatctactacaacggcagcgcgcggatcgggcaccacgcgcaccgggagctggacccgtcggaggacatcggctacgcctggccgatgaaggtggcgtaccggatggcgttggaccggctgatgacgacgagctccggcggcggccgggcgccacggaccgtggtgatcgccaccttctcgccgggccacttcgaaggcaacaccctcaccacgatgtgcccgaggaaggagccgtacaaggagggggagaaggagccgcgccacctcgacatggagctggtcgggctcgtctacgaggaggtcgaggcggcgagggcgaggaatggcgctggtggtgaagcagcaggcggcggcgcaggggcaagggtggaggtgctggacgtgacgaagctggcggtcatgaggccggacggccaccccgggctttacatgcaccgcgacccgttcgcgcacggcggcccgcagccgtggatgtcgtccgactgcgtccacttctgcttgcctggacccgtcgataccttcaacgagatactgcagcagatcctcaggaacaagcggtga

SEQ ID NO: 3254 - protein, 452 aa, Sorghum bicolor
MRGAHEPLHPHKQMKTSSSSREGNHGYFVPRPVCAWLVCGFVAMALLHVLCCTPPGTQEAVLSPLLQYVDDTYNFVSSGPESCNYTEGRWVYAPGHGRRYNGTECDVKDSQNCIRNGRPDTGYLDWRWQPAAAGCRLPAFDAAAFLSSVRGKHVAFVGDSMARNQAQSLVCLLVGGAGVPHRVVYRDPDYPRKFNLWRYAFPAHDVTVSFYWAPFIARATGKALNDSLPQNMNHVHLDALDDRWVADADGMDVVVLSIAHWPLNGAIYYNGSARIGHHAHRELDPSEDIGYAWPMKVAYRMALDRLMTTSSGGGRAPRTVVIATFSPGHFEGNTLTTMCPRKEPYKEGEKEPRHLDMELVGLVYEEVEAARARNGAGGEAAGGGAGARVEVLDVTKLAVMRPDGHPGLYMHRDPFAHGGPQPWMSSDCVHFCLPGPVDTFNEILQQILRNKR

SEQ ID NO: 3255 - DNA, 2478 bp, Sorghum bicolor
atgatccccagccgctgccgccgcctcctgccaaccttctcacaacccaatgtcccgctccgccgtaacctggccgccaacgcagcgctgcagtggctggacgacgagctcgcgtcgctcgcgctccccaagctcgactcctacgcgtgcgcaaggctcctgcagcgctgcatcgctcgtggtgacgcccgcgccggccgcgccgtgcacgcgcgtgtcgtgcagcgcggaggagtggcgcagctggacaccttctgcgccaacgtcctcctcaacctctacgcgaagctcggcccactggccgccgcgcgtaggctgttcgacggaatgccggagcggaacatggtgtccttcgtcacgctcgtgcagggctacgctctgcgtggggggtttgaggaggccgcggggctgttccgaaggctgcagagggaaggccacgaggtgaaccatttcgtgctcaccacgatcctgaaggtgctggtcgctatggatgctcctgggcttacctgctgcatccacgcctgtgcatgcaagttgggccacgacaggaacgcctttgttgggtcatcgctgattgatgcctactcgctttgtggggctgtcagtcatgcgaggtgcgtgttcgatgggatcatctggaaggatgctgtcacttggacggccatggtttcttgctattctgagaatgacataccagaggatgcgcttaatactttctccaaaatgaggatggcaggtgccaagcctaatccgtttgtgcttaccagtgtgctcaaagctgcagtttgcctgtcatctgctgtgctaggcaagggcatccatggttgcgcagtcaaaacactttgtgatactgaacctcatgttggtggcgccttgcttgacatgtatgccaaatgtggatacattgaggatgcccgcactgtttttgagattattccccatgacgatgtcatactctggagctttctgatatcccgttatgctcagagctatcagaatgaacaggcatttgagatgttcctcagaatgatgcggtcttctgttgtgccaaatgagtttagtttgtccggtgttctgcaggcttgtgctaatgtcgcctttttggatctgggccagcaaattcataaccttgttataaagttaggctatgagtctgaactatttgttggcaatgcactaatggatgtgtatgcgaaatgcagaaatatggaaaattcacttgagatcttcaggtcattacgggatgccaatgaggtgagctggaacacaattattgttggctactgtcagtctggttttgcagaagatgctttgagtgtgttccaggaaatgcgtgctgcgcatgtgctctcaactcaagttacgttctccagtgtgctccgggcttgtgcaaatacagcatccatcaaacatactgtccaaattcacagcttgattgagaaatccacattcaataatgacacaattgtttgcaattcactgattgatacatatgccaagtgtggatgcattagggacgctctgaaggtatttgaatctataatacaatgtgatgtagtttcatggaatgccataatctcaggatatgctctccatggacgagccacagatgctctggaacttttcaacaggatgaataaaagtgatacaaagccaaatgatgtcacttttgttgctcttctgtccgtctgcggtagcacaggcttagtcaatcaaggactctctctgtttaactctatgacgatggaccatagaatcaaaccatctatggatcattacacttgcattgttaggcttctgggacgtgctggccgtctaaatgatgctttaaagtttattggggatattccttcaacaccatctcctatggtttggcgagctttgcttagctcatgtgtagttcataagaatgtagctctgggaaaattttcagcagagaaggtgcttgagattgaaccacaggacgagacaacctatgtattactgtcaaatatgtatgctgcagccggaattttggatcaagttgctcttttgaggaaatcaatgagaaacataggtgtaaagaaagaggttggtcttagttgggttgagatcaagggggaagttcatgccttttcagtgggatcagcagatcatccagatatgcggataataaatgcaatgctggaatggctaaacctgaaggctagtagggaaggttatgttccagacataaatgtagtattgcatgacgtggatgaggaagaaaaagctcgcatgctatgggtccatagtgagaggctggctttagcatatggcctttctatgacacctcctggccatccaatacggataatgaagaatttgcgttcctgcttggactgccataccgtgtttaaggttatatctaaaatagttcaacgggaaatcgtcgttagagatatcaatcgctttcaccattttgatgaaggaatatgctcctgtggtgattattggtga

SEQ ID NO: 3256 - protein, 825 aa, Sorghum bicolor
MIPSRCRRLLPTFSQPNVPLRRNLAANAALQWLDDELASLALPKLDSYACARLLQRCIARGDARAGRAVHARVVQRGGVAQLDTFCANVLLNLYAKLGPLAAARRLFDGMPERNMVSFVTLVQGYALRGGFEEAAGLFRRLQREGHEVNHFVLTTILKVLVAMDAPGLTCCIHACACKLGHDRNAFVGSSLIDAYSLCGAVSHARCVFDGIIWKDAVTWTAMVSCYSENDIPEDALNTFSKMRMAGAKPNPFVLTSVLKAAVCLSSAVLGKGIHGCAVKTLCDTEPHVGGALLDMYAKCGYIEDARTVFEIIPHDDVILWSFLISRYAQSYQNEQAFEMFLRMMRSSVVPNEFSLSGVLQACANVAFLDLGQQIHNLVIKLGYESELFVGNALMDVYAKCRNMENSLEIFRSLRDANEVSWNTIIVGYCQSGFAEDALSVFQEMRAAHVLSTQVTFSSVLRACANTASIKHTVQIHSLIEKSTFNNDTIVCNSLIDTYAKCGCIRDALKVFESIIQCDVVSWNAIISGYALHGRATDALELFNRMNKSDTKPNDVTFVALLSVCGSTGLVNQGLSLFNSMTMDHRIKPSMDHYTCIVRLLGRAGRLNDALKFIGDIPSTPSPMVWRALLSSCVVHKNVALGKFSAEKVLEIEPQDETTYVLLSNMYAAAGILDQVALLRKSMRNIGVKKEVGLSWVEIKGEVHAFSVGSADHPDMRIINAMLEWLNLKASREGYVPDINVVLHDVDEEEKARMLWVHSERLALAYGLSMTPPGHPIRIMKNLRSCLDCHTVFKVISKIVQREIVVRDINRFHHFDEGICSCGDYW

SEQ ID NO: 3257 - DNA, 1767 bp, Sorghum bicolor
atgcccgaggcggcggtgcccccgccgctgccgctcctggcggcggcgagctccccggtggccgccgcgctgccgcgggcgaggcggcggcagcagcagcagcggagggggtggcggcgcccgcgcgggttgctggtctggggcgccctcgtggccttcttcttcgtcatgaactggtggatgttctcccgacttcaggacccctcggcgcgcccgcacttccggctgaggcgccacccgccccgcgcgcccgctactgtcaattcgtcgctcttgactctggaagaggtgtctggtgctgctaaggggaagagggcacatagggttatgctcacccggttgcttgctttggcaggccatgctttggcagaggcagagaccaggcctgaacctaaggatttgtgggaagagccgataaatgctactatgtggagaccgtgttctgaccaaagggattggaaagcctcagagggaaccaatggctacatcatgatcagtgctaatggtggcataaaccagcaaagagttgcgatttgtaatgcagttacaatctcgcggttgctcaatgcaactcttgtcatcccaaaattcttgtacagtaatgtgtggctggacaaaagtcagtttggcgatatatatcaggaggattattttatcaaatatctgaaatctgatattcagattgtaaaggatcttccagtagagctgcagtcattagacttggaggcgattggtagccttgttaatgatacagatgtcatgaaagaggcaaagcccagtttatatgtgaaaaaaatactaccaattttactgagaaacagagttgttcactttataggatttggcaatcgcttatcttttgacccaataccttctgaccttcagagattgcgatgcagatgtaattttcatgctcttcgctttgtacacaaaattcaagaaactggtgcagttcttgtagagaggttgcatggccgtagggcctcttcgtcgcctttgaaggataatcttttaggccagtttgccatcaagtctgaccccagtgcgaacaagagtgatgcatccaaatatctggctgttcatctccggtttgagattgatatggttgcatactcattgtgttactttggtggtggcaaagatgaggaagacgaactagaagcttatcgccaaattcactttcctgttctgtcagaactcaagaagacaacaaagttgccctctgctgctttcttacggtctgaaggcaaatgtccccttgcacctgaagaggctgtgcttatgcttgctgctattggtttcaagcgcagcacaaagatatacattgcaggcgctgaaatttatggagggaaggataggatggctgccataagtcgtctttatcctgctttagtaactaaagaaacccttctgtctccatcagagcttgaaccatttaggaacttctcatctcagttggcagccctggacttcattgcatgtgcagctgccgatgcatttgctatgactgacccaggaagtcaattctcttctcttgttcaaggttaccgcatgtactatggtggtggggaccttcccacaataaggccaaacaagcgccggctagccagcatacttgtgaagaatgccacgattgagtggaatgaatttgaaagtagagtaagaaaactcatacatcaaactaagcaagttcatgagaggcctgttgcaagaagcatatttagacatccacgatgttcagaatgcatgtgcagaacagagcaatag

SEQ ID NO: 3258 - protein, 588 aa, Sorghum bicolor
MPEAAVPPPLPLLAAASSPVAAALPRARRRQQQQRRGWRRPRGLLVWGALVAFFFVMNWWMFSRLQDPSARPHFRLRRHPPRAPATVNSSLLTLEEVSGAAKGKRAHRVMLTRLLALAGHALAEAETRPEPKDLWEEPINATMWRPCSDQRDWKASEGTNGYIMISANGGINQQRVAICNAVTISRLLNATLVIPKFLYSNVWLDKSQFGDIYQEDYFIKYLKSDIQIVKDLPVELQSLDLEAIGSLVNDTDVMKEAKPSLYVKKILPILLRNRVVHFIGFGNRLSFDPIPSDLQRLRCRCNFHALRFVHKIQETGAVLVERLHGRRASSSPLKDNLLGQFAIKSDPSANKSDASKYLAVHLRFEIDMVAYSLCYFGGGKDEEDELEAYRQIHFPVLSELKKTTKLPSAAFLRSEGKCPLAPEEAVLMLAAIGFKRSTKIYIAGAEIYGGKDRMAAISRLYPALVTKETLLSPSELEPFRNFSSQLAALDFIACAAADAFAMTDPGSQFSSLVQGYRMYYGGGDLPTIRPNKRRLASILVKNATIEWNEFESRVRKLIHQTKQVHERPVARSIFRHPRCSECMCRTEQ

SEQ ID NO: 3259 - DNA, 1698 bp, Sorghum bicolor
atggcggcggcggcggtgacgtccaacggcggcgcggtggcggcgaacggcgggccggcgcccggccggctggcctccgtgtacagcgaggtgcagacgaaccggctcctgcacgcgctgccgctcccctccgtcctccgctccaacttctccgtcgtcgacggccccgccagctccgccgcgggcaaccccgatgagatcgccaagctcttccccaacctcttcggccagccctcggcgtcgctggtgccggcggccgagcccgccgcgaccaggccgctcaaggtcggtgtcgtgctctccggtggacaggcgccgggcggccacaatgtcatctgcggcatctttgattacctgcaggagcgtgcaaaaggcagcaccatgtatggattcaagggaggcccagctggggttatgaagtgcaagtatgtggagctcactgcagactttgtgtatccctacagaaaccagggcggatttgatatgatctgcagtggaagggacaagattgaaacaccggagcagttcaagcaagctgaagacacagccaacaagcttgatttggatggtcttgttgtcattggtggtgatgattcaaacaccaatgcctgcctccttggtgaatactttaggtcaaggaatttgaaaacccgtgttattggttgcccaaagactattgatggagacctgaaatgtaaggaggttccaacaagctttgggtttgatactgcttgcaagatatactctgaaatgattggcaatgttatgactgatgcgagatcaacaggaaaatactatcactttgtgaggcttatgggtcgtgctgcttctcacattacattggaatgcgctttgcaaactcaccccaatgctgcactcattggggaagaggttgctgaaaagaagcaaacccttaagaatgtcacaaactacatcactgatatcatctgcaagcgtgcagatctcggttacaactacggtgttatccttataccagaaggcctaattgatttcatcccagaggttcaaaaactcatcgcagaattgaatgaaattttggcacatgatgttgttgatgaggcaggggcctggaaaagcaagcttcagcctgaatcaaaggagctgtttgagtttctgcccaaaactattcaggagcaacttatgcttgaaagggatccccatggcaatgttcaggttgcaaaaattgaaactgagaaaatgcttattagcatggtggaaactgaactggagaagagaaaagctgaggggagatactctgcacatttcagaggacaagctcatttctttgggtatgaaggaagatgtggccttcctactaattttgattctaactattgctatgcattaggctatggtgctggtgcccttctccaaagtgggaagacaggacttatttcatcggttggcaaccttgcggctccagtacaagaatggactgttggtggaacagcattgacatcactgatggatgttgagaggaggcacggcaagttcaagccagtgatcaagaaggctatggtggaacttgatgctgcacctttcaagaaatatgcatcaatgcgggatgagtgggccatcaagaacagatacatcagccctggccccatccagttcagtggccctggaagtgatgactcgaaccacactttgatgctggaactcggtgctgagttatag

SEQ ID NO: 3260 - protein, 565 aa, Sorghum bicolor
MAAAAVTSNGGAVAANGGPAPGRLASVYSEVQTNRLLHALPLPSVLRSNFSVVDGPASSAAGNPDEIAKLFPNLFGQPSASLVPAAEPAATRPLKVGVVLSGGQAPGGHNVICGIFDYLQERAKGSTMYGFKGGPAGVMKCKYVELTADFVYPYRNQGGFDMICSGRDKIETPEQFKQAEDTANKLDLDGLVVIGGDDSNTNACLLGEYFRSRNLKTRVIGCPKTIDGDLKCKEVPTSFGFDTACKIYSEMIGNVMTDARSTGKYYHFVRLMGRAASHITLECALQTHPNAALIGEEVAEKKQTLKNVTNYITDIICKRADLGYNYGVILIPEGLIDFIPEVQKLIAELNEILAHDVVDEAGAWKSKLQPESKELFEFLPKTIQEQLMLERDPHGNVQVAKIETEKMLISMVETELEKRKAEGRYSAHFRGQAHFFGYEGRCGLPTNFDSNYCYALGYGAGALLQSGKTGLISSVGNLAAPVQEWTVGGTALTSLMDVERRHGKFKPVIKKAMVELDAAPFKKYASMRDEWAIKNRYISPGPIQFSGPGSDDSNHTLMLELGAEL

SEQ ID NO: 3261 - DNA, 696 bp, Sorghum bicolor
atgaatacagtgtccccttttggtcgatccagaacacatgcccatgaaagttctgcagaacctgtgcccattaaacaaaagttattccgtcaggagtttgcttctggtgctccatatgatccattgcttgacagtattgaaccatcgagcagttcaatcaacaaggtagatcttcgtaaagagaagaactggagtgctgctgatagtcgtgatgcatcaaaacttatgaacctagaagtggacagtgaaaatatgtatggactgggggttgttgctgagtcagaagttgagggacttggagaggtggcagcagatactgaggcaggtgtggtggagaatgcaagtcctgaatttttgggtgctaaagactggaactcagatatccctggtgatgctgacaatgaccaaacattggacacaaataagaagggtaaagactccaggtcaatgaaactttttaagattgctattgccgattttgttaaggaagttcttaagccatcatggaggcaaggtaacatgagcaaagaggctttcaaaactattgtcaggaaaacagttgataaggtttctaattcagtccctagcagtcatattccgaaaacacctgccaggattaaacattatgtacaatcctctcaaaagaaggtgaccaaattagtaatggggtatgtcgacaagtatgtgaagccgtag

SEQ ID NO: 3262 - protein, 231 aa, Sorghum bicolor
MNTVSPFGRSRTHAHESSAEPVPIKQKLFRQEFASGAPYDPLLDSIEPSSSSINKVDLRKEKNWSAADSRDASKLMNLEVDSENMYGLGVVAESEVEGLGEVAADTEAGVVENASPEFLGAKDWNSDIPGDADNDQTLDTNKKGKDSRSMKLFKIAIADFVKEVLKPSWRQGNMSKEAFKTIVRKTVDKVSNSVPSSHIPKTPARIKHYVQSSQKKVTKLVMGYVDKYVKP

SEQ ID NO: 3263 - DNA, 1881 bp, Sorghum bicolor
atggaggaggagatccgagcggagttccagaatagcggcttctccatcgggggagccagctccgaggacgccgcccagattctctccacgctgctcacctactgcatcaactacaagatgagccccgcggacctcgtctccaactgggaggtctattacctcaacaggcaattggatggcttaaagcttgaaagctcatatcttgatggttttctgtcacatcttcagaatgaagttaaagaaaggataataaaagaagaagccaaccttcacatttactccagtaacgatgtcgacatgctcttgagcaattcacatgcagatgaagtggcatttcatgacacgccaggctctaaacaggaaaagccacctgaagagtcatctaactctgagttaactcctctgacaagtgacagaccatcatccagcagagtggccaaaacaaatgctgatcgtattaccccttttgcaacacgagtaaataaatttacccaacagtatgttctcaatgctgataatgcagttagtgtgccaagtaaaaatgctgaaatcacagaagatgaagtaattagaagaattcaaccaagtcaaagatgttccttacaagttcagcgttcacagcctgaaccaggttgcagattcatgtatgacagaatggaagacagatttaattacttggaagatcggatacgaaaatcagcaagcttgttttctgcatctgggttttgtggacaacctgcagatgctacccttgcttcagaggagaaaatgtttgcagtcggtacagtagcttgtgatggggaaggtcatttgaatgaaaagtctatcttgctacagggcagtgttcaacactccaggggacagcgtgtgcgccttgacttgaaggatcttgatcacttctctttgtttcctgggcaggtggtgggtatcgaaggccacaatcccagtggacactgttttgttgcatcaaaattaattgattccataccggtctctgtggatgctcaacttcctagtgctaagaaacaagctattgataatgaaagcaaccaaaattccgacgctggcactctgtcaagagcattgtcatcggtcatcgcagcaggtccctatacaacaaccgataatctgttgtttgaaccactgcaagaacttctttcatatgcttgtcgtaagcagcctcagctactcatattgatgggacccttcattgactctgatcatcctgacataaaaaaaggaactgttgaccagagctttcatgacattttccattttgaaattctgagaaagattcaagactttacccagtatctggggaacactgtccgtgtaattctcattccatcagtgcgtgatgctcaccatgactttgttttccctcagcctgcatttgatttgaattttccagaagatatcacacatcagattacttgtctggcaaatccatgcctcttcagttctaacgagatacattttggctgttgtacagtggacattctgaaacagctcagtggtgaggaaatttctcgcaagccacctgtcggaaagcctgcagacaggattggtagacttgcctcacacatattaaagcaacaaagttactatcctctatatccttctgctgctggtgtgccattagacttctcacttgctaaggaagcactggagatctcatcagcaccagatgttctccttcttccttctgatcttgcaccatttgtgaaggtgctttcccttggagaaggtagtgacgaccagaaacggtttatctgtgtgaaccctgggaggttggcaaagggtattggtgggggcacatttgtggagctttactacaatgagggcatcgacaagaccaacgcctccatcatccgcatatag

SEQ ID NO: 3264 - protein, 626 aa, Sorghum bicolor
MEEEIRAEFQNSGFSIGGASSEDAAQILSTLLTYCINYKMSPADLVSNWEVYYLNRQLDGLKLESSYLDGFLSHLQNEVKERIIKEEANLHIYSSNDVDMLLSNSHADEVAFHDTPGSKQEKPPEESSNSELTPLTSDRPSSSRVAKTNADRITPFATRVNKFTQQYVLNADNAVSVPSKNAEITEDEVIRRIQPSQRCSLQVQRSQPEPGCRFMYDRMEDRFNYLEDRIRKSASLFSASGFCGQPADATLASEEKMFAVGTVACDGEGHLNEKSILLQGSVQHSRGQRVRLDLKDLDHFSLFPGQVVGIEGHNPSGHCFVASKLIDSIPVSVDAQLPSAKKQAIDNESNQNSDAGTLSRALSSVIAAGPYTTTDNLLFEPLQELLSYACRKQPQLLILMGPFIDSDHPDIKKGTVDQSFHDIFHFEILRKIQDFTQYLGNTVRVILIPSVRDAHHDFVFPQPAFDLNFPEDITHQITCLANPCLFSSNEIHFGCCTVDILKQLSGEEISRKPPVGKPADRIGRLASHILKQQSYYPLYPSAAGVPLDFSLAKEALEISSAPDVLLLPSDLAPFVKVLSLGEGSDDQKRFICVNPGRLAKGIGGGTFVELYYNEGIDKTNASIIRI

SEQ ID NO: 3265 - DNA, 6177 bp, Sorghum bicolor
atgaaaaaatcttattacagtacttctgttgccattgatgaagttggttctgccatgaccccaaatgagaaatcaggtatagagaaggaaagagatgtcagttcaattcaagatactcccaatcagctgccaaatattaactcaccactgtatgagaagtctggatatgattctcaaccaagcacacctatagctgtccccatcaatgaagctactcttcctagtggctttgatacccgcactactcattctaagataactctagcaacatctgccaatcctgctgatcatgataaaccggttgatttgcaccttaatgcgcctgtttcggttgattcccaaaatcatgaacaactcaagacaggaaaggaccatttggcagtgagttctggaatcttttctactcaattgcaaacagttactgcaaatcctactagtgataataaaccaggaactacccagtttgaaccatctgcttcctctgttcagaattcaggtaaggatgccactgcactgacttcttctgaggttgacagtgctgctccaaataaggcaccaagcaggaggaggaaagggtcaacgcgggaaccacgcaccagaagaacttctgcagcagctgcaagtgaacgccgtgcccgacttactggatcgaagcaggcagaggacacaaagaagttaaagatgtctgcaacgccaactacaacagtgtgtgttttagcggtagagcaacagggagctgcctctttaagagctgaggttaccaatgcttctgtttgtgaagagcagaagaatcctgggagtcacgtgtcttctgacatttcaattcctgtggggagtcatgtgctgggcgcaataagtactgaagaaacaactgccactgtgataactcagactcctgcagtggctaaatcagaagaaagaaaacttccagtaggggatcaacaaggtattcagtttgatagtacagtaccacaaacgaagatggtatcaaatgatgaaagcatgcaaggtactgaagttaataattcggaacagacaaaaatagtttctgctgctgaaccagcacctgcaaatgatgaacacatgcaaggtactgaagttagtaattcggaacaaacaaaaatggtttctgctgctgaaccagcacctgcaaatgatgaacacacgcaagctatagaggttggtagttcagagcaaccaacaagtatggtttcagctgtggaatcagcaccttcaaatgatgaagaacacacaacgcatgaagtgtatcttgagactgctgctgatgatatgcttacctctagtgcagcaacagatatattgcgggatacagttgagcatgcagctcgccaggccaatgcagcatgtacagatggaaccacaaggcagtctgaagcatcacaacttgatagcaaagcctctcatgatgcctcgtataaagacactactactactgtctccaccaaagatgatagcaaagcctctcgcgatgcttcttacatcttgcccagtgaaggcactgctgttgatgttactggttctaagcaagatgatgtgaacattgttggcacacaaactgctgatgcttccaggggttcttctagtcattttcaagctactttacaatcaactgagtcagattggcatccaggtcaagaggagaatttggagagtaggaaggagcaggtgaaaacggaagaagctttggataacagttctggtggcaatcaaactcacagtttgggcgatgaaccttctcatgatacatcattagcaagaaattctcctttggaatactcgaatgagcgttgttctgctcaagtaattggtgaaactttcaaaagtaaagaaaatattgttgaagtccattctgccatgaatactgatggccctgatgaagctctggatgcattgtatgtccaatctaaggaggccagcataacagatagtggtgtagctaccgatgttgataaatttgaaggtaaagagactagtgtcgaggtccgtgatgacatgaatactgatgggcctgaggatgctcaggatgctttgtccacccaatctgataaagaggccagcatggtagaatttggtgtgtctaacgatggtagtcccacagtttgcaaagcacacaatgatctcgagggtcatgtatcttgtgaagataggactggtggtgatatccataccaatgcaaattatggttctaataataaaagtgaggacaccattgttaatcctgttaaaaccacacgagaaccgttggaagaaagcaccgttattgtatcagagaattctgatttgaataagcaaagccacacattgcatactggaaatgatcctcctgcaagtaccctgttgatagttgagtctaacaaagttacttgtgatgctgaaattgtttgtgctagcagattagagtcttcttgtattgaggctgaaacagtggctatccaagagtcagctgttactgattttgagggaacaaaaggaactggggatttgggtcacaaaactggcagtccgctgtgtgatgatgttcatgatacatcatgttctgtgattggtcttgtgtgtgagaaagaacctactgaagatcttactgatggtagccattcagaagcacctaatttacttgctgctgtagtacaaactcgagaaactactgttgcaaaccaagaggaaatcatagatgcagtagtgtttattgatgcctgcaaggcagaacctgatggtgattgtactgttgctaaaggagctgaagagactgtagaaatggttcattctgttgaaaagcaatctgctgtattagaacatgttgagagacagacgaaacaaactacgatttgtggttctgtgctaaatgagtcccctcaggctgcagggttggaagaggactgctctgtactgaagcatggcggtcctactgcctcatctgagcttcttgctgtagcacccaatccaatcagtgaaacttctgttattcaagccgaaccagaggcaacaaactcggatggatactgcacaacagaggttggcagtgctttatctgaaactgtcaggggactggagccaaataaagaaactgctgttccaatgcaagaggatattgaagaagctaatgatacttctaataattgtgaagcacacaataattcggggattcatgcatttggtgaagtgttgatggaaatgcagtcatcagaggtcaaggaagtatcttttattcagtctggtgcagcaaatttgagcacacagactcctgtactgcctgatgaaacaggacaaaccaatgtggcttcgactgcagaactagtacctacaaatgatgatgaacacatgcaaggcactgatgttaattctgagcaacaaacaaagatggtttcacctgctgaatcagcacctggtaatgatgaacacatgcaagacatcacggttctaagttcagaactgcaaacaaagatggtttcagctgcagagattgatgcattatgtgtccaggagactgcaattgttgatcttgggggaactagaggaacagttgatctgaatgacattagtacacaggttcctgcattacctggaagtgatgtgctaggtgtggaggcacataattcagaaccaaaaaaagcatcctcaccaggtgatgaaattattagttcagaacaacaagcagaaattgaaacgattgcagagacagaaacagtgagcgttaaggagaatgccattgctgatcatgaggaaacaggtgaccagagtggcgtaagtatacatgctcctctattagctgaatctggagaaaagggatcacatggagttgaattgtgtggtattgagattgaggctaataattcggaacaaggaaagatggtttcaactgtggaagcagcctctacaccagacgatctagggcgtcacacacatgaagtgcatgtaactggtgatggtgctatattatctagtgcggaacaggacacattgcaagataacataagcagtggtgctgatgtggacctaacaaccagccaaaggaaaacagactctgaaggtatcaaggatccttctattgggactaacatagaggagatccaaggcccttatgaaacctcgaacaaggaccattttactgatcctcctgcgactaccctggtgatagctgaatctgataaggatacctgtgatgcagaagttgtttgtgctggcaagttagaatcttctggtgttgaaggtcattgttcagaacaagtaaagatggcttcggttgcagaagcagcgtctagcctggctttagtaggatattcttcttcagaagactcaatggtggatgctgctgcccgagtagctgatggtgattttgcggatagtaaaggggctggtgttgattgccaagaaactatgcctactcaagccacctctaccctcccagagaacatggattggcagaatgattctcttgcagctgctgcggtgacggttgaaccaatgtttgcttcctcatctgagcacgctgcagaatccaagccaattgatgaaacttctgttatgcaagtggaactggcaaccagtacaggggatgaatgtgcagcagagggtgacaatgttgtttcatctgaaactgttgtggaatcagagcctgttcaagaaactgttgttcctagtcaaggaggtagcatagaagctaataatacttctaccatcagcgaagtaaacaaagataccgagtctcgtgcatctggtgaagtatgcaaagatgctcagtctcatggcggtgaatcttacactgaactgcaattggcaccttcctctggtgaggaggccatgatattgtgtagtgagctgcccagccaggaggtgaaggaggctccaagcagtgaacctttggggtataatgaaaatgtgaaaacagaaaatgattcttcttctcaagaaccagtcaatgaggaatctgctcctggtgctgaaaatgcaaagattgatgaagctgacacagaacagcaactgcctcctgggcagcaggtgaaggaggctccaagcaaccctttggggaataatgaaaatgtgaaaatggaaaatgaagcttctgctcagggaccagtaaatgaggaatctgctcctcgtgctgaaaatgtaaagattgatgaagctgacacagaacaactgcctccatctggtgaggccatggtagacatatctagcgagctactcagccatgacgaaaaggtggctccaagcacagtccctttaggaaatgatgaagatgcacatatggaagaggcttctgctgcacagagagagctaagcactgaagttgctcatggtagtgaaaatgcgaaacttagtgaagctggcacgtctggtgaggccatggtagacgtatctagcgagctactcagccaagatgaaaaggtggctccaagcactggccctctaggaaatgatgaagatgcacagatggaagaggctgctgctgcacagagagagctaagcactgaagttgatcatggtagtgaaaatgtgaaacttggtgaagctggcacggagctgcagttgccaccaccttcatctggtgaggcactggtagacatatctagggagcaactcagccaagaggtgcaggaggttgcaagctctgggccctcaggaactgatgaaaatactgagatggaacggctaaacaccaaacattcacctggtggtgaaacctcaaaacttgttggagctgatccgggaatacaattgccaccgtctggtgaggctgtggtagatatatctaatgagccacccagctgccaagaggtaaaggaggccccgagcagtgacagtttgggaaatgatgaaaattcagacaccgagaagactgctgctgccttacagggacggctaaacaccgagcttgctcctagtggcgaaaatacagaatctaatgaagctgacactgggaaacaagagacacccgtgtctgctgatgctatggtagaatcatccagcgagcctcccagcgatgaggcaaaggaagctccaaccactgacctgtctggggatgatgaaaaagcaaagtcggcaagggctgctgttgttgcggaactttttggagatgcaacagaaggtggttcggatcagccattgccgtctccaagagaacaaggcaaggaagcagaggctgatggtgacttgtag

SEQ ID NO: 3266 - protein, 2058 aa, Sorghum bicolor
MKKSYYSTSVAIDEVGSAMTPNEKSGIEKERDVSSIQDTPNQLPNINSPLYEKSGYDSQPSTPIAVPINEATLPSGFDTRTTHSKITLATSANPADHDKPVDLHLNAPVSVDSQNHEQLKTGKDHLAVSSGIFSTQLQTVTANPTSDNKPGTTQFEPSASSVQNSGKDATALTSSEVDSAAPNKAPSRRRKGSTREPRTRRTSAAAASERRARLTGSKQAEDTKKLKMSATPTTTVCVLAVEQQGAASLRAEVTNASVCEEQKNPGSHVSSDISIPVGSHVLGAISTEETTATVITQTPAVAKSEERKLPVGDQQGIQFDSTVPQTKMVSNDESMQGTEVNNSEQTKIVSAAEPAPANDEHMQGTEVSNSEQTKMVSAAEPAPANDEHTQAIEVGSSEQPTSMVSAVESAPSNDEEHTTHEVYLETAADDMLTSSAATDILRDTVEHAARQANAACTDGTTRQSEASQLDSKASHDASYKDTTTTVSTKDDSKASRDASYILPSEGTAVDVTGSKQDDVNIVGTQTADASRGSSSHFQATLQSTESDWHPGQEENLESRKEQVKTEEALDNSSGGNQTHSLGDEPSHDTSLARNSPLEYSNERCSAQVIGETFKSKENIVEVHSAMNTDGPDEALDALYVQSKEASITDSGVATDVDKFEGKETSVEVRDDMNTDGPEDAQDALSTQSDKEASMVEFGVSNDGSPTVCKAHNDLEGHVSCEDRTGGDIHTNANYGSNNKSEDTIVNPVKTTREPLEESTVIVSENSDLNKQSHTLHTGNDPPASTLLIVESNKVTCDAEIVCASRLESSCIEAETVAIQESAVTDFEGTKGTGDLGHKTGSPLCDDVHDTSCSVIGLVCEKEPTEDLTDGSHSEAPNLLAAVVQTRETTVANQEEIIDAVVFIDACKAEPDGDCTVAKGAEETVEMVHSVEKQSAVLEHVERQTKQTTICGSVLNESPQAAGLEEDCSVLKHGGPTASSELLAVAPNPISETSVIQAEPEATNSDGYCTTEVGSALSETVRGLEPNKETAVPMQEDIEEANDTSNNCEAHNNSGIHAFGEVLMEMQSSEVKEVSFIQSGAANLSTQTPVLPDETGQTNVASTAELVPTNDDEHMQGTDVNSEQQTKMVSPAESAPGNDEHMQDITVLSSELQTKMVSAAEIDALCVQETAIVDLGGTRGTVDLNDISTQVPALPGSDVLGVEAHNSEPKKASSPGDEIISSEQQAEIETIAETETVSVKENAIADHEETGDQSGVSIHAPLLAESGEKGSHGVELCGIEIEANNSEQGKMVSTVEAASTPDDLGRHTHEVHVTGDGAILSSAEQDTLQDNISSGADVDLTTSQRKTDSEGIKDPSIGTNIEEIQGPYETSNKDHFTDPPATTLVIAESDKDTCDAEVVCAGKLESSGVEGHCSEQVKMASVAEAASSLALVGYSSSEDSMVDAAARVADGDFADSKGAGVDCQETMPTQATSTLPENMDWQNDSLAAAAVTVEPMFASSSEHAAESKPIDETSVMQVELATSTGDECAAEGDNVVSSETVVESEPVQETVVPSQGGSIEANNTSTISEVNKDTESRASGEVCKDAQSHGGESYTELQLAPSSGEEAMILCSELPSQEVKEAPSSEPLGYNENVKTENDSSSQEPVNEESAPGAENAKIDEADTEQQLPPGQQVKEAPSNPLGNNENVKMENEASAQGPVNEESAPRAENVKIDEADTEQLPPSGEAMVDISSELLSHDEKVAPSTVPLGNDEDAHMEEASAAQRELSTEVAHGSENAKLSEAGTSGEAMVDVSSELLSQDEKVAPSTGPLGNDEDAQMEEAAAAQRELSTEVDHGSENVKLGEAGTELQLPPPSSGEALVDISREQLSQEVQEVASSGPSGTDENTEMERLNTKHSPGGETSKLVGADPGIQLPPSGEAVVDISNEPPSCQEVKEAPSSDSLGNDENSDTEKTAAALQGRLNTELAPSGENTESNEADTGKQETPVSADAMVESSSEPPSDEAKEAPTTDLSGDDEKAKSARAAVVAELFGDATEGGSDQPLPSPREQGKEAEADGDL

SEQ ID NO: 3267 - DNA, 4737 bp, Sorghum bicolor
atgacggacaacggcggccttggcgttcggcctattaacggaggccgagggggtgccgtggagcagcgcgggctcggcgacaacgggcctccagtgtccccaccagagcgtgtttgtacgccgcctgcgccgaggctggctgcttggcggcgcatgtcgtcgcctggtcctctccggtgctcaaccccaaggagcattgggtgtgaagatggtgaggatatggatcggtacttttccccacagagtgagttttctcaagacacttctgatacggattcaatgagcacaagtattagtaggatgtataccttccggttggggacttcgagcccattagatagtcctctcaaacaattgggagtaggagacatgagtcctccctcaaggaggggttgccattctcctagctatccttggaattcttgccggggatcagatgatgttgattctagttttatgagttcacctcagcatcatgatgaacagaggaaagatgatgtgcaaccaattgatttggagagtagacacatctggtatcctccaccacctcaggatgaaaatggtacttttcaatatgatgaggacgatgacaatgatgtttgtgttgggaaggtctttggacatgttcaccatgattattgcgacggcgatgatgatgttgatgataatgatgattatgattcgttagggatcaaagggaaacatagtatatctcacaaagagttcttgaggagtgctttacatgggcatttcagggctctcgtgtcccaattgctcctaggacatggcattgatcctgtggatggctggccagacatagtggcctcattagcttggcaagcagctacctttgtcaggccagacacgagcaagggtggtagcatggatcccacagactatgtcaaagtcaaatgcgtagcatcaggaaatccaaatgatagtgctttcattaaaggtgttgtctgttctaagaatgtaaaacataaacgcatggtgtcaaaacatgagaaccctaggttgcttcttttgggaggagcactggaataccagaaagtcacgaacaaactagcttcaataaacagcattcttgaacaggagaaggagtatcttaagaatgctgttgcaaagatagaggctcaacgcccacatgtcttgctagtcgagaaaagtgtgccattgcatgcacaacagcttcttgcaaaagatatctctttagtattgaacgtcaagagatcacttctggaaagaatatctcgctgcacaggtgctcaaattgcatcttctgttgaaaatatcacttctacaggagtcggacaatgccaaacattctggattgagaaagttacagaatgttcatcaccaaaggtctcaaacaaaaaaacggtcaagacactgatgttttttgatggttgtccaagacgcttggggtgcacggttcttctaagaggaaagtcatatgaagagttaaagaaagtcaaacttgctgtgcagtatgctttatttgcagcataccacctgtcacttgagacctcatatcttgctgatgagggtgcaacacttccaaaagtcccctcagatcttcaatttgagaagcagaattcttcctcaagatactatcagcagaatttgaatgaatttcaaaccattgaaggggaaacttttggaagtgggtgcatcatgccttgccttaatggttctacaaatcaatctcattcaagagatgacataattcacgaggaacatgcacactgtcattcaagagccgacttaagtcaagaagaatatactcgtggaaccattaaggtatacccttattccacagaagcttcaatgtatggcaactgtataccacctgttcagacacctaaaaattcacttgccagtgtgagaaaaaggacaccaggaaatttatattttccccataatggtcacatagatgaagcaggtggtggaatgtcaaaggttgatagtgacttccttgacttggataatggttggaatcatatctcagatgaagattctgtagcaatacgtgatcacaatgggaaccacaacgaatattttccaacatctgacagtccacagagcattttggtttccttgtcagttgcatgccctctgagaggaattgtatgcaagcaatctcagctatttcgaataaagttctacggtacttttgataagccacttggaaggtattttcgtgaagatttatttgttcagacttcatgctgcgaatcttgcaaggagcctgcagaatctcatgtgcgatgttacactcatcaacaaggcagtctcacaatcagtgtcagaactcttccatctgtcaagctacctggggagcttgatgggaaggtatggatgtggcacaggtgtctcaggtgcaaaccaaaagatggaattcccccagccacacaaaggatagtcatgtcggatgcagcacgcggattatcttttgggaagtttctggaacttagcttttcaaatcacacaacagccaatcgaattgcctgctgtggacactccctccagagggactgccttcgtttttatgggcttgggagcatggttgctgtcttccgttattcaccagtagacattctttctgtcaacttgccatcctcagtactggactttgcttatccaaaagctcaagattgggttatcaaagaagctgttgatgtatgcgctaggaaggaacatctgtataaggaaattgttgttaaacttgactgcatcgaaaagatagttaaagaccagaacattggtatgaagtcaggcttgcataaacatgttgccgatcttaaagagttggttaaagttgagtggaagaagtatgacgtcgtatcagggttttctatcatagatgacttgcagacatttgaaccatatatagatgttctagagctcaatcgcctgaggagagagcttgtacttgatattcacgtatgggatcgcagactgtacatgatgcactccctcacaaaagaaaactgtcgtactgtgccaaatgatgcagaatgttctgagaagcttactgaaagcttattagaacagtcaaaggatgtgacatctggtaaacatttgaatgttgagaattctctagaacagaatcaaccaagtatgttggaagtggctgcagtttcagtgaaatcatcatcccctatgatggaacaaaccaacacttgtgtttcacgtttggaaaccaacattatgggtgatctatccatgcattctggctcaactgttatcagctttgccccaggcccatgtgaaatgcagagtgaaggagtgctggctgaactagaagctggaaaatttttgcagaaatcacaatcttctgcctccaatctttctgacagaattgacttagcatggactggttctggtcagtttgttaaggattcatcaagtagcgtggaggcagtttcatttgtacctgctagtctgaaggatgatcctgcataccagaaggttatagcaccaattagaatcaaatcattcgattctgctgtcagttccagaaatgttgatgattcaaatgctagtataagaagatcttattctcaaaggcccccaaaagctattgagagaactggtaagggcctgtcaccaacattcttgaacaagctgtcactttctggtatgattgatggcgagagtcggttgctactgtcacaaaatgattcaaatgttattgttccaatttatgatgatgaaccatctagcatgatagcccatgccatgactatcccagaataccgcagcttcttgttgccacttctggatcagaataatgaatctagtttattgaattatggttctgatcagcctcaacctacaactggaaatgactctaaggataaccatttaactgtttcttttgaggatgaagactcatattctgttgataaagcaaaattttctgtgacatgttattttgcaaagcagtttgatgcaatcaggagaaagtgctgtccagatgagctagactatatccgctccttaagtcgctgcaagagatggagtgctcaaggtggcaagagtaatgtctactttgccaaaacactggatgacagatttgtgataaagcaagtgacccggacagaattagattcatttgaggattatgctgttgattacttcaaatatttgacagactctgtatcgtctgggagcccaacttgcctcactaaagtccttggtctttaccagatcactgccaagaatttgagagatggaaaggagctgaagatggatgtaatggtcatggaaaacctatttttcaagaggaaggtatcaagaatatatgacctaaagggctctttgcgttcgcgctacaaccctgatacttcagggaacaacaaggttctcttggatcttaatctgttagagacacttcacacaaagcccatttttcttggaagcaaagcaaaaagaaggctggaacgagctgtctggaatgatacttcttttctggcatcggtggatgtgatggactactctctcctagtcggcattgatgaggaaagaaaagagcttgtgatggggattatcgactatcttcggcaatacacttgggacaaacaactagagacttgggtgaaggcgacaggatttctaggtggctccaaggatgttctgccaaccatcatatctccggatcagtacaagaagaggttcaggaaggccatgtcgaagtacttcttggctctccctgaccaatggtcaccgtaa

SEQ ID NO: 3268 - protein, 1578 aa, Sorghum bicolor
MTDNGGLGVRPINGGRGGAVEQRGLGDNGPPVSPPERVCTPPAPRLAAWRRMSSPGPLRCSTPRSIGCEDGEDMDRYFSPQSEFSQDTSDTDSMSTSISRMYTFRLGTSSPLDSPLKQLGVGDMSPPSRRGCHSPSYPWNSCRGSDDVDSSFMSSPQHHDEQRKDDVQPIDLESRHIWYPPPPQDENGTFQYDEDDDNDVCVGKVFGHVHHDYCDGDDDVDDNDDYDSLGIKGKHSISHKEFLRSALHGHFRALVSQLLLGHGIDPVDGWPDIVASLAWQAATFVRPDTSKGGSMDPTDYVKVKCVASGNPNDSAFIKGVVCSKNVKHKRMVSKHENPRLLLLGGALEYQKVTNKLASINSILEQEKEYLKNAVAKIEAQRPHVLLVEKSVPLHAQQLLAKDISLVLNVKRSLLERISRCTGAQIASSVENITSTGVGQCQTFWIEKVTECSSPKVSNKKTVKTLMFFDGCPRRLGCTVLLRGKSYEELKKVKLAVQYALFAAYHLSLETSYLADEGATLPKVPSDLQFEKQNSSSRYYQQNLNEFQTIEGETFGSGCIMPCLNGSTNQSHSRDDIIHEEHAHCHSRADLSQEEYTRGTIKVYPYSTEASMYGNCIPPVQTPKNSLASVRKRTPGNLYFPHNGHIDEAGGGMSKVDSDFLDLDNGWNHISDEDSVAIRDHNGNHNEYFPTSDSPQSILVSLSVACPLRGIVCKQSQLFRIKFYGTFDKPLGRYFREDLFVQTSCCESCKEPAESHVRCYTHQQGSLTISVRTLPSVKLPGELDGKVWMWHRCLRCKPKDGIPPATQRIVMSDAARGLSFGKFLELSFSNHTTANRIACCGHSLQRDCLRFYGLGSMVAVFRYSPVDILSVNLPSSVLDFAYPKAQDWVIKEAVDVCARKEHLYKEIVVKLDCIEKIVKDQNIGMKSGLHKHVADLKELVKVEWKKYDVVSGFSIIDDLQTFEPYIDVLELNRLRRELVLDIHVWDRRLYMMHSLTKENCRTVPNDAECSEKLTESLLEQSKDVTSGKHLNVENSLEQNQPSMLEVAAVSVKSSSPMMEQTNTCVSRLETNIMGDLSMHSGSTVISFAPGPCEMQSEGVLAELEAGKFLQKSQSSASNLSDRIDLAWTGSGQFVKDSSSSVEAVSFVPASLKDDPAYQKVIAPIRIKSFDSAVSSRNVDDSNASIRRSYSQRPPKAIERTGKGLSPTFLNKLSLSGMIDGESRLLLSQNDSNVIVPIYDDEPSSMIAHAMTIPEYRSFLLPLLDQNNESSLLNYGSDQPQPTTGNDSKDNHLTVSFEDEDSYSVDKAKFSVTCYFAKQFDAIRRKCCPDELDYIRSLSRCKRWSAQGGKSNVYFAKTLDDRFVIKQVTRTELDSFEDYAVDYFKYLTDSVSSGSPTCLTKVLGLYQITAKNLRDGKELKMDVMVMENLFFKRKVSRIYDLKGSLRSRYNPDTSGNNKVLLDLNLLETLHTKPIFLGSKAKRRLERAVWNDTSFLASVDVMDYSLLVGIDEERKELVMGIIDYLRQYTWDKQLETWVKATGFLGGSKDVLPTIISPDQYKKRFRKAMSKYFLALPDQWSP

SEQ ID NO: 3269 - DNA, 1035 bp, Sorghum bicolor
atgatggccacaggcgtgttgtgctgcttcagggcatcatcatcgttggccctctgcattgttttttcatgtctcctcctggccggcgtgccctcctcgcttgtggtggcgcaggacccgtcgaagctgagcctggagcactactccaagacctgccccaacgtggagcacgtcgtccggacggagatggagtgcgcggtgcgtgctgacacgcgcaacgccgcgctcatgcttcgcctccatttccatgactgcttcgtgcagggctgcgacggatcagtgctgctcgacgacacggcaaccttgatcggagagaagcaggcagagcagaacgtcaactcgctgaaaggtttcgagctggtcgacaagatcaaggagaagctggaagctgagtgccctggaaccgtttcctgcgcagacctgctggcgattgcagctagggacgccgttgtgctggttggtgggccttactgggatgtcccagtaggaaggttggactccaagaaggcgagccttgacctagcaaacaatgacatcccgactgctcagcaaggcctcctcacgctcattgccaagttctgggagaagggccttgatgccactgacatggtggccctcgtcggatcccacacgatcggattcgccaggtgcgcgaatttcagggacagagtgtacggcgacttcgagatgacgtccaagtacaacccgtcgtcggaggcgtacctgagcaagctcaaggaggtgtgcccgcgggacgacggcgacgacaacatcagcggcatggacagccacacctcggcggtgttcgacaacgcatacttcgagacgctcatcaagggcgagggcctcctcaactccgaccaggagatgtggtccagcatcgccggctactccacctccgacaccgtcaacaagtactgggccgacccggaggctttcttcaagcagttctccgattccatggtgaagatgggcaacatcacaaaccccgccggcggcgaggtcaggaagacctgcagatttgtcaacacatag

SEQ ID NO: 3270 - protein, 344 aa, Sorghum bicolor
MMATGVLCCFRASSSLALCIVFSCLLLAGVPSSLVVAQDPSKLSLEHYSKTCPNVEHVVRTEMECAVRADTRNAALMLRLHFHDCFVQGCDGSVLLDDTATLIGEKQAEQNVNSLKGFELVDKIKEKLEAECPGTVSCADLLAIAARDAVVLVGGPYWDVPVGRLDSKKASLDLANNDIPTAQQGLLTLIAKFWEKGLDATDMVALVGSHTIGFARCANFRDRVYGDFEMTSKYNPSSEAYLSKLKEVCPRDDGDDNISGMDSHTSAVFDNAYFETLIKGEGLLNSDQEMWSSIAGYSTSDTVNKYWADPEAFFKQFSDSMVKMGNITNPAGGEVRKTCRFVNT

SEQ ID NO: 3271 - DNA, 597 bp, Sorghum bicolor
atgaaccagctctctcttctccaccgcgccctccacctacatcgcctccctcccggacgcggccatggcctcaccgccaccgccgtcgtccgagctcggctctcctcctctgaacccaccccacatcagcacgcaaagcgccacctcgccgtagcacgtcctcacgagagcatcgcggcagctacggatcaggagagccaccaccacccgcgtcaagagctcgcggcgggcggcggcggcggcaggaccaggacgtgcgcgctgccgacgtgggcgctcatcggcggcatcacggcgggcgtggccgtggcgctggcgctgtctgcggggccgggggccggccccgccctggcgctggggccgccggagggccccctggtggaggagttctgggacaacatgcggcggtacgcgctgtacgtggtgacggtgagcaccggggtggcgtacgcggtgctgcagcccatcgtggagctgctcaagaaccccgtcaccgcgctgctcatcgtcgccgtcctcgccggcagcggcttcctcgtctcgcaggtgctcaatgccatggtcggcaactccgacttcatctacaggtacgagtag

SEQ ID NO: 3272 - protein, 198 aa, Sorghum bicolor
MNQLSLLHRALHLHRLPPGRGHGLTATAVVRARLSSSEPTPHQHAKRHLAVARPHESIAAATDQESHHHPRQELAAGGGGGRTRTCALPTWALIGGITAGVAVALALSAGPGAGPALALGPPEGPLVEEFWDNMRRYALYVVTVSTGVAYAVLQPIVELLKNPVTALLIVAVLAGSGFLVSQVLNAMVGNSDFIYRYE

SEQ ID NO: 3273 - DNA, 1542 bp, Sorghum bicolor
atggggtggaaggtggcgtcagggggtaaggcggcggccccggcggcgcccggcggcgacaagctcaggttccctccctcctcctccgccgccgccgcgcggtcgcggatgaagctctggctcgtgcgcgccaccaccacggtgctgctctggacctgcgtcgtgcagctcaccgccgtcggggatacctggggcccaagggtgctcaagggctggccatcctgcctcacgccgcacgacgaggaggcggccgccgccgccgcgcgcccgcggcatcctctcgtcgtcgacagggccgccgcgctgccgctgccgcccaaaagaatatataggaacaatggttacttgatggtgtcttgcaacggtgggcttaaccaaatgagagctgcaatatgtgatatggttgtaattgcaagatatttgaatgtaactttagttgtgccagagttggataagacttcattttggaatgatccaagtgagttccaagatatatttgatgtcgagcactttataacctcattacgaggtgaagttcgcattctgagagaattacccccaagggtaaagagaagagttgaacttggaatgttccattccatgccaccaattagttggtctgatatctcctactatcaaaatcagattcttcctttgattcgtaagtacaaggttctccatctgaatcgaactgatgccaggctagcaaacaatggtttaccaatggagattcagaaactgcgatgccgagtaaattatgcctctctcagatttaccccacaaattgaagagttgggcaagcgagtaattagaattcttcgccaaaatggacctttcttggtgcttcatttacgttatgaaatggatatgctggccttttctggctgtactcaaggttgcagtacggaagaggcagaagaactcacaagaatgaggtatgcttatccatggtggaaagaaaaagtgattgactcagacttgaaaagaaaagatggcctttgcccattgacacctgaggagactgctcttgtcctcagagcacttgacatcgatagaagtatgcaaatatacattgctgctggggaaatatacggtggaaagcgcaggatggctgctctaacttcagcttacccgaatgtggtgaggaaggagacacttttggagccttctgatctgatgttcttccagaaccattcgtcacaaatggcagcactggattacttagtatctttagaaagtgatatatttgttccaacatatgatggcaatatggctaaagttgttgagggtcaccggagattcatgggttacaagaagacagtcttgttagaccgaaaactcattgttgagctagtggaccggtacacaaatggttctctgcgatgggatgagttctctgcattgatcaaggttgcgcacgcaaagcggatgggatcagcttcaaagaggatggtgattcctgacagacccaaggaagaggactatttctatgccaatccccaagaatgcctccaggatcgtgattttttgcaaacctcataa

SEQ ID NO: 3274 - protein, 513 aa, Sorghum bicolor
MGWKVASGGKAAAPAAPGGDKLRFPPSSSAAAARSRMKLWLVRATTTVLLWTCVVQLTAVGDTWGPRVLKGWPSCLTPHDEEAAAAAARPRHPLVVDRAAALPLPPKRIYRNNGYLMVSCNGGLNQMRAAICDMVVIARYLNVTLVVPELDKTSFWNDPSEFQDIFDVEHFITSLRGEVRILRELPPRVKRRVELGMFHSMPPISWSDISYYQNQILPLIRKYKVLHLNRTDARLANNGLPMEIQKLRCRVNYASLRFTPQIEELGKRVIRILRQNGPFLVLHLRYEMDMLAFSGCTQGCSTEEAEELTRMRYAYPWWKEKVIDSDLKRKDGLCPLTPEETALVLRALDIDRSMQIYIAAGEIYGGKRRMAALTSAYPNVVRKETLLEPSDLMFFQNHSSQMAALDYLVSLESDIFVPTYDGNMAKVVEGHRRFMGYKKTVLLDRKLIVELVDRYTNGSLRWDEFSALIKVAHAKRMGSASKRMVIPDRPKEEDYFYANPQECLQDRDFLQTS

SEQ ID NO: 3275 - DNA, 1542 bp, Sorghum bicolor; identical to SEQ ID NO: 3273

SEQ ID NO: 3276 - protein, 513 aa, Sorghum bicolor; identical to SEQ ID NO: 3274

SEQ ID NO: 3277 - DNA, 483 bp, Sorghum bicolor
atgtcgcgcgtcacagctgcggcggccctcttctacatcctcgccgtcgtcgctgccctcagcgcggccgccgaggccccggcagcgtcaccgaaggctgccactgccagagctcctgccaaggcacccgaggctgctgctgccaagaaaactcctgcccccgctaaggcccctgctgctgctgccgtcgcctccacccccacccccgccgccgccgcgcatgccccatcgccgtcgtcgtcgtcgtctaggaagtctggtccagctgcagcgccgaccaccgcctctactacaccgccttcttcttcgtccaccgacgaggagttggtcccttccccggcagccgcggcggcgacgcctgccgctgatgggcctgctgagggaccggcggctgctgatgactccggtgctgctacccttggaagcggagctgccatcgccgccggcgttgccgctgcggtcgctaccatgatcttctactga

SEQ ID NO: 3278 - protein, 160 aa, Sorghum bicolor
MSRVTAAAALFYILAVVAALSAAAEAPAASPKAATARAPAKAPEAAAAKKTPAPAKAPAAAAVASTPTPAAAAHAPSPSSSSSRKSGPAAAPTTASTTPPSSSSTDEELVPSPAAAAATPAADGPAEGPAAADDSGAATLGSGAAIAAGVAAAVATMIFY

SEQ ID NO: 3279 - DNA, 900 bp, Sorghum bicolor
atgtcttgtccgatcaatgtcgaggaagcacagggaagtcgagccatcagcgtggccgactctgctccgggcgacacgaccctggagatcagtgcgacggggaagcgcggcatcccggtgttggtggcgccggcgccgctgcacagccagagagactgtgatggccgagcccgccgcggtggcgccactgcagaggagatgatgggcagcatggggttccagggcttcctcctcctggaggcgagggacgacgacgacccggtggcgcagcgcaagaagtggttcagggagatgcgcgggtggctgatggtgctggccaccgtcgcggcgtcggtgacctaccaggccggcctgaacccgcccggcgggttctggcaggacgacaacgagcaccaccacgccggcaacccggtgctccgggacaagcactggtcgcggtacatgatcttctactacttgaacgccacggcgttcgtgacgtcgctcgtgatcatggtgctgctgatgagcgagcggttctaccacacggaggccaaggtggtggcgctcatgctcaccacctgcatcgacctcatcagcctcatcggcgcctacatcgccggcaccacccgcttcttctcctcctgcatctacatcatcgtcatcgcctgcgttgcctttgccggggtcatctacatcggagagtacgtgtgggtgatggctgaaatatgcaagttcttcatgagaaatatgccttgcatgctccagctggtgcagagcaggtggttcccggtgccggctgaggtggtgaggagtctgcagcagcagcccgaggagcgcattagccagacgagaacgacggcgaggaacaatcagcgcggtggctgctgcgcctgctgtgcgccgcgtgcggagggctga

SEQ ID NO: 3280 - protein, 299 aa, Sorghum bicolor
MSCPINVEEAQGSRAISVADSAPGDTTLEISATGKRGIPVLVAPAPLHSQRDCDGRARRGGATAEEMMGSMGFQGFLLLEARDDDDPVAQRKKWFREMRGWLMVLATVAASVTYQAGLNPPGGFWQDDNEHHHAGNPVLRDKHWSRYMIFYYLNATAFVTSLVIMVLLMSERFYHTEAKVVALMLTTCIDLISLIGAYIAGTTRFFSSCIYIIVIACVAFAGVIYIGEYVWVMAEICKFFMRNMPCMLQLVQSRWFPVPAEVVRSLQQQPEERISQTRTTARNNQRGGCCACCAPRAEG

SEQ ID NO: 3281 - DNA, 894 bp, Sorghum bicolor
atggcagagtccggtggcggcggcggcggcgtagaggacgccggctgcctgccaccgagccacacaaacaacggtggtgatggcgccggaaacctgccgccgagccacgccaacggcggtggtgatggcgccggcagcacgtgggagatagaggagctggaggagccggacgatcggccgccgcggagcgtcgccgtcgccgcggcctccaccgcgtcctccggtgccgacgacgacgtgtacgtggcggtcggcaagggcggctccagcatggccgcgctgtcctgggcgctccgacggctcaccaagccgcggagcttcgtctacctcgtgcacgtcttccccgtcgtcaccagcatccccaccccatccttaaatgtaaaatccttggagatgctctcacagcagatcgaaacttacttgaatcaagagagatcaaagaggcgacagatgctgcagaaattcttggaccagtgccgcaaatttcaggttaccgttgatgtgtacctcatcgagagcgatcagattgctaatgcaatcatcgaacttgttcctattctgcacattaaactgctagtgttaggggtttcaaagtcaaatgtgcggaagatgaagagaggaaccacaatagcaggacaggtacagaagagcacacccctctactgtgaagtcaagatcatctgcgatggcaaagaggtgacgacggagacgaccgctgacccaacaccaccactgtcaccttctcctgttaacaacaacagcagatccaacaacccgacaccaccatcatctacaccaaatcacgataaaacaggtgcaaatggtgacagaaaatacaatgaacccagagagagaaagaaaatcacaaagtttctgagatgtttctcgttatga

SEQ ID NO: 3282 - protein, 297 aa, Sorghum bicolor
MAESGGGGGGVEDAGCLPPSHTNNGGDGAGNLPPSHANGGGDGAGSTWEIEELEEPDDRPPRSVAVAAASTASSGADDDVYVAVGKGGSSMAALSWALRRLTKPRSFVYLVHVFPVVTSIPTPSLNVKSLEMLSQQIETYLNQERSKRRQMLQKFLDQCRKFQVTVDVYLIESDQIANAIIELVPILHIKLLVLGVSKSNVRKMKRGTTIAGQVQKSTPLYCEVKIICDGKEVTTETTADPTPPLSPSPVNNNSRSNNPTPPSSTPNHDKTGANGDRKYNEPRERKKITKFLRCFSL

SEQ ID NO: 3283 - DNA, 1395 bp, Sorghum bicolor
atggcatctccgtctccattattggcgctgttcgtggttgtgctgcttgctggtagtgccagctccactgttgatggtgcagatgcgcaaaggtacatagtcgtagctactagttcgctgaagccatcagaagtctgctcaggccataaagttaccccgtccaagaacggttccacgctagcactgagccaccgtcacggcccgtgctctccggtcatctccaaagagaagccttcgcatgaggaaacgctccgccgagaccaactccgtgccgcctacatccaggcaaaggtttcttctcgatacaataatgtcgccaaagagctccagcagtcggcggtgactatcccgactagctccggctactccctgggcaccacagagtacgtgatcaccgtcaccatcggcacgcccgccgtgacccaggtcatgagcatcgacacaggcagcgacgtctcgtgggtccagtgcgcgccgtgcgccgcgcagtcgtgctcctcgcagaaggacaagctgttcgatccggccatgtccgccacgtactccgccttctcctgcggctctgcccagtgcgcgcagctcggcgacgagggcaatggctgcctgaaatcgcagtgccagtacatcgtcaagtacggcgacggctccaacacggcggggacgtacggctccgacactctgagcctcacctcgtccgacgccgtcaagagcttccagttcgggtgcagccaccgcgcggccggcttcgtgggagagctggacggcctcatggggctcggtggcgacacggagtccctcgtgtcgcagacggcggcgacctacggcaaagcgttctcctactgcctcccgccgccgtcgagctccggcggcgggttcctcaccctcggcgcagcaggtggcgcgtcgtcgtcgcgctactcacacacgcccatggtgagattcagcgttcctaccttctacggcgtgttcctccagggcatcaccgtggccgggaccatgctcaacgtgccggcctcggtcttctccggcgcatccgtcgtcgactccggcaccgtcatcacgcagctgccgcccacggcgtaccaggcgctacggacggcgttcaagaaagagatgaaggcgtacccgtcggcggctccggtgggcagcctggacacctgcttcgacttcagcggcttcaacacgatcacggtgcccacggtgacactgactttctcccgtggcgccgccatggacctcgacatctccggcatcctctacgctggctgcctcgcgttcacggccacggcccatgatggcgacaccggaatcttggggaacgtgcagcagcgtacgttcgagatgctattcgatgttggaggcagaaccattggattccgctctggtgcatgctaa

SEQ ID NO: 3284 - protein, 464 aa, Sorghum bicolor
MASPSPLLALFVVVLLAGSASSTVDGADAQRYIVVATSSLKPSEVCSGHKVTPSKNGSTLALSHRHGPCSPVISKEKPSHEETLRRDQLRAAYIQAKVSSRYNNVAKELQQSAVTIPTSSGYSLGTTEYVITVTIGTPAVTQVMSIDTGSDVSWVQCAPCAAQSCSSQKDKLFDPAMSATYSAFSCGSAQCAQLGDEGNGCLKSQCQYIVKYGDGSNTAGTYGSDTLSLTSSDAVKSFQFGCSHRAAGFVGELDGLMGLGGDTESLVSQTAATYGKAFSYCLPPPSSSGGGFLTLGAAGGASSSRYSHTPMVRFSVPTFYGVFLQGITVAGTMLNVPASVFSGASVVDSGTVITQLPPTAYQALRTAFKKEMKAYPSAAPVGSLDTCFDFSGFNTITVPTVTLTFSRGAAMDLDISGILYAGCLAFTATAHDGDTGILGNVQQRTFEMLFDVGGRTIGFRSGAC

SEQ ID NO: 3285 - DNA, 1338 bp, Sorghum bicolor
atggcttctcctctgctcctgtgcattttcttgtgcttctacctctccattgttaatggagctggtaacggcagctttgtgacggtgccatccagctcttttgtgcctgatactgtttgctccggagcgttagtcaagccggagcaaaacggctccgccgtgtacgtcccgctactacaccgccacgggccgtgcgcgccgtcgctatccacagacacgccgccgtccatgtctgagatgttccggagaagccatgctcgcctgagctacatcgtcagcggaaagaaggtgagcgtcccggcccacctaggcacctccgtgaaatcgctagagtacgttgccacggtgagcttcggcacgccggcagtgccacaggtcgtcgtcatcgacaccggcagcgacctgacgtggctgcagtgcaagccgtgcagctccggccagtgctccccgcagaaggaccccttgtttgacccgagccactcgtcgacgtacagtgccgtcccctgcgcctccggcgagtgcaagaagctcgccgccgatgcgtacggcagcggctgttcgaatggccaaccgtgcgggtttgccatctcgtatgtggatggaacaagcacggtgggtgtgtacggcaaggacaagctgacgctggcgcctggggccatcgtcaaggatttttacttcggttgtggccatagcaagagctcgctgcctggcttgttcgacggcctccttgggctcggccgcttatcggagtcgctcggcgcacagtacggcggtggtggtggcttctcgtactgcctccctgcggtgaacagcaagcctgggtttcttgcctttggtgcggggaggaatccatccggcttcgtcttcacgccgatgggcagggtccccggacagccaacgttttccacggtgacgctcgccgggatcactgtcggcggcaaaaagcttgacctccggccgtcggcgttcagcgggggcatgatcgttgactccggtaccgtcgtcactgtcctccagtcgacggtgtaccgggcactgcgggcggcattcagagaggccatgaaggcataccggctggtacatggtgacctcgacacttgctacgacttgacaggttacaagaatgtcgttgtgcccaagattgccctgacgttcagtggtggagccactatcaacctggatgttcccaacggaattctggtgaatggctgcctcgcttttgcggagaccgggaaggatggtaccgccggagtactcggcaatgtgaatcagcgaacgtttgaggtgttgttcgacaccagtgctagtaaattcggcttccgggctaaggcctgctga

SEQ ID NO: 3286 - protein, 445 aa, Sorghum bicolor
MASPLLLCIFLCFYLSIVNGAGNGSFVTVPSSSFVPDTVCSGALVKPEQNGSAVYVPLLHRHGPCAPSLSTDTPPSMSEMFRRSHARLSYIVSGKKVSVPAHLGTSVKSLEYVATVSFGTPAVPQVVVIDTGSDLTWLQCKPCSSGQCSPQKDPLFDPSHSSTYSAVPCASGECKKLAADAYGSGCSNGQPCGFAISYVDGTSTVGVYGKDKLTLAPGAIVKDFYFGCGHSKSSLPGLFDGLLGLGRLSESLGAQYGGGGGFSYCLPAVNSKPGFLAFGAGRNPSGFVFTPMGRVPGQPTFSTVTLAGITVGGKKLDLRPSAFSGGMIVDSGTVVTVLQSTVYRALRAAFREAMKAYRLVHGDLDTCYDLTGYKNVVVPKIALTFSGGATINLDVPNGILVNGCLAFAETGKDGTAGVLGNVNQRTFEVLFDTSASKFGFRAKAC

SEQ ID NO: 3287 - DNA, 1086 bp, Sorghum bicolor
atgtcatcagcgatggcggcggcgagtgaagcggcgtatggcggaggcgtgcagaaggggtccctgcagcagcaccaggcgccgcagcctagccccggctcggtcttctacacccctgacggcatcgccgtctacgcgaaaccggccatcccgccgttctaccaacagtccgcgggcagcaatgccatcgtgccggcggctccggggctagctcattcctccgccacttctgagcccttcaagcgcaagcgcgggcgcccgcgcaagtacggccccgcggacggcgccgtgcccctggctatcgtgcccccgtcgcagccacccactgctgctgccccagctgcctctgaggcgtcacccacgattcctcctggcttcgctccaagcccgcagggtggtggcgtggtgagtccccaggcctcaccggcgccgcagccgccggcggcgtcaggtgctcccgctgtcaagaagcggggccggccgccgggcccctccagcaagaagcaacagccgcaggcggcagcgcctggaccaggctgggctggatggaagcctcatattttcacagtccaagctggagaggatgtagcatcaagagtcatgtcattttctgggaatggatgggcagtttgtatcctcacagccaatggcgctgtatctaatgtgaccctgcgtcaaggagagtcttctggtggaacagtaacttatgagggccgttttgagattctctctttggctgggtcatatcttctgtcagaaagtgctggcatgagcagtcgaacaggtggacttagtgtttctcttgctggtcctgatgggcgtgttttaggtggtgctgtagcaggacctctaactgcagcttcgccagttcaggtggtcattgggagctttctggctgatacaaaaatggagcttgaccctggatcagcacccgaaaaacatgcttttggaagatttccaactgccagcagtccatctaggggtactgaatccttgggtgggcatgcaagcccaccaaacaccacaggctccttcagcaccagcacacagccaccaggcttcccaagcttccccccgtggaaatga

SEQ ID NO: 3288 - protein, 361 aa, Sorghum bicolor
MSSAMAAASEAAYGGGVQKGSLQQHQAPQPSPGSVFYTPDGIAVYAKPAIPPFYQQSAGSNAIVPAAPGLAHSSATSEPFKRKRGRPRKYGPADGAVPLAIVPPSQPPTAAAPAASEASPTIPPGFAPSPQGGGVVSPQASPAPQPPAASGAPAVKKRGRPPGPSSKKQQPQAAAPGPGWAGWKPHIFTVQAGEDVASRVMSFSGNGWAVCILTANGAVSNVTLRQGESSGGTVTYEGRFEILSLAGSYLLSESAGMSSRTGGLSVSLAGPDGRVLGGAVAGPLTAASPVQVVIGSFLADTKMELDPGSAPEKHAFGRFPTASSPSRGTESLGGHASPPNTTGSFSTSTQPPGFPSFPPWK

SEQ ID NO: 3289 - DNA, 999 bp, Sorghum bicolor
atgggcgcagatggcgggctgaaccgggcggcggagaagccccgggatggggagggcggggaagcgagggtgttccggtgcacggactactcgctgccgcggacgacgctggcgctgacgctctggctgggcggcatccacttcaacgtccttcttgttcttgcgtcgctcttcctcctctcccgccgcgccgctgccatagtggtggcgttccagctcttcttcatgttcgcgcccgtcaacgacagggacaaatggggccggagcgtcgccaggttcatatgcagacacgcaatgggctacttccctatcagtctgcatgtggaggactacaagtccttcgatcccagcagggcttacgtgtttggttatgagccgcactcagtgctgccgataggtctgtcagctcttgctgatcttgttgggtttatgcctctcactaagatcaagatccttgcgagcagtgcggtgttctacaccccattcttgagacagatttggacgtggcttggattggtacctgcgacaaggaagaatttctactactaccttggagctggttatagttgtatggtagtccctggtggtgtacgggaaatgcttcacatgaacaatgattcagaggttgcatttcttaaaacaagaaaagggtttgtcaagatagctatgcagtccggatgccctttagtcccagttttctgctttgggcagagctatgcatacaagtggtggcggccaggtggcaaattgtttatcaagattgctagagcagttaaatttactcctattatcttctggggtagatttggcacaccattccccttcccaagacccatgcatgtggtcgtgggtaaacctattgaagtcaataagaatccccagcccacgattgatgagattaatgaagtgcatgaacagttcatcattgccctgcgggacctgtttgagaagtataaggggaaagctggatatcctggccttcatctaagagtcctatga

SEQ ID NO: 3290 - protein, 332 aa, Sorghum bicolor
MGADGGLNRAAEKPRDGEGGEARVFRCTDYSLPRTTLALTLWLGGIHFNVLLVLASLFLLSRRAAAIVVAFQLFFMFAPVNDRDKWGRSVARFICRHAMGYFPISLHVEDYKSFDPSRAYVFGYEPHSVLPIGLSALADLVGFMPLTKIKILASSAVFYTPFLRQIWTWLGLVPATRKNFYYYLGAGYSCMVVPGGVREMLHMNNDSEVAFLKTRKGFVKIAMQSGCPLVPVFCFGQSYAYKWWRPGGKLFIKIARAVKFTPIIFWGRFGTPFPFPRPMHVVVGKPIEVNKNPQPTIDEINEVHEQFIIALRDLFEKYKGKAGYPGLHLRVL

SEQ ID NO: 3291 - DNA, 285 bp, Sorghum bicolor
tcccgccgaagaagctctcccattgctgccgccttctccctggcttcacaatctgcccacgctgcgagggaggggcaggtcatggaggcgcccaggccgagctccaggcgtccttggaagcccacgtgcttgtactacacccagggcaagtgcacaatgggcccttgccttgaggtcctccccccactgagcctgctgaacgagaacctgtgcggggacatcagcatgacaccatggccacggggctccaggcagcatgcagtagggataggagcaggggaataa

SEQ ID NO: 3292 - protein, 94 aa, Sorghum bicolor
SRRRSSPIAAAFSLASQSAHAAREGQVMEAPRPSSRRPWKPTCLYYTQGKCTMGPCLEVLPPLSLLNENLCGDISMTPWPRGSRQHAVGIGAGE

SEQ ID NO: 3293 - DNA, 432 bp, Sorghum bicolor
atggaccggaggatatccaaggaggacggcgaggcggtgaagccgacgaggagcttccgctacgaggactacagcaccaggcgtgtgttcctgcgcagctacccgctgcagtgggactggtcgcccgcgcaggacgacgacgacgacgacgacaaggacggcctgagccacgcggaggctgcggccgggaacagggcggatcatgccgacggcgacgagtgctgcggcggcgccggcagcaggcggtggaagaggcaggtggtggcggccgtgaccgagtggggggaagacaagctgctgctgctccggagggccaagaagcgcctggcgctctacctgatcggctgccacaaccacggccatggccgccgcgcgctgcccttcccgtcggccggcggatcctgcaccgtcgccatgctcacctccagatga

SEQ ID NO: 3294 - protein, 143 aa, Sorghum bicolor
MDRRISKEDGEAVKPTRSFRYEDYSTRRVFLRSYPLQWDWSPAQDDDDDDDKDGLSHAEAAAGNRADHADGDECCGGAGSRRWKRQVVAAVTEWGEDKLLLLRRAKKRLALYLIGCHNHGHGRRALPFPSAGGSCTVAMLTSR

SEQ ID NO: 3295 - DNA, 444 bp, Sorghum bicolor
atggcagccaagatgtttgcattgtttgcactcctagctctttgtgcaagcgccacaagtgcgacccatattccagggcacttgccactagtgatgccattgggtaccatgaacccatgcacgcagtactgcatgatgcaacagaggtttgccagattgttagcgtggccaatcccgatgctacagcaactgttggccttaccgcttcagccggcgtatcagacgccaatgatgatgccgaacatgatgccaccaatgatgatgaggccgacgatgatgccaccaatgacgatgatgccgagcatgatgtcattgccacaatgtcactgtgatgccatctcccagattatgcagcaacagcagttaccattcatgttcaacccaacagccatggcgatcccacccatgttcttacagcaacccttcgttagttctgcattctag

SEQ ID NO: 3296 - protein, 147 aa, Sorghum bicolor
MAAKMFALFALLALCASATSATHIPGHLPLVMPLGTMNPCTQYCMMQQRFARLLAWPIPMLQQLLALPLQPAYQTPMMMPNMMPPMMMRPTMMPPMTMMPSMMSLPQCHCDAISQIMQQQQLPFMFNPTAMAIPPMFLQQPFVSSAF

SEQ ID NO: 3297 - DNA, 426 bp, Sorghum bicolor
atgccgatggccgcggcttcgccggagaagctccactgcggcgaggtggggaccggtgacgaagaaaaggaggacgcggagagggctgatgccgaggtgatagcgcagcaactgtcgaatcaatcgctgcgggagaaggcacagcgcctccagggcctgctcaccgaaggcacgtccgaacgcctccctgaccgcggtaggaagctgcgcgccacactcgttgccatctaccgggagcaagaccgccgccaggcccgaggcgacagggcacgagcgccgggcaatgaagcatgtgaaaggagagtccgatcgaggtgtattgaatcatcggtgacctcagtagagttgaagtatcagtggctgatttcatgtcttcatttggagcggataaagaggcaggcatcaacatatctagtttgggaataa

SEQ ID NO: 3298 - protein, 141 aa, Sorghum bicolor
MPMAAASPEKLHCGEVGTGDEEKEDAERADAEVIAQQLSNQSLREKAQRLQGLLTEGTSERLPDRGRKLRATLVAIYREQDRRQARGDRARAPGNEACERRVRSRCIESSVTSVELKYQWLISCLHLERIKRQASTYLVWE

SEQ ID NO: 3299 - DNA, 2739 bp, Sorghum bicolor
atgaaagggcgcgtggtgaagctccgtgaggcgcacaaggcaggctcgccggccctctgttccgcctcctggggccccagcgggcaacatgtcgtcaccgcttctgctgccgacactgccgtcctcatccacgacgccgccacggtgctcgccggcggccggggctcgggttcgtcgccgttggctactatccgtctccacaaagacggcgtcactgcactcgcagtcgcgccgggccccagcggctctctggcatcgggatccatggaccactccatcaagttctacaccttcccagagggggagttccagagcaatgtcgcccgattcaccctgccgattcgatcgctcgcctttaacaaaaaaggcaccctgctggcggccgcaggcgacgacgacggcatcaagctgatcgcgaccattgacaacaccatctcgaaggtgctcaagggacacaagggctccgtcactgggctggcgttcgacccgaagaacgattacctagcatccgtcgacagcttcggtaccgtcatctattgggatctttgcattggtggtgaggtccgtactttgacgcgtgttgctcccacatttcggtcggataactcggtcaggaatgttctgtgctggagccctgatggtcagacccttgctgtgcctgggttgaggaacaatgtggtgctgtatgatagggacacaggggaggaggtgtgcacactatatggagatcatgaacaaccagtgagcagcctttgctggtctcccaatgggagatatctggccagtgctggcctggataggcaggtgctcatctgggatgtgaagtcaaggcaggacatcgagaggcagaagtttgacgataggatatgcagcttggcttggaaaccaaatggaaatgctttacttctgattgatgtcatgggcagggttggcatttgggaatcagtcataccttcgactatgaagtcacctaacgagggcatacctgatctcaactctactaaggctcctctatttgacgatgatgacgaggacgaggacgaggagaagccaagtacctctggtggcttggaggatgatattgatgaaactcttagtgattcaacacctttcagccacaagagaccaaggaggaagtccacattcgacagagatagtgataatgaggatttaatacatcaaatggaatcgaccaaaagaatgaaagataagcataataaaaaagaggatgctggaaaggcaagaggtgattctgccacttcagcaaggctagttactgcaagaatgcaagctgctttccagcctggctcaacaccacctcagcctggcatgcgaaatttcctcgcttacaacatgcttggaagtattactactattgaaaatgagggacattcacatgtggaggttgacttccatgacacaggaagaggacctagagttccttccatgacagactattttggtttcacaatggctgcaatgaatggatcaggaagtgtgtttgcaaatcaatgcaagggtgacaagaatatgagcactctaatgtaccgcccttttggtagctgggctggtaacagtgagtggtcaatgagatttgagggggaagaagtgaaggctgtggctcttggtgctggatgggttgctgcagtcacaagcttaaattttttgcgcattttcaccgaaggaggcttgcagatgcatatcctctcagtcagtggcccggttgttacagcagcaggttatgaagaccagctagctattgtgtcacatgcttctgattgtctgccctcaggggatcaggtgctggatgttaaagtattcaacatatctgaaggggcacaatcaatgtctggtcgtcttgttttgacaccattgtctcaattatcttggtttggattcagtgagaatggccaacttagttcatatgattccaagggaatactgagggttttttccagtcagttcggtggaagttggcttccattatttagttcggtgaaggcaagaaaatccgaagatgaaagccattgggtggtcggtttggatgcaaataatatattctgcattgtatgcaaaacccctcaatcttatccacaggtaatgcccaagcctgtgctaagcatacttcatctgtcatttccccttgcgtcatcagaccttggggctaatagtttggaaaatgagttcttgatgaggaagttacagctctcacaggagaggatgttaaataataaaataatagctgggacaggaggattttgctccaatgctacaatcacgacgaatacaccagtgctgaccactcaggcaactgtaccttctaagtttatgcaagatgggaacagttcgctggaattttcgttacccaaaccgaatcttgtcaatcaacaatgcagttcaactgaaccaaagaagtcagcaggagaacaagggattgaaattaaggatagtgctcgaaaggtttcatctgcttttattccatctgccaaagtacctaaaagcagtgaaacaaagaaacatagaaatggagcatccaatgcagctgtagtcgaccagaatcaggaaggaggcattgatcatactggtgcaaaaaaaatgagcactgaatactgcaatcgagcagagcctcagcggccagttaacccttttgcaaaatcatcttccagcaaagaacagtcatcatcccttttggattccataaaaaaaatgaaagttgacaaacccaatggtagaatttga

SEQ ID NO: 3300 - protein, 912 aa, Sorghum bicolor
MKGRVVKLREAHKAGSPALCSASWGPSGQHVVTASAADTAVLIHDAATVLAGGRGSGSSPLATIRLHKDGVTALAVAPGPSGSLASGSMDHSIKFYTFPEGEFQSNVARFTLPIRSLAFNKKGTLLAAAGDDDGIKLIATIDNTISKVLKGHKGSVTGLAFDPKNDYLASVDSFGTVIYWDLCIGGEVRTLTRVAPTFRSDNSVRNVLCWSPDGQTLAVPGLRNNVVLYDRDTGEEVCTLYGDHEQPVSSLCWSPNGRYLASAGLDRQVLIWDVKSRQDIERQKFDDRICSLAWKPNGNALLLIDVMGRVGIWESVIPSTMKSPNEGIPDLNSTKAPLFDDDDEDEDEEKPSTSGGLEDDIDETLSDSTPFSHKRPRRKSTFDRDSDNEDLIHQMESTKRMKDKHNKKEDAGKARGDSATSARLVTARMQAAFQPGSTPPQPGMRNFLAYNMLGSITTIENEGHSHVEVDFHDTGRGPRVPSMTDYFGFTMAAMNGSGSVFANQCKGDKNMSTLMYRPFGSWAGNSEWSMRFEGEEVKAVALGAGWVAAVTSLNFLRIFTEGGLQMHILSVSGPVVTAAGYEDQLAIVSHASDCLPSGDQVLDVKVFNISEGAQSMSGRLVLTPLSQLSWFGFSENGQLSSYDSKGILRVFSSQFGGSWLPLFSSVKARKSEDESHWVVGLDANNIFCIVCKTPQSYPQVMPKPVLSILHLSFPLASSDLGANSLENEFLMRKLQLSQERMLNNKIIAGTGGFCSNATITTNTPVLTTQATVPSKFMQDGNSSLEFSLPKPNLVNQQCSSTEPKKSAGEQGIEIKDSARKVSSAFIPSAKVPKSSETKKHRNGASNAAVVDQNQEGGIDHTGAKKMSTEYCNRAEPQRPVNPFAKSSSSKEQSSSLLDSIKKMKVDKPNGRI

SEQ ID NO: 3301 - DNA, 2736 bp, Sorghum bicolor
atgaagtgccactctgtgtccgcgctctggtcgccgtcaccgccgtcacaccacgtcaccgccgccgccgcaaccccggccgcgctcttcaccggcgccgcagacggcaccgtcctccactggccactggcgcccgcctcagcttccccatccccgcgcccgtcttccctcctctgcgcccacgctgccgccatcacctccctctgcccactcccctcaccggcctcccttctcgccgcctgcaccgcgggagtgctctccctcttctccacctccgcacccctccgctgcctccgccgccgctccctcccgccctgggccggctcaccctccctcgtcgctccgctcccgtccatcacctcctcccaccctcgcgtcgcgatcctctgccacgcccctgatgacggccaccgtcacgtgtcagccctcgtggtcgtcgacgcgcgtaccctcgccgtcctctacaccgtcttccatgggatcctctcggtcgggactccgagggcgatcgcggttagtagcgccggtgatgatgcagtcagcgttgtgctggctgacgcgcagggtcgcgtgcaggtgatgcccgtggcagagggcgcggctgtagaagtggactcacccaggcgtctcagcgtgagctcggtgtccagcgtcgcgtctgcggagatggcggacgggagggtggaggccttggcattgtctaatgatgggaagcatgtggctttagtgctgaagaccagatgtttgttgaaatgcgtcactgagggggctgtgctcggggaggtctctctactgggtacatctctttgcaaggacgaaaacacagtagacaagttatgcactgctggagcttttttcctcagcggtgatgaatgggatgctcatgtttcggatgacggcgttgtggttaggaacttggtgttgtggagtagcaatggtgctgccacaatgtacagggttgctcttggtagctcatactttgagtctgaggtagtgtgtcaaattcctagcaacttatctatgcaaggagagggactggaaattaaattttgccggtcagaccggcatcttgttagggttgaatctcgcttttatatggtcgctgggtcattgttgtggaaaccaacagtcctccatatggttctattgggaatccagttagaactgaataaaacagtgaatacgcagaccaacctacctatgagtgccagaaaaaattggccatttggagaagtgtatggtttccataatggtgacatagaagttatccgatttctgaacttgtcacctgctgctgcaaaatttggtggtggagggatttacccacatatttcagagaggttatttttggggcacaagagagcaattctttgcttggctgcacattacatgcatgcccactctgactctagaaacttccaccgagcactcatatcagggagtttagattgtacagttcgtgtctgggatctagatgctggcacccttctttctgtgatgcatcatcatgttggttcagttaagcaaatcatactaccacctccgtggacataccacccttgggatgactgcttcctttctgttggagaagatggccttgtggcacttgtttcacttcaaaccatgcgtgttgagaggatgtttcctggccatccgggttatgcatcattggtagcttgggagggagtaaaagggtacatagcttgtttatgcaagaatctccactcttgcaatgatgcaggtagcggattatatatttgggatctgaaaactggtgctcgagaacgtgttatcaatggcactgcttctcagtcagcgtttgagcacttctgcagtggtatatcaaaaaatgcagttactggcagcatcttaggaggaacaacttcagcatcttccttacttgttccaatttttaaagacacgagccaccttcggtctcatgcagataaaagtggtcatgatatttcatctgtgtcaaccaaccttcacaatggaagtacagtttccgtgactgtaaatgcacctacaacatatgattttaaggggaagacgccagctccagatgaagctcatgaattccatggagataattctggatacaattcaggaaaggctgtttcttcccacagtgttcataataaaaaaataaagtgcccaataaagtgctcttgcccctatcctggcattgcaagtctgagatttgacctcacggcaatcatgtcaacacaaggcatgacaaacatcaatagtgataggcagttgaaagatcatctccatagcgagaatcctaaagaaatattgcagcctggaacttcagatagtccttctcgtgttcatgaaatggatagcccctctagagagtcactggaagggcgtttacttcgatttagcctctgttttttgcatttatgggatgttgattgcgagctagacaaattgcttgtagacgagatgcaagtttggaagccagaaggctgccatatagcaactggggtggtaggagacagaggctcatttacattgatgttcccaggcaaagaagccacacttgagctttggaagtcttcagctgaattttgtgccatgaggtcactgtctatagtgtctcttgctcaacgcatgattacattatctcgttcttgtacaaatgctagcagggtaaatctcatttacaaccctaagctattgtcaaagtctgattttttgaccatagagcaaaaccatactatgtgttag

SEQ ID NO: 3302 - protein, 911 aa, Sorghum bicolor
MKCHSVSALWSPSPPSHHVTAAAATPAALFTGAADGTVLHWPLAPASASPSPRPSSLLCAHAAAITSLCPLPSPASLLAACTAGVLSLFSTSAPLRCLRRRSLPPWAGSPSLVAPLPSITSSHPRVAILCHAPDDGHRHVSALVVVDARTLAVLYTVFHGILSVGTPRAIAVSSAGDDAVSVVLADAQGRVQVMPVAEGAAVEVDSPRRLSVSSVSSVASAEMADGRVEALALSNDGKHVALVLKTRCLLKCVTEGAVLGEVSLLGTSLCKDENTVDKLCTAGAFFLSGDEWDAHVSDDGVVVRNLVLWSSNGAATMYRVALGSSYFESEVVCQIPSNLSMQGEGLEIKFCRSDRHLVRVESRFYMVAGSLLWKPTVLHMVLLGIQLELNKTVNTQTNLPMSARKNWPFGEVYGFHNGDIEVIRFLNLSPAAAKFGGGGIYPHISERLFLGHKRAILCLAAHYMHAHSDSRNFHRALISGSLDCTVRVWDLDAGTLLSVMHHHVGSVKQIILPPPWTYHPWDDCFLSVGEDGLVALVSLQTMRVERMFPGHPGYASLVAWEGVKGYIACLCKNLHSCNDAGSGLYIWDLKTGARERVINGTASQSAFEHFCSGISKNAVTGSILGGTTSASSLLVPIFKDTSHLRSHADKSGHDISSVSTNLHNGSTVSVTVNAPTTYDFKGKTPAPDEAHEFHGDNSGYNSGKAVSSHSVHNKKIKCPIKCSCPYPGIASLRFDLTAIMSTQGMTNINSDRQLKDHLHSENPKEILQPGTSDSPSRVHEMDSPSRESLEGRLLRFSLCFLHLWDVDCELDKLLVDEMQVWKPEGCHIATGVVGDRGSFTLMFPGKEATLELWKSSAEFCAMRSLSIVSLAQRMITLSRSCTNASRVNLIYNPKLLSKSDFLTIEQNHTMC

SEQ ID NO: 3303 - DNA, 2142 bp, Sorghum bicolor
atggaggtggagccaccaccagctgccgcggccgctgtaggagcagcccttctgaaatgccgcggcaacggtgccggcggggagccaacggtcgaggcctttggtaaggcggggtcgaggagcccgagccgcgcggccccgcggggacctccacaagaaccgaacggcacccccgggccaagtcaccgccgcggggaggaggaggaagaggagccgctgcggcgggggctcgcggcggctcaggcgcgggcacgggcgcggcggaaggcggggcacgccacgccgtcgccgtcctggaagctggaaccgtcgccgccgcggccggaggatgaggcgctggccgaggcggattcgggagcggggaggaggggcgcgccggccgcgtcggcgcggcagctgggcgccaccctgtgggagatccaagacgtcatccgggccgccggcgcgggccgacggatccggcgccgcgggcggagggcgcccaccgccgatgacgcgagtgcggatgcggatcggccacggagttcaggtggctttggagcacaaattgcagcttcagtcatcgagcatgagaagttacatgaagaaagatgtcactcaagacagcctctttctcctgcaagttacactagctctgttggggcaaccacaataaaccttatcagccctactcggtcgttggattgcaatgccagatttaggcagccaggtaatgatattaaaacgtcaacagagctactgaaagttctcaatcgaatatggagcttggaagaacagcatgcagctgatgtgtcagcaatgaagggattgaaacgagagttgcatcatgcccaggcatgcattcaagaacttatgcaagagaggcagcggtatcatcacgaaattgattcactagccaggcaagtcactgaagacaaaatggctcgaaggagcaaggaccaagagaagatgagagcagcccttcggtccctgcaagaggaacttgaagatgagagacgtctaaggaaacattctgagactctccataggaagctaggcaaagagctatctgagatgaaatcagcattttgcaaggctgtgaaggctctggaaaaagagaagaagacaacctgcctgttggaagatctttgtgatgagtttgcgaaaggaatcagaaactatgaggaggaagtcaggttgttaaagcaaaagcatgtaaaggagtatgaacacaagtttgacaagtctgtagttcatatttcagaagcatggcttgatgagcgaatgcagatgcataagactaatatgcgggcagatttgtctgggaaaacctcaatcacagagcggctgagcagtgaaattgagggttttcttcatcatgctaaagggctaggttataccaagaatgataacttagacaatggtaatgaaaagcgtgatgcaagtttgtgccggcagtcccttgagtcggtccatctgaatggagccactagtgcccctcagctagctgaagatgatgatggtagttctattgccagtgacttacattgctttgaactgaacatgcatggaggtgccattaggaatcatgaccttgcaggaactcgaaggagggttacaggttgcatgcattcaccaatgcgaaggctggaatattccaatggcatatctgtcgaaggttcaccgatgtcaaatgcaccaccttgcccaaagaaagaaaagacaaggtctagcgttagcagacaacaatttatcacctcaacaccagaaattagctcacgcaatgatgctagccttgctcctgcagatgagcagaacgaaactgtcatgacccaagtctctaggcgattacgtgacgacctgttgaagatcaaatcagaggctcctcaacatgcctatctagggcaaaaatcaaaccagccccggacaaatcaatttcatgaatctacttcacgggatctttgtgatgtgcgcagtccagcacggcatctgaataacccagcccagtccttgggttacgagacatctgaacccccagctcatcagctcataggcacaaaggagaacactctgaaggcgaaactactgcaagcaaggctagaggggcagcacgctcgactgagcgcatcagtattccccttgatcagcacaagaaggaaatga

SEQ ID NO: 3304 - protein, 713 aa, Sorghum bicolor
MEVEPPPAAAAAVGAALLKCRGNGAGGEPTVEAFGKAGSRSPSRAAPRGPPQEPNGTPGPSHRRGEEEEEEPLRRGLAAAQARARARRKAGHATPSPSWKLEPSPPRPEDEALAEADSGAGRRGAPAASARQLGATLWEIQDVIRAAGAGRRIRRRGRRAPTADDASADADRPRSSGGFGAQIAASVIEHEKLHEERCHSRQPLSPASYTSSVGATTINLISPTRSLDCNARFRQPGNDIKTSTELLKVLNRIWSLEEQHAADVSAMKGLKRELHHAQACIQELMQERQRYHHEIDSLARQVTEDKMARRSKDQEKMRAALRSLQEELEDERRLRKHSETLHRKLGKELSEMKSAFCKAVKALEKEKKTTCLLEDLCDEFAKGIRNYEEEVRLLKQKHVKEYEHKFDKSVVHISEAWLDERMQMHKTNMRADLSGKTSITERLSSEIEGFLHHAKGLGYTKNDNLDNGNEKRDASLCRQSLESVHLNGATSAPQLAEDDDGSSIASDLHCFELNMHGGAIRNHDLAGTRRRVTGCMHSPMRRLEYSNGISVEGSPMSNAPPCPKKEKTRSSVSRQQFITSTPEISSRNDASLAPADEQNETVMTQVSRRLRDDLLKIKSEAPQHAYLGQKSNQPRTNQFHESTSRDLCDVRSPARHLNNPAQSLGYETSEPPAHQLIGTKENTLKAKLLQARLEGQHARLSASVFPLISTRRK

SEQ ID NO: 3305 - DNA, 2391 bp, Sorghum bicolor
atggaaggcgaggcggcggcggcggcggccgaggcggtggcgcggatacggctggtgcggtgccccaagtgcgacaagttcttaccggaactgcctgcctactccgtctacgtctgcggcggatgcggcgccaccctccaagcaaagaagaagaattcagcccaatcgtcacatgacgctgacaatggaaatgtgaaataccttgaagtactggagcgtgttccagaggcatctgcaagaaaacatggagctagtactactgataggtcagaaaccagtaaaatggcagatgtacatatcaaacaagtttattatggccatcacgatagcattcagactgggccaagtccctcaaatctgaacgcttctattagagatgatggcaaggaggcaaagtaccgacacattcgttattgggagaatggtgaaatggggcaatcattgagagtaagagacatgtccccaaagtcaccagccaatgcttatcagggtgagtgccattcgaagctgaggtacaactattctgctaaggaatgcccaggtgaaagaaatttggatggtccaagcagagtgagggggcttgagaaagaccgcactgagatcttaaggatgcttgatgagttgagagaccaggtacagcaatcttgcgatgcaactaatgggccaagtggaagtgccccaactactacagcagcagattcccacatttcatatggtacttctgaccgattgaatcaattgaggcatattccaccacaattgcatcggaatgattcacatcacaccccatcattgaatgtacaaagtcctagtgtttctcgtgtttatgctcccctgcctgcacaacaagattgtgtcggatatgcagagctcatttcacatgctagacgctctagctatcctgccagcctctatccatggagaaattttgataattatttctttggacagcatgatcctgattctcttctctcttgccgccatgatggcttctatcaccaagctgcctgttcttgcttgcattgttgccaccaagaattcttgcctgtacagggaaatcacatgggcttcaatgatcaaagggcaccatatcttctgaacggttatggggcttatcctgtggacagtcccttacttggtcagcaaagatacagtagaagagccatcaatactaccttgcagcagaatcacatgagggtcaacgttagcaagaagcctgcacagacttgtgagccggtcgcaggtggtgcccctttcaccatatgctgcaattgctatgaagttctgcagataccaaggaaacagtccctgtcaggaaatgagtacaaattgcgttgtggatcatgctcacatgcaattctagtcaagcttgatggaaacaggctcaatgtatcagaaattgcactaggtacacatttatctgatggacaggaaaatgacatgggaaccgatgggcaaactccggacaataggtccattccagcttatcgtttttctgttggaagtcctgcatctcaagaaaaagacctgcactcaaatttgagtgagtcagagaacaaccatacccctctagcaactgactcagagggcacttcccagtccagggatcttcctcctgaagacagtgcagtttcccatgtaccaaacttaccacatcgtagtcattctggatcatctccatcagaacattctggagtgggaagtagaagtacacattctgaacctgaaaaagttataccattaactgaaacttccaagcagaattcagttaaaggtatatgtgtatcaaacaagatgcaatctccaaacaatgagtttgatgttactgaatacacagatgatacattaaatgcgcagcaagatactgagcaccctaaagcaacaaaggacaacaattcttttctcactaatctgataaaaaagagcttcaaaattaataatggaatgcgcaacggaagagcaaggatttatgtaaatggctttcctatctctgatcgtgcggtcaggaaggctgagaagctagctggatcaatctgccctggaaactattggtatgactaccatgctgggttctggggtgttatgggacgtccctgccttggcatgataccaccttatattccagaatttaatttccccatgcccaagaactgtgctggcggaaacacaggcgtatttgttaatggaagagaacttcaccagaaggatttggatttacttgtcactagaggactctctgattcccctggtagatcttatgtagttgaaaattctggaaaggtttcagatgaagtatctggtgaagaactttatggccttggaaaacttgcaccaacagttgagaaaatggggcgtggatttggcatgcgcgtcccaaggttcatccagtga

SEQ ID NO: 3306 - protein, 796 aa, Sorghum bicolor
MEGEAAAAAAEAVARIRLVRCPKCDKFLPELPAYSVYVCGGCGATLQAKKKNSAQSSHDADNGNVKYLEVLERVPEASARKHGASTTDRSETSKMADVHIKQVYYGHHDSIQTGPSPSNLNASIRDDGKEAKYRHIRYWENGEMGQSLRVRDMSPKSPANAYQGECHSKLRYNYSAKECPGERNLDGPSRVRGLEKDRTEILRMLDELRDQVQQSCDATNGPSGSAPTTTAADSHISYGTSDRLNQLRHIPPQLHRNDSHHTPSLNVQSPSVSRVYAPLPAQQDCVGYAELISHARRSSYPASLYPWRNFDNYFFGQHDPDSLLSCRHDGFYHQAACSCLHCCHQEFLPVQGNHMGFNDQRAPYLLNGYGAYPVDSPLLGQQRYSRRAINTTLQQNHMRVNVSKKPAQTCEPVAGGAPFTICCNCYEVLQIPRKQSLSGNEYKLRCGSCSHAILVKLDGNRLNVSEIALGTHLSDGQENDMGTDGQTPDNRSIPAYRFSVGSPASQEKDLHSNLSESENNHTPLATDSEGTSQSRDLPPEDSAVSHVPNLPHRSHSGSSPSEHSGVGSRSTHSEPEKVIPLTETSKQNSVKGICVSNKMQSPNNEFDVTEYTDDTLNAQQDTEHPKATKDNNSFLTNLIKKSFKINNGMRNGRARIYVNGFPISDRAVRKAEKLAGSICPGNYWYDYHAGFWGVMGRPCLGMIPPYIPEFNFPMPKNCAGGNTGVFVNGRELHQKDLDLLVTRGLSDSPGRSYVVENSGKVSDEVSGEELYGLGKLAPTVEKMGRGFGMRVPRFIQ

SEQ ID NO: 3307 - DNA, 1167 bp, Sorghum bicolor
atggaggttggagacgcaagaaacggttctgcagcagcggcacagacaaagggaagtgcggatgatgccgcccgcaaaccgctccctccttgctgcgtcaaggccaaggcaggcgtgcctgaatccgaagccaagtgccatgatactgtggtctcagggtggttcactgaacccagatcgcgttttggcaaaacaagcaaagtgcagtacttcaacaacccgatgtggcctggagaggctcattcactgaaagtggagaagattttgtttcaagggaaatcgccttaccaagaaattttagtttttgagtcttcaacctatggaaatgttcttgtgcttgatggtatagttcagttgactgacaaggatgaatgcgcataccaggaaatggttactcaccttccactgtgctcaattccagcaccgaagaatgttttggttgttggaggtggtgatggtggtgtactgcgggaaatagccagacatgattcagtggatactattgatatatgtgagattgatcaattggttattgatgtttgcaaagaattctttccaaacatatccattggatataaagatcctcgtgtccgacttcatgttggtgatgctgttgacttcctgaggaattctcctgaaggaaaatatgatgctattattgtcgattcatcagatccaattgggccagcacaggcactcgtggagaaaccatttattcagacaattgctagagctttgaagcctggtggtgttctttgtaatcttgctgagagcatgtggctgcacacacatctaatccaggatatgcttgctatctgtcgacagacattcaagggtgccgtgcactatgcctggacaagtgttccaacatatcccagtggtgtcattggatttttgctatgtgcgaaagaaggtcgtgaagtgaacttcttaagtcctgtgaatccaattgagaaaataggagctggaaaagctggaagggagctcagattttacaattcagagattcatagggctgcttttgttctgccaacatttgtaagaagagaactggaatcatatgccactcctagtacttatgctgaaaacgagaaaccgaaagaatcagtgtcagaaccgcagaagataaagatattgtcaaacaatgccattcttacagcttcctag

SEQ ID NO: 3308 - protein, 388 aa, Sorghum bicolor
MEVGDARNGSAAAAQTKGSADDAARKPLPPCCVKAKAGVPESEAKCHDTVVSGWFTEPRSRFGKTSKVQYFNNPMWPGEAHSLKVEKILFQGKSPYQEILVFESSTYGNVLVLDGIVQLTDKDECAYQEMVTHLPLCSIPAPKNVLVVGGGDGGVLREIARHDSVDTIDICEIDQLVIDVCKEFFPNISIGYKDPRVRLHVGDAVDFLRNSPEGKYDAIIVDSSDPIGPAQALVEKPFIQTIARALKPGGVLCNLAESMWLHTHLIQDMLAICRQTFKGAVHYAWTSVPTYPSGVIGFLLCAKEGREVNFLSPVNPIEKIGAGKAGRELRFYNSEIHRAAFVLPTFVRRELESYATPSTYAENEKPKESVSEPQKIKILSNNAILTAS

SEQ ID NO: 3309 - DNA, 335 bp, Sorghum bicolor
atggcgtcaaaggtggcagcgatggcgatggctgccttgttgttctgcgctctctttgcttcttggacgacgacgtcggaagcggcacgcatggggcggcagacgggtgacgagcttgccgttgccgcccccgtcaatggaggtggcggcggaggaagcggcaataatgtggcctactgggagagggagagggagaggcatcagcagcgcggcctcatcgtcggccgtcggccgaggctcgcgtcgttcacgccgcgtgacgacggtgctggcggcaacaagagagaggtgccctccggcccggaccccatacaccacggcgacgcgccgcccac

SEQ ID NO: 3310 - protein, 112 aa, Sorghum bicolor
  misc_feature (112)..(112): Xaa can be any naturally occurring amino acid
MASKVAAMAMAALLFCALFASWTTTSEAARMGRQTGDELAVAAPVNGGGGGGSGNNVAYWERERERHQQRGLIVGRRPRLASFTPRDDGAGGNKREVPSGPDPIHHGDAPPX

SEQ ID NO: 3311 - DNA, 1269 bp, Sorghum bicolor
atggctttgggcagcaatgctatgagggtgttcttcctccttgcgatggtggtgtgcgccgcgcaagcggcggggaaggcagccccaaaggagaaagagaaggggaaggacgacaagtccggcggtgcccccgccgaggcgccctcaggctccgccgggggcagcgacatatccaagctcggagctaagggcgacggcaagacggacagcaccaaagcgctgaatgaagcgtgggcggcggcgtgcggcaaggaagggccgcagacgctcatgatccccaagggcgactacctgacagggcccctcaacttcagcgggccgtgcaagggctccgtcaccatccagctcgacggcaaccttctcggcaccacggacctgagcgcgtacaagaccaactggatcgagatcgagcacgtcgacaaccttgtcatcagcggcaaaggcaccctcgacggccagggcaaacaagtatgggacaacaacaaatgtgctcagaaatacgactgcaagatcctgcccaacacgttggtgctcgacttctgcaacaacgccaccgtctccgggatcaccctgctgaactccaagttcttccacatgaacgtgttccagtgcaaaggcgtgacgatcaaggacgtgaccgtcaccgcgcccggggacagccccaacaccgacggcatccacattggtgactcctccaaggtcaccatcaccggcaccaccatcggcgtgggtgacgactgcatctccatcggccctggcagcaccgggatcaacgtcaccggcgtcacctgcgggcccggccacggcatcagcgtcggcagcctgggcaggtacaaggatgagaaggatgtgacggacatcaacgtcaaggactgcacgctcaagaagaccagcaatggcgtccggatcaagtcctacgaggacgccgcgtgcgtgatcactgcctccaagctccactacgagaacatagccatggacgacgtggccaaccccatcatcatcgacatgaagtactgccccaacaagatctgcactgccaagggtgactccaaggtcaccgtcaaggacgtcacgttcaagaacatcaccggcacctcatccaccccggaggccgtcagcctgctctgctccgacaaaatcccctgcagcggcgtcaccatggataacatcaaggtcgagtacaagggcaccaacaacaagaccatggccgtatgtcaaaacgccaagggaagcgccacaggctgcctcaaggaactggcctgcttctga

SEQ ID NO: 3312 - protein, 422 aa, Sorghum bicolor
MALGSNAMRVFFLLAMVVCAAQAAGKAAPKEKEKGKDDKSGGAPAEAPSGSAGGSDISKLGAKGDGKTDSTKALNEAWAAACGKEGPQTLMIPKGDYLTGPLNFSGPCKGSVTIQLDGNLLGTTDLSAYKTNWIEIEHVDNLVISGKGTLDGQGKQVWDNNKCAQKYDCKILPNTLVLDFCNNATVSGITLLNSKFFHMNVFQCKGVTIKDVTVTAPGDSPNTDGIHIGDSSKVTITGTTIGVGDDCISIGPGSTGINVTGVTCGPGHGISVGSLGRYKDEKDVTDINVKDCTLKKTSNGVRIKSYEDAACVITASKLHYENIAMDDVANPIIIDMKYCPNKICTAKGDSKVTVKDVTFKNITGTSSTPEAVSLLCSDKIPCSGVTMDNIKVEYKGTNNKTMAVCQNAKGSATGCLKELACF

SEQ ID NO: 3313 - DNA, 597 bp, Sorghum bicolor
attcatctccagtccacgccacctgctgcgtacgagaaccagactgcagacggtctcataaattcgtttgggggcaataaaagaatatcctaccatcctacaactctagtctacaatcggatgcctgcctgcctgcgtgctgattcgtcgcgtgtaattccattccaggatcggatccagaaatggaacagcaccaaaccctacacttcaaatggtcatcaacagcagcacgcgacgcaattcggcagcgagatccaaagcgcagagccccacgcttgcacggctgaaacgaggataagcacgctaacagcagccgagccgagacggagatcagatctaccaccagtttgcttcccgcgtcggcggcggagagagaaaggagctggaacgagctggaacgaaacgtaccgttcctggccggctgtgtcccaaatctgggccttgacgaccttgccgtcgacctggagggagcgggtggcgaactcgacgccgatggtggacttggactcgaggctgaactcgttgcgcgtgaagcgggagagcaggttggacttgccgacgccggagtcgccgatcaggaccaccttgaagaggtag

SEQ ID NO: 3314 - protein, 198 aa, Sorghum bicolor
IHLQSTPPAAYENQTADGLINSFGGNKRISYHPTTLVYNRMPACLRADSSRVIPFQDRIQKWNSTKPYTSNGHQQQHATQFGSEIQSAEPHACTAETRISTLTAAEPRRRSDLPPVCFPRRRRREKGAGTSWNETYRSWPAVSQIWALTTLPSTWRERVANSTPMVDLDSRLNSLRVKRESRLDLPTPESPIRTTLKR

SEQ ID NO: 3315 - DNA, 813 bp, Sorghum bicolor
atggattcggtggcgtcgaacaccaccaccaccaccccgttcgcggcggcaggcaccacggccgccgaggaggaggaggcgtcgacgcggcgcgtcgcgaaccgcatcatccgcgcgctgcagcaccagctccggctgctgcaccgcgcgggcgcggagttcttcgtgctcggcgccacggggaacgtgtacacggtgacgctgtccaccgcgccggcgtgcacgtgcccggaccccgccgtgccctgcaagcacatcctcttcgtgctcctccgcgtcctcggcctctccctcgacgaggcctgcgtctggaggcagacgctccgcccgtgccaggtcgcgcgcctcgtcggcacgcccaccacctacccggacgtgctcgccggcgcgcgcgcccgggagaggttccaccagctctggtcggcccgcccggccaacaaggctgccgacgaccgccaggaggccgcgtcgtcgcggaggccactcgtcgacggcgcggcatgcccggtgtgcctcgaggagatgaggatggcgccggcacaagcgtcgcagggcagcggcgggaccgccgccgcgccgcaggcgatcctgacgtgcaggacgtgccggaacgccgtgcacgccgagtgcttcgcgcgctggaagcgaagccgctcacgacgggcggcgacgtgtgtcgtttgccgctcgcggtggaggcggccaaaccgggagcaggagcaagagcagtacatgaacctcgcagcctacatgaacgacgacgacggcgacgtcaccatgcagagcgccgacggcgggctgtgcgcggggtag

SEQ ID NO: 3316 - protein, 270 aa, Sorghum bicolor
MDSVASNTTTTTPFAAAGTTAAEEEEASTRRVANRIIRALQHQLRLLHRAGAEFFVLGATGNVYTVTLSTAPACTCPDPAVPCKHILFVLLRVLGLSLDEACVWRQTLRPCQVARLVGTPTTYPDVLAGARARERFHQLWSARPANKAADDRQEAASSRRPLVDGAACPVCLEEMRMAPAQASQGSGGTAAAPQAILTCRTCRNAVHAECFARWKRSRSRRAATCVVCRSRWRRPNREQEQEQYMNLAAYMNDDDGDVTMQSADGGLCAG

SEQ ID NO: 3317 - DNA, 1641 bp, Sorghum bicolor
atggccgcggcggcgccggaggctgcggcagacgttgcgccgtcggcgacgctgagcgtctacaaggcggcacggcgcatcaagcggcgggcgagcacgctgtacaacgcgctgcggagcgtggcggaggacgcggccttcgtagcggaggtcgcggcgctgtggccctcgctgccgctggtggccaacctccgctgcggcctctggtacgccccgccccgtgccttcgccgccacctgctacttcaagtccacggatggccacgccgggaactggtccttctccactgcccgcctcaacctccacctcgccctcctcgctggggagagaggagggtgcataatagttgattcaacaaggagagggaaacgattccctgatagcatgtcaaagaccatacccatttggtgctctgtcctgaaccgagcaattgagaggcaccggctgcgtgctctccgcaaaagcgtcgaagtgaattatcaagtgtcatctactctgctgaatggagatgctgaaaataactctgatttatctaattgggatagctcggtgcaccttcctgtatgggttctaggcactgagaaaaatgctatagaggggcgtattgatgaatggacagaccaatttgaatcgtgtggtgcagatattaattctcttgcaataggtttgcaaaaaccactacgtcctctatggatctcacaaaggacacgtatatggttaaatgaagtgccggaacttgagtcatgggattttactcctattattctaatttccacatctgcatctgaagcagttgctacacaaaggatgtcttcagaattcagctggcactatattcctggagcaggagacgatgaagagagttgggcacgtggtctaactcctaccttattctggaagcattcatatgaccttcttgatgctggaccagatcattgtaaccagttagttgcagatattgttgaaaaagatagggtttatcgttcacagagaggtgaacattgtcctcaaattacatctaagtctctgaagagccttgatgctgcaaaatgtaatgatgatcagacaagcgagacgtgggctatgaacttagatccttgtaccagtacaatggatgcacaatgttctaatagtggtcttccactcttttggattggaacatcaaaccttgctgtatcatctactttccaagttggagatgccttagttggtgtggactgcatactgaactgtgacagcacgtcaaagctaccttctaattcatcagaaaattcttaccttgagctatctattgtgggctcaaaggatgaccgattttcattgatgagaaaccttccaaaagcagttgactttgctaagaggaatttgattgctgggagaaaaatccttgtgtgctgtcaaaatggagaagatataagtatttgtgtggccttggcaatattggccttgttattcgatgataacggatgctttgactatggaaattattttgtcaaaagagatgtcacaaagttggagatgaggaagaggctggtattcatctgcaaatttgctgtaaatgcacggccatctagaggaaacttgaaacaggtgtatggcttcctcagcagtcaaaaggaacagctgttatgtttgacatag

SEQ ID NO: 3318 - protein, 546 aa, Sorghum bicolor
MAAAAPEAAADVAPSATLSVYKAARRIKRRASTLYNALRSVAEDAAFVAEVAALWPSLPLVANLRCGLWYAPPRAFAATCYFKSTDGHAGNWSFSTARLNLHLALLAGERGGCIIVDSTRRGKRFPDSMSKTIPIWCSVLNRAIERHRLRALRKSVEVNYQVSSTLLNGDAENNSDLSNWDSSVHLPVWVLGTEKNAIEGRIDEWTDQFESCGADINSLAIGLQKPLRPLWISQRTRIWLNEVPELESWDFTPIILISTSASEAVATQRMSSEFSWHYIPGAGDDEESWARGLTPTLFWKHSYDLLDAGPDHCNQLVADIVEKDRVYRSQRGEHCPQITSKSLKSLDAAKCNDDQTSETWAMNLDPCTSTMDAQCSNSGLPLFWIGTSNLAVSSTFQVGDALVGVDCILNCDSTSKLPSNSSENSYLELSIVGSKDDRFSLMRNLPKAVDFAKRNLIAGRKILVCCQNGEDISICVALAILALLFDDNGCFDYGNYFVKRDVTKLEMRKRLVFICKFAVNARPSRGNLKQVYGFLSSQKEQLLCLT

SEQ ID NO: 3319 - DNA, 1506 bp, Sorghum bicolor
atggacgacgaagatgcggcggcgatcgagggcgggcagctcgcgcctcttctcggaagccgaagcgcgggctcgccgtcgccggacgcgtcgctgctccgccgcctctacgccggccacggcctcgctagatggggcgccaggatgtgggagttctcggttgggctgtacatgatccgcatctggccaggctcgctgctcttcacggcgatttacggcgtcgtcgagtcctcctccgtcgccgtgtttggtcccatagttgggacactggtcgataagctcacgtaccttcaggtccttggcctatggcttctagtccaaagcctgtccttcatcgtcgccggagcgtcagtaacggccctgcttgtttacgacgacctgaaagccacaagcttccctgttttcatggcgctggtgatcgtgaccaacgtgtcaggtgcgctagcagcgctctcaacactcgccggaaccatactgatcgagagagaatgggtggtggtgatctcgagcgggcatcctcctgcagtactgacggggatcaactcggtggtccggcggatcgacctgagctgcaagctgctggcccctgtcttctccggcctcgtcatcagcttcgtgtcggcgcaggcctccgcggcagctctggcggtgtggaacgtcgcctcggtggggctggagtactggctcttcgtctccgtgtacaatggcgtgcctgcgctcgctgagagcaaccgggtgagaacacctgatgcagctgaggccatgtcgccgtcatcgtcgtcgtcgtcgtcgttggagagcgtgacaccgacggcgaatgcgctggattggagggctaggatgacggagcagctatccatcataccatgctgggagtcatgggtggtgtacctgaggcaggacgtcgcgctcccaggcgtcgctctcgccttcctctacttcaccgtcctgagctttggcaccctgatgacggcgaccctagactggaaaggcataccagcgtatgtcatcagtttggcaaggggtttcagcgccatcgtcggcatcggcgcaacgctgatgtaccctgtggtgcactcttgggtgtccacgctacgaacagggctgtggtccatttggatgcagtggtgctgcctgctggtgtgcgtggcctccatctgggcggccagcgacgtggcgtcggcgtggatgctgatggccggcgtcgccgcgtcgcgcctagggctatggatgttcgacctcgccgtgatgcagctgatgcaggacggcgtggccgaccacgagcggtgcgtcgtgggtggcgtgcagaattcgctgcagtccgtgttcgacctgctcacctatgtcatgggcatcatcatctccgatcccagggatttcagcgagctgatcgtgttgtcgttcttcctggtgacctgcgctgcagccatgtacacgctgcacgtctaccgcgtgcgcaagcacctcttccacttcgacaagatcctcgccaagatcagctggtga

SEQ ID NO: 3320 - protein, 501 aa, Sorghum bicolor
MDDEDAAAIEGGQLAPLLGSRSAGSPSPDASLLRRLYAGHGLARWGARMWEFSVGLYMIRIWPGSLLFTAIYGVVESSSVAVFGPIVGTLVDKLTYLQVLGLWLLVQSLSFIVAGASVTALLVYDDLKATSFPVFMALVIVTNVSGALAALSTLAGTILIEREWVVVISSGHPPAVLTGINSVVRRIDLSCKLLAPVFSGLVISFVSAQASAAALAVWNVASVGLEYWLFVSVYNGVPALAESNRVRTPDAAEAMSPSSSSSSSLESVTPTANALDWRARMTEQLSIIPCWESWVVYLRQDVALPGVALAFLYFTVLSFGTLMTATLDWKGIPAYVISLARGFSAIVGIGATLMYPVVHSWVSTLRTGLWSIWMQWCCLLVCVASIWAASDVASAWMLMAGVAASRLGLWMFDLAVMQLMQDGVADHERCVVGGVQNSLQSVFDLLTYVMGIIISDPRDFSELIVLSFFLVTCAAAMYTLHVYRVRKHLFHFDKILAKISW

SEQ ID NO: 3321 - DNA, 1161 bp, Sorghum bicolor
atgtctgccatctacatgagccagctctccactgctctccctctcatggagggagatcaccaccaccaccaccaccaccaccaccaaggccacttccaagccttcacgctgccaaaggatcccccaatccttttcccctttgtgatcagcaatagtagcgccagcgaaagcagtctgagctatggatcggcagatcatcacttgttgaggcagcatcgtcaaactatgctcgagccccaacatatgattggtggatcgtcatcagctgcgagtagtgtctttgcgacgccgttcccgactgtggagagcatccgtgacgacatgatcgagcctgcctcgtacgatccatacgatatggggaagctgcaccaggtggtcggtggcgggtcgtcgatggatgcttgcagctggacgccgccggcggccaagatgaggatcacgaggaaggccactgccgccgatcccagtggtgccgggaagaagccgaggagaagggcgcatcaggcagcagggtacgacgccgacatcaacatgagcggccaaccaaatttgggtgttattagggtgtgctccgactgcaacaccaccaagacgcccttgtggaggagtggtccttgcggccccaagtcgctctgcaacgcgtgcggtatcaggcagcggaaggcacggcgggcgatgatggccgccgcgtctacctccgggccagcagcagtgcccgccaccgacagcgataaggcctcgccgagcaacgccgccggggccgcagcagcacaccccaaggtgaagaaggagaagagatcagtggacgtggaccggtcgctgccgttcaagaaacggtgcaaggtggtccaggtccagcaggatcacgctgcggccgtcgcagctcctgccgcggccactgacaggccggctgtcgtcgtgcagcaggcggccaccgccgccgaggttggtgacgacgacgcctgtccgagcagggacctgcttgtcgacgacattggtgggctcatcagctggagcaggagtccgccggcggctcccgcatctgcagatgctgcctcctgcagtttccgggcgtcgccggcgttgccggtgcagcaggacgagatcacggacgctgccatgctgctcatgacgctgtcctgcgggcttgtccgaagctga

SEQ ID NO: 3322 - protein, 386 aa, Sorghum bicolor
MSAIYMSQLSTALPLMEGDHHHHHHHHHQGHFQAFTLPKDPPILFPFVISNSSASESSLSYGSADHHLLRQHRQTMLEPQHMIGGSSSAASSVFATPFPTVESIRDDMIEPASYDPYDMGKLHQVVGGGSSMDACSWTPPAAKMRITRKATAADPSGAGKKPRRRAHQAAGYDADINMSGQPNLGVIRVCSDCNTTKTPLWRSGPCGPKSLCNACGIRQRKARRAMMAAASTSGPAAVPATDSDKASPSNAAGAAAAHPKVKKEKRSVDVDRSLPFKKRCKVVQVQQDHAAAVAAPAAATDRPAVVVQQAATAAEVGDDDACPSRDLLVDDIGGLISWSRSPPAAPASADAASCSFRASPALPVQQDEITDAAMLLMTLSCGLVRS

SEQ ID NO: 3323 - DNA, 876 bp, Sorghum bicolor
atggccatggcgcccgcatggctgtccgctccccgtgccgccctctcccacctcgatggcgtcgtcgtccccgcggccgcgagtcgcttccgctcagaaacggctgcccgtgtggtggccgtcgtgttccggccgaggacgaccgtggtttctgccgcggcgcagaggagcctggtcgcggtggcggcggcgacggcgacggtccctgctgctgctgcgggaggggatgatgaggcaggcaccccgtttgtcgaggagatgcgggcggcggccatgcggctgcactccagggaccaggccagggacgggaggaacgaggcgcccatggagcctcccatcgccaagtggcagcccaccgtcgatggttacctccggttcctcgtcgatagcaagctcgtcttccagacgctcgaggccatcgtccaccgcgccgccgtcccctggtatgccgagttcagggatactggtttggagagatcagagccactcaggaaggatttggaatggttcaggcaacaaggtcacgcgattccagaaccatcagctcctggcattacgtatgcttcgtctctggaagagctgtctgggaaggatcccccggcatttgtttgccatctctacaacgtgtacttgggtcatactgctggaggccgaatcatcggcaaaaaggttggtgagaagatcaatctccagaaagagctggagttttacgagtgggagggtgatctgtcgcagatgcagcagaatgtccgggcgaagcttaaccgagtcgcttccggttggtctcgagcagagaaggaccgctgcctgggcgagatggagaaggcgtttacctgctcaatagacctccgccgccatatgtttatgctcccctga

SEQ ID NO: 3324 - protein, 291 aa, Sorghum bicolor
MAMAPAWLSAPRAALSHLDGVVVPAAASRFRSETAARVVAVVFRPRTTVVSAAAQRSLVAVAAATATVPAAAAGGDDEAGTPFVEEMRAAAMRLHSRDQARDGRNEAPMEPPIAKWQPTVDGYLRFLVDSKLVFQTLEAIVHRAAVPWYAEFRDTGLERSEPLRKDLEWFRQQGHAIPEPSAPGITYASSLEELSGKDPPAFVCHLYNVYLGHTAGGRIIGKKVGEKINLQKELEFYEWEGDLSQMQQNVRAKLNRVASGWSRAEKDRCLGEMEKAFTCSIDLRRHMFMLP

SEQ ID NO: 3325 - DNA, 945 bp, Sorghum bicolor
atggtcgtgctggtggtggccacgacgtcggacccggcgtccattgggcccgccgccgccttcctcgccatgcccggatggtcccccggcccgcccatcgccgaggggatggaaagttttactaatgggaatgttcgattattgaagcatgagcatagcattatcgcagaggatgatcttgaccagcgatggcaggaagccactggagagtctgtttctgaggtcatatttctcagcaaacacactgcagtctccaaacgtccagcactcacagtgcatccaattggtgtgccacatctgaaggaggatgaaaccccaccccaaggagggattcctggatgggcagcaattccaagtcctcgcattggcccttggctccggctgatgcaaaagatagctgcagaacaaggcctcgttccagagtttgagattacgcttgaggctactcaccatggaccagttaccagcacacccaccatgtttgttgagataggaagtacagaagaccactggggtagacaagatgctgcgcaggcaattgctctagttctatggaaagggcttggtctggaggatggagatgctgttggaagttggcaaaggaactgtgaaaaggttctactaggtataggaggtggtcactatgttcctcgtcacatggatattgtcatcaaagatggtgtatgggtcggtcatttactctctggctactccttgccaatggacacaccatcacaagtaaatggaaagacttatggagaggttgctggaatgtggaagcatgccatcaaagtttcctacgaagccacaaaggcagcatttcctggtggtgaagttattgcacatcttgatcacaagagcttcaagggctggcagaaaaatgctgtcacatcctttttgcaggagcagaacattaggataggaaagcctagtgatttcttctga

SEQ ID NO: 3326 - protein, 314 aa, Sorghum bicolor
MVVLVVATTSDPASIGPAAAFLAMPGWSPGPPIAEGMESFTNGNVRLLKHEHSIIAEDDLDQRWQEATGESVSEVIFLSKHTAVSKRPALTVHPIGVPHLKEDETPPQGGIPGWAAIPSPRIGPWLRLMQKIAAEQGLVPEFEITLEATHHGPVTSTPTMFVEIGSTEDHWGRQDAAQAIALVLWKGLGLEDGDAVGSWQRNCEKVLLGIGGGHYVPRHMDIVIKDGVWVGHLLSGYSLPMDTPSQVNGKTYGEVAGMWKHAIKVSYEATKAAFPGGEVIAHLDHKSFKGWQKNAVTSFLQEQNIRIGKPSDFF

SEQ ID NO: 3327 - DNA, 468 bp, Sorghum bicolor
atggcgccgtcctcctcctccccgtcctcgttgtcgtcgtcgggcggctcccacgcgggcctcgccatcgcggccaccgccatggcgctctccggcacgctcgtcctctactccctgtgccgcgccaagcagccgcacctggtcccctccgacgccgccccgtcccctcgtctccgcccgtgcctcgcctcgtccgacaagcggaagaagaagaagcgggagatggcgcggcgagggaagagccagcagaagcgggtgcgcttcgcggacgacgtcgtggacaccaaggacaatggcgccgccaacgccgctgccgccggggcggcgcgggaggaggcggaggcggaggccgagccgtcgtgctgtaccgcggcgctgaggacgacgcccatgccggccaaccgggaggcgctgtaccgcggcatgctccgcggccggtccatgctcagggtcacctgctcctactag

SEQ ID NO: 3328 - protein, 155 aa, Sorghum bicolor
MAPSSSSPSSLSSSGGSHAGLAIAATAMALSGTLVLYSLCRAKQPHLVPSDAAPSPRLRPCLASSDKRKKKKREMARRGKSQQKRVRFADDVVDTKDNGAANAAAAGAAREEAEAEAEPSCCTAALRTTPMPANREALYRGMLRGRSMLRVTCSY

SEQ ID NO: 3329 - DNA, 912 bp, Sorghum bicolor; identical to SEQ ID NO: 179

SEQ ID NO: 3330 - protein, 303 aa, Sorghum bicolor; identical to SEQ ID NO: 180

SEQ ID NO: 3331 - DNA, 942 bp, Sorghum bicolor
atggacatcggcggcagcggcggcatcgcatcgtcgccggggacggtggacgacaagtttgcgcggaggcgctcccgccgcgtgagcttcgcggacaccaccgcggtgcacgtgttcgaccgcgacgaggacttcgagacgccccccgaggagcgcgagcccggctccacctctccctccccgtctcccgggaggtcctcggctggccgggaggatgaggacgacacgggggaggatttccaccgccccccggtcaacttcctccaggacgtcgactcgtcgtccccaggcagcgccgccggatccatggcctccgtcgatgatgaaaacttctttggacctgtatcggcaagcttcattcaaacaggaagaccatcggattctggaatgtcagaggatgacaaccatgatataactatggattccaggacgttctctttgtattttcgcaatattgctccaccagatgactgtacagccaactcagctgcgagtctaatgacacctaatactgcatctgagggacccctgaaggaacttactgcatctaatcctgcaacaacatcaatcaattgtcgggatacattgactgacatgagtttgttgagtggtagccgcagaacttatgattatgataagctgtcacccacgttgaggagtatgatgaagaagataaaagggagccagcaagcaagctctcataaagttggtgtttctgatgtacctcttgattgtgttttaaccttgtctacatctgagaaagaaagtagggaagaaaatttatgcattgacaatggtatatcttctgataatctgggcatagttaatacgactgtagagcacgcttctggtcgaaatccagtttcgaccagcacagatctgattcaagaagataatgaaatgataattgatggccatgagaattcacaggttatgtactga

SEQ ID NO: 3332 - protein, 313 aa, Sorghum bicolor
MDIGGSGGIASSPGTVDDKFARRRSRRVSFADTTAVHVFDRDEDFETPPEEREPGSTSPSPSPGRSSAGREDEDDTGEDFHRPPVNFLQDVDSSSPGSAAGSMASVDDENFFGPVSASFIQTGRPSDSGMSEDDNHDITMDSRTFSLYFRNIAPPDDCTANSAASLMTPNTASEGPLKELTASNPATTSINCRDTLTDMSLLSGSRRTYDYDKLSPTLRSMMKKIKGSQQASSHKVGVSDVPLDCVLTLSTSEKESREENLCIDNGISSDNLGIVNTTVEHASGRNPVSTSTDLIQEDNEMIIDGHENSQVMY

SEQ ID NO: 3333 - DNA, 588 bp, Sorghum bicolor
atgggcgactcgtccggggtcaccatcgagaacaccgtcatcggcgtcggcgacgactgcatctccatcggccccgggacaaccaaggtgaacatcaccggcgtcacatgcggccccggccatggcatcagcatcggcagcctggggcggtacaaggacgagaaggacgtcacggacatcaacgtgaaggactgtacgctgaagaagacgagcaacggcctccggatcaaggcgtacgaggacgccgcctccgtgctcaccgcctccaagatccactatgagaacatcaagatggaggactcgtcgaaccccattatcatcgacatgaagtactgccctaacaaaatctgcaccgccagcggcgcctccaaggtcaccgtcaaggacgtctccttcaagaacgtcaccggcacctccgccagccccgaggccgtcagcctgctctgctccgacaagatcccctgcactggcgtcaccatggataacgtcaaggtcgaatacagtggcaaaaacaacaagaccatggccgtatgccaaaacgccaagggcagcgccacaggctgcctcaaggagctcgcatgcttctag

SEQ ID NO: 3334 - protein, 195 aa, Sorghum bicolor
MGDSSGVTIENTVIGVGDDCISIGPGTTKVNITGVTCGPGHGISIGSLGRYKDEKDVTDINVKDCTLKKTSNGLRIKAYEDAASVLTASKIHYENIKMEDSSNPIIIDMKYCPNKICTASGASKVTVKDVSFKNVTGTSASPEAVSLLCSDKIPCTGVTMDNVKVEYSGKNNKTMAVCQNAKGSATGCLKELACF

SEQ ID NO: 3335 - DNA, 1647 bp, Sorghum bicolor
atggaagtggccacatcacgagaactcatcaaccccacagccttccccattctcgtcctcgttgccggcctcaccaccgttttctacgtgctccgccgccggtgcagcggcaatggcggccttcgcctccctccgagcccgttggcgctgcccgtcctgggccatttccacctccttgccccgctcccccaccaggcgctgcaccggctggcgtcccggcacggcccgctcctgtacctccgcctcggctccatgccggccatcgccgcctgctccccggacgccgcccgcgaggtgctcaagacccacgaggcggcgttcctcgaccgcgccatgcccacggcggttcaccgcctgatgtacggcgggcaggacttcatcttctcggcgtacgggccctactggcgcttcatgaagcgcgcgtgcgtgcacgagctcctggacggccgcacgctggaacggctccgccatgtgcgccgcgaggaggtgtcccgcctcgtgcgctccctgtcccgcagcgccggcgacgacggcgcggccgtcgacgtggacgccgtgctgatgggcgtcacgggcgacatcgtctcgcggatggtgatgagccggcggtggaccggggacgacagcgccaccgacaccgaggagatgaggagcgtgatcgccgagaccgccgtgctgacgggcacgttcaacctgcaggactacatcggcgtgttcaagtattgggacatgcagggcctggggaagcgcatcgacgcggtgcaccgcaagttcgacgccatgatggagcggatactgacggcgagggatgcccagagacggcggcggcggaaggagccggcggacggcgccggcgagggggccaagaaggacctgcttgacatgctctttgacatgcacgaggacgaagccgccgagatgcggctcaccagagataacatcaaggccttcatgctggacatcttcggggccggcacggacacgacggcgatcacgctagaatgggcgctgtcagagttgatcaacaacccggacatcctccggcgggcgcaggcggagctggacgccatcgtgggcgcgtcccggctggccgacgagtcggacatcccacggctcccctacctacaggccatcgccaaggagaccctgcgcctgcacccggcgttcccgctggtcgtgcgccgctccacggagccctgcaaggtgtccgggtacgacgtgccggctgggtcgacggtgttcgtgaacgtgtgggcgatcgggcgcgacccggcgtgctgggcgccggatccgctggcgttccggccggagcggttcctggagggtggtgaagggagaggagatagcgcggggctggacgtgcgcgggcagcacttccacctgctgccgttcgggtccgggcggcggatttgccccggcgcgtcgctggccatgctcgtggtgcaggcggcgctggcggccatgctgcaatgcttcgagtgggcgcccgtcggcggcgcaaccgtggacatggaggaggggccagggctcacgctcccgcgaaagcgcccgctcgtctgcaccgtcaaggccaggctccacccagtgccggttcccactgccgctgctgctgataatggcgtggacggaactctccattgtgcatga

SEQ ID NO: 3336 - protein, 548 aa, Sorghum bicolor
MEVATSRELINPTAFPILVLVAGLTTVFYVLRRRCSGNGGLRLPPSPLALPVLGHFHLLAPLPHQALHRLASRHGPLLYLRLGSMPAIAACSPDAAREVLKTHEAAFLDRAMPTAVHRLMYGGQDFIFSAYGPYWRFMKRACVHELLDGRTLERLRHVRREEVSRLVRSLSRSAGDDGAAVDVDAVLMGVTGDIVSRMVMSRRWTGDDSATDTEEMRSVIAETAVLTGTFNLQDYIGVFKYWDMQGLGKRIDAVHRKFDAMMERILTARDAQRRRRRKEPADGAGEGAKKDLLDMLFDMHEDEAAEMRLTRDNIKAFMLDIFGAGTDTTAITLEWALSELINNPDILRRAQAELDAIVGASRLADESDIPRLPYLQAIAKETLRLHPAFPLVVRRSTEPCKVSGYDVPAGSTVFVNVWAIGRDPACWAPDPLAFRPERFLEGGEGRGDSAGLDVRGQHFHLLPFGSGRRICPGASLAMLVVQAALAAMLQCFEWAPVGGATVDMEEGPGLTLPRKRPLVCTVKARLHPVPVPTAAAADNGVDGTLHCA

SEQ ID NO: 3337 - DNA, 105 bp, Sorghum bicolor
ttcagcttagcttaccttagatgcatttgggtaaagcacccccactgggcatgggtcgtggtggcttttggaattgtttgggcgccacattgttttggaggtgtt

SEQ ID NO: 3338 - protein, 35 aa, Sorghum bicolor
FSLAYLRCIWVKHPHWAWVVVAFGIVWAPHCFGGV

SEQ ID NO: 3339 - DNA, 693 bp, Sorghum bicolor
atgggatcaggcctctcaagcagccaccggagaagcagcgcgtcgcttcaccagccgccggcgacgtcgccgtcgccgtcgtcgtcgccgccggcggcccctccggcgctggtcatcgcggccgacggctcgctgagggagttcacgccccctgcagtctccgtctccgacgcgctcgcgctcgcgctcgtcggcgccgccaatgccgacggccgccgcagcttcttcgtgtgcagcgccgacgcgctctacttcgacgccgacgtcccggcgctcggcgccgacgagctgctccgcccggggcagatgtacttcgtcctccccgcgccgatgctcggcaggccgctctcggccgccgacatggccgcgctcgccgtgcgcgcgagccaggcgctggctgcggctgcggctgcgactgcgacagcgggcccgcgtagtggtgggcacggacgacgacgccctcgcggccgcggcgggttcgcgaagacgcgcgtcgtgccggcgcaggcgcaccaccacgcgcacggcggcgacgaaggggtcaacgagaagctgaaccagaggactcttggcggcttcgagacgacggcttcacgtggtccggcgagcaacgccaggaagtccgcggtggcggcgcgaccggctccgcctgtgaggagggcgctcagcaccatcgaagaggatgccgagtga

SEQ ID NO: 3340 - protein, 230 aa, Sorghum bicolor
MGSGLSSSHRRSSASLHQPPATSPSPSSSPPAAPPALVIAADGSLREFTPPAVSVSDALALALVGAANADGRRSFFVCSADALYFDADVPALGADELLRPGQMYFVLPAPMLGRPLSAADMAALAVRASQALAAAAAATATAGPRSGGHGRRRPRGRGGFAKTRVVPAQAHHHAHGGDEGVNEKLNQRTLGGFETTASRGPASNARKSAVAARPAPPVRRALSTIEEDAE

SEQ ID NO: 3341 - DNA, 1254 bp, Sorghum bicolor
atggctcaggatatctatctactcttcctgattcttttcattgccttgaacctgcaaagtgttctctcatggaggatgcagaattctacaaatgatattaatagtgatgatcaatgccccccacagccccaccctttagggatgtgcaactcacgggtagcagcttatggctatccatgtgaagaatataatgtaacaacagacgatggctatattcttagcctaaagaggattcctcatggtctttctaatgctactggtaactcgactgagaatacgaggcaaccagtactactattccatgggctgatggtggatggtttctgttgggtactgagcacaccaaaacaatcactaggcttcattttggcagatggtggctttgatgtttggatcgccaactgtcgtggaacaaggtccagtcgcagacataccaccctcaccccagaagacccggctttttgggactggacatgggaccaacttgctgattatgatcttcctgctgtacttcagtttatctataaccaaacaggaggccagaaaatccactatattggtcactccctggggaccttgattatgcttgcagccctctcagataacaaggtaacagacgtagtgcgatcagccgcattgctctgcccaattgcttatctcaacaggatgaaatcaaagctcatcttgctggcggctcgtatcttccttgcagaaacaattcacatgctaggttaccacgagttcaatcctgttgggctagtggcacaagaattgttaggacaagtctgcgtcaacccagaggtcgattgttatgatttgttttcagctgtagcaggaccggactgctgcctcaatacttcgactacatgcatcttcctacagcacggtccacaatcaacctctatcaaaaacatgattcacatgtcgcagctggtcaggaaatcatcgatcagaaagtacgactacggaaacgagaaggagaacatgaagcactacaatcagacacggcccccagcatacgacctctcgtccatcccgaggcatgtccccttgttcttcacccatggcggccaagatttcctcggcgacgtccctgacaccaggcacctcctgcggacgatcatcagagagcatgacagcgatgacatcgaggtgatgtacatgcctgactacgcgcacggcgactttgtcatgggctacaatgctccacaactcatatacaagcccatggtggaattcttcaagcgtcactaa

SEQ ID NO: 3342 - protein, 417 aa, Sorghum bicolor
MAQDIYLLFLILFIALNLQSVLSWRMQNSTNDINSDDQCPPQPHPLGMCNSRVAAYGYPCEEYNVTTDDGYILSLKRIPHGLSNATGNSTENTRQPVLLFHGLMVDGFCWVLSTPKQSLGFILADGGFDVWIANCRGTRSSRRHTTLTPEDPAFWDWTWDQLADYDLPAVLQFIYNQTGGQKIHYIGHSLGTLIMLAALSDNKVTDVVRSAALLCPIAYLNRMKSKLILLAARIFLAETIHMLGYHEFNPVGLVAQELLGQVCVNPEVDCYDLFSAVAGPDCCLNTSTTCIFLQHGPQSTSIKNMIHMSQLVRKSSIRKYDYGNEKENMKHYNQTRPPAYDLSSIPRHVPLFFTHGGQDFLGDVPDTRHLLRTIIREHDSDDIEVMYMPDYAHGDFVMGYNAPQLIYKPMVEFFKRH

SEQ ID NO: 3343 - DNA, 1893 bp, Sorghum bicolor
atggcaggacaaagctcagactcaaatcccaccgatgtattcgaggagtacatgctgcttgagaaggatcctgatctctaccggatggttttctctggcccgagccagataagcccatggattgacccgagcgtgttaaatctgaagcaccggatagggagaggtccatttggggatgtctggatagcaactcatcatcagaggactgaggattatgatcggtaccacgaggtcgcggtgaagatgctacatccaattaaagaggaccagctgcagttcttctcagcgaggttcgatgagatcttcagcaaatgtcagggtcttggcaatgtttgtttcttgcatggcatctcaacacagaatgggaggatttgtatagctatgaagttctatgaaggatccgttggagacaagatggctcagcttaaaggtggaaagctccctttgtcagaagttttaagatacggagctgatttggcacgtggtgtactagacctacacaccagggggatattgatcctaaatctgaaaccttgcaattttctcacagacgaaaatgatcatgctgtgctgggggattttgggattccatccctgctgtttggcctttcattacctaatccggaccttatccagaggcttggaactccaaattacatggctccagaacaatggcaaccaaacatcagaggtccgattagttatgaaactgattcatggggttttgcgtgcagcatccttgagatgttgagtggcattcagccatggcgtggaaaatcagcagatgagatttatcagttggttgtcttgaagaaagaaaagccaatattcccatacagtctgcctccagacattgaaaatgttctttctggatgctttgagtatgacttcagaaaacgtcccttgatgaaagatattttgcaagcatttgagagtgctaaagatgcagatcatgataacattggatggggcaactctgaaaatgtaatggtagacaggccagccatggcaaaccgcattaattggttgcactttaaggacaagcttgaagtgggtgacaaggtccgttcaagaaagcttaaaaactcttgcagtcctgaaactatggaaatccctgatggaaccatagttggcattgaggatgaaggagagcgtgatccttacattcttgtacgagtccatgggctacatggccctttaaaggttcgctgttcaacagtggagagggtgacatatggttttgctgctggagactgggtacggttgagggaggaggacaagaagcgctctcaggttggcattcttcatagcattggccgtgacggtgcagtgactgttggtctgataggaatggataccctttggaagggtaattattcagatctccaaatggctcaagcctactgtgttggacagtttgtgcgcctaaaggcccatatttcaaacccaaggttcgaatggcagcgaaagaggggtggaggattagtcacaggccgaatttcacacatacatccgaacgggtgtctcgtcgtgaaatttcctggcaaatttaatcttggtgaagtgtgcagttgcttggcagacccctatgaggtggaggtggtgagctttgacaagtgcgaggggattgtgaagaagtacgagcatcttgaggacttccattgggcagtgaggcccctgttcatagctattggtttcttcactgctctcaagctgggtgtttttgttgggaagagcattgcgaggccaaggagtcggaaggttgccagcatctccgatcagagcagtgattaccagcaacaacagcaggtgcaaaacagtgctaatggggcgtggcttcctccaccagttgcaaacatgcttttcggagatgttgttgggacttctggataa

SEQ ID NO: 3344 - protein, 630 aa, Sorghum bicolor
MAGQSSDSNPTDVFEEYMLLEKDPDLYRMVFSGPSQISPWIDPSVLNLKHRIGRGPFGDVWIATHHQRTEDYDRYHEVAVKMLHPIKEDQLQFFSARFDEIFSKCQGLGNVCFLHGISTQNGRICIAMKFYEGSVGDKMAQLKGGKLPLSEVLRYGADLARGVLDLHTRGILILNLKPCNFLTDENDHAVLGDFGIPSLLFGLSLPNPDLIQRLGTPNYMAPEQWQPNIRGPISYETDSWGFACSILEMLSGIQPWRGKSADEIYQLVVLKKEKPIFPYSLPPDIENVLSGCFEYDFRKRPLMKDILQAFESAKDADHDNIGWGNSENVMVDRPAMANRINWLHFKDKLEVGDKVRSRKLKNSCSPETMEIPDGTIVGIEDEGERDPYILVRVHGLHGPLKVRCSTVERVTYGFAAGDWVRLREEDKKRSQVGILHSIGRDGAVTVGLIGMDTLWKGNYSDLQMAQAYCVGQFVRLKAHISNPRFEWQRKRGGGLVTGRISHIHPNGCLVVKFPGKFNLGEVCSCLADPYEVEVVSFDKCEGIVKKYEHLEDFHWAVRPLFIAIGFFTALKLGVFVGKSIARPRSRKVASISDQSSDYQQQQQVQNSANGAWLPPPVANMLFGDVVGTSG

SEQ ID NO: 3345 - DNA, 495 bp, Sorghum bicolor
ggccgcgtgcacggcgggcaccacgcccgacaggcccatcccgacgaagagcagcgcgcggtgggcgcggtaccgcgccgcgctgaggcgaggggacatgagcgcgtacaccgtgcccacccccgccgccgtgatcgccgacaggtacaccacctgccagtgcggctcgcactggaagatgtagtagatgggcgggaagaaggacaccacgatcatcaccgcgatgcccgtgtagtcgaggcggatcaggaacaggttcaggctgtgcgagtggcacgacagcaggtggcacgcgctgctgctcagcaggcagaacatggcgccggcgaggaacacgaagaagggccaccgcgtcgtctgcgacgtcaccgccgcgccgtaggagaccagcgtcgggttcgtctggatgaacatggccgcgccctggacggacggaccacacatgacaattccaattccaagttaatatcatcattatttttcatggcaggttag

SEQ ID NO: 3346 - protein, 164 aa, Sorghum bicolor
GRVHGGHHARQAHPDEEQRAVGAVPRRAEARGHERVHRAHPRRRDRRQVHHLPVRLALEDVVDGREEGHHDHHRDARVVEADQEQVQAVRVARQQVARAAAQQAEHGAGEEHEEGPPRRLRRHRRAVGDQRRVRLDEHGRALDGRTTHDNSNSKLISSLFFMAG

SEQ ID NO: 3347 - DNA, 3030 bp, Sorghum bicolor
atgtacggcaacgacaactggatcaacagctacctcgacgccatcctcgatgccggcaagggcgcagcggcagcgggtgccggcgccgccgccgccgccaggggccggggcggaggcggcggcggggaccggccctcgctgctcctccgcgagcgcggccacttctcccccgcgcgatacttcgtcgaggaggtcatcaccggctacgacgagaccgacctctacaagacctggctccgggcgaacgcgatgcggagcccgcaggagaagaacacgcggctggagaacatgacctggaggatctggaacctcgccaggaagaagaaggagtggagtgttcatcgagctatggtccttctcaatgagctttgcaaaggtattgagcagaagttccagttccaaattgatttggaccagtttgagaaagaagaagccaatcgcttgtccaaacgccgtctagagactgagaagccacggaatgatgctactgcagaaatgtctgaagatctttttgaaggagtgaagggagaagacgctggtgatccatctgttgcctacggtgacagcacaactgggaacacacctaggatcagttcatttgacaagctatacatagtcttaatcagtcttcatggcctgatacgtggagagaatatggagcttggccgtgattcagatactggtggccaggtcaaatatgtcgtggaacttgctaaagcattaagttcttgtcctggagtttaccgggttgatctattgacaagacaaatcttagccccaaattttgatcgtggctatggtgaaccagatgagatgctggcttcgacaagtttcaagaactttaaatgcgaacgaggagaaaacagtggtgcacatatcatcagaataccatttggccccaaagacaagcatctagctaaagaaaatatctggcctttcattcaagaatttgttgatggtgcgctagctcatattgtgcgcatgtcaaaaactataggcaaagaaactggcagtgtgtgtccagtgtggcctgctgtgattcatggccattattccagtgcaggagttgctgctgctctactatctggagcacttaatgttcccatggtgtttaccggtcattttcttgggaaagataagctcgaagggcttctcaagcaagggagacagacaagagaacaaataaacgtgacatacaaaataatgcgccgaattgaggcagaggagttgtcacttgatgcatctgaaatagttatcgcaagcacaaggcaagaaatagaagaacaatggaacttgtacgatggttttgaagtcatgcttgcgaggaagctccgtgcgttagtcaagcgtggcgctcactgttatggtcgttatatgcctcgtatggttataattcctccaggagttgaatttggccaattgattcatgattttgatatctatggagatgaagataacccatctccagcctctgaggatccatctatttggtttgagataatgcggttcttcacaaatcctaggaaacctatgattctggctattgcccgtccatatgctgaaaagaatattgcaacgcttgtgaaggcatttggtgaatgccatccgttgagggaacttgctaaccttacattgataatgggcaaccgtgaggctatttccaaaatgaacaaagtcagtgcagctgttttgacatcggtgcttacattgattgatgaatacgatttatatggtcaagtggcatacccaaagcatcacaagcactctgaagttcctgatatttatcgtttagcagcaagaacaaagggtgcttttgtaaatgttgcctactttgaacaatttggtgtcaccttgatagaggctgccatgcacgggttgcctgttattgcaacaaaacatggggctcctgttgaaattcatcaggttctggaaaatggtctccttgttgatccccatgatcagcatgcaattgcagatgccctctataagatgctttctgaaaagcagttttggtcaagatgtcgagataatggattgaaaaatatacaccaattttcttggcctgaacattgcaagaattacttgtcaaggatattaactctgggtccaagacatcctgctttcgcatgcaaagaagaccagaaggtgcctgtgaagtgcaggaagcatatatttgttattgctgtagactctgttaacaaggaagatttaattcaaattatcagaaattctgttgaggccacacgcactggaactatgtcaggttctacaggttttgtgttgtcgacttcactgacaatagcagagctacagtctgtaatagtacgcacaggcatgctccctactgactttgatgcctttatatgcaatagtgggagtgatatatattatccatcacaatctagtgatgtgccaagcaattcccgtgttacatttgcattggaccataactaccgatcacatatcgagtatcgttggggaggagaaggtttaaggaagtacttagttaagtgggcttcttcagtagtagaaagaagggggagaacagaaaagcaaatcatctttgaagattcagaacactcttcaacatattgtcttgcatttagagtggttaatccaaatcatttgcctcctttgaaggagctgcaaaagttgatgagaatccagtcactgcgttgtcatgctctgtataaccatggcgccaccaggctatctgtaattccaattcatgcatcgcgatctcaggctctaaggtatttgtctattcgctggggcatagagttgccagatgctgtggtcattgttggtgaaactggtgattctgattacgaggaactgtttggaggtcttcacaagacagtcatccttaagggtggattcaacactcctgcgaataggatccatacagtcagaaggtaccctttacaggatgttgttgctcttgatagctcaaatatcattggaattgagggattcagcactggtgacatcaggtctgctatgcaacagcttggtatacccacacaatga

SEQ ID NO: 3348 - protein, 1009 aa, Sorghum bicolor
MYGNDNWINSYLDAILDAGKGAAAAGAGAAAAARGRGGGGGGDRPSLLLRERGHFSPARYFVEEVITGYDETDLYKTWLRANAMRSPQEKNTRLENMTWRIWNLARKKKEWSVHRAMVLLNELCKGIEQKFQFQIDLDQFEKEEANRLSKRRLETEKPRNDATAEMSEDLFEGVKGEDAGDPSVAYGDSTTGNTPRISSFDKLYIVLISLHGLIRGENMELGRDSDTGGQVKYVVELAKALSSCPGVYRVDLLTRQILAPNFDRGYGEPDEMLASTSFKNFKCERGENSGAHIIRIPFGPKDKHLAKENIWPFIQEFVDGALAHIVRMSKTIGKETGSVCPVWPAVIHGHYSSAGVAAALLSGALNVPMVFTGHFLGKDKLEGLLKQGRQTREQINVTYKIMRRIEAEELSLDASEIVIASTRQEIEEQWNLYDGFEVMLARKLRALVKRGAHCYGRYMPRMVIIPPGVEFGQLIHDFDIYGDEDNPSPASEDPSIWFEIMRFFTNPRKPMILAIARPYAEKNIATLVKAFGECHPLRELANLTLIMGNREAISKMNKVSAAVLTSVLTLIDEYDLYGQVAYPKHHKHSEVPDIYRLAARTKGAFVNVAYFEQFGVTLIEAAMHGLPVIATKHGAPVEIHQVLENGLLVDPHDQHAIADALYKMLSEKQFWSRCRDNGLKNIHQFSWPEHCKNYLSRILTLGPRHPAFACKEDQKVPVKCRKHIFVIAVDSVNKEDLIQIIRNSVEATRTGTMSGSTGFVLSTSLTIAELQSVIVRTGMLPTDFDAFICNSGSDIYYPSQSSDVPSNSRVTFALDHNYRSHIEYRWGGEGLRKYLVKWASSVVERRGRTEKQIIFEDSEHSSTYCLAFRVVNPNHLPPLKELQKLMRIQSLRCHALYNHGATRLSVIPIHASRSQALRYLSIRWGIELPDAVVIVGETGDSDYEELFGGLHKTVILKGGFNTPANRIHTVRRYPLQDVVALDSSNIIGIEGFSTGDIRSAMQQLGIPTQ

SEQ ID NO: 3349 - DNA, 504 bp, Sorghum bicolor
gcgtgctccttcgacgccgccatgagcctccaggagcggaagcgcgccgtcaagtgctccgccgacgtcgccatggcagcggccgcagccgccggcagcgggcgcgcgaggtggcccaagaccatcttggccgccgccgccgcggcgtccagctccagccaccacagccccggcggcggcacgtgcaaggtgtggaagaccgcgtgctgcaggaggcgggtaatgaggaggcgcgtcgacgcgaagaggaggatcctcaggggcgccgcctacgcagctgcttctggtgccgctgccgcggcgagctgcgacgacgacgtcgcgaggaggctggtgcggaggaggacaatggcgctccggaaggtgatacccggagggaacgccgccgccatgatggacgacgccgcgctgctccgcgaaaccatggactacgtcgtccatctgcgcgcccaggtcgatgtgctccgccgcgtctcggcagccgtgcagagatccgccttcctc

SEQ ID NO: 3350 - protein, 168 aa, Sorghum bicolor
ACSFDAAMSLQERKRAVKCSADVAMAAAAAAGSGRARWPKTILAAAAAASSSSHHSPGGGTCKVWKTACCRRRVMRRRVDAKRRILRGAAYAAASGAAAAASCDDDVARRLVRRRTMALRKVIPGGNAAAMMDDAALLRETMDYVVHLRAQVDVLRRVSAAVQRSAFL

SEQ ID NO: 3351 - DNA, 2880 bp, Sorghum bicolor
atgggggacaactacgtagctgaacctgaggacgaggttccacaatcaatgtggcctgagaatataggagacaaacatcagaggcagttcagaatggaaaactttaggaaggaccaagatgctttcaaggatgtgaagtttgatgaaaagcctgttcatgtggattaccagcggcttattgaaatggcaaattctgagaaaggtatttctcagatgcaatactttatgaagcactgggaatataagagagccaatgctgctcggcttctggaggaagagctcggtcttctctgccaacaaaggaaagagattgagcaaaataagcaacaaatcttggaagaacaacgttttcaggatgagagttattatgctgtaaagcggcatgtaccgatactggatgaagtttatgaagatgaatggaagcgacctagcaaaaagaatgacgatctttctcgtagtagagagactaaaatagatgcagattatgacagtgtttcctactggaaagagcgggcaactaagttagaggaaaaacttgaggaaagcatccaaagggagcgttctttagttgagaaattggaggaaaatataaagaacctgcagtcacacacaccagctgaggaattctctggaatgctaaaacgcgctgattacttcttgcatttggttctacaaagtgctcctattgttattgctcatcaggatgctgatttacggtaccgtttcatatttaaccactatccaacacttgctgatgaggatgttattggtaagacagactatgagatattgtcaggtgagggtatagaagagatgaatagtgtcaagcgagaagttatggccacgggaatagcaactaaaagagaatttgcgtttaatacaccaatgtttggggcaaagacatttgtgacatacattgagccagttttcagcaaaggtggggaaacgattggcgtgaattatgttgcaatggacataacagatcaggtcaaaagaagagagaaaatggcagacataagggtgagggaagctgtccaaaatgccaaggaaaccgaacttagcaaatctcttcacataacagaggaaacaatgcgagcaaaacaaatgctagctaccatgtcccatgagatcagatctcctctttcaggtgttcttagcatggctgaaattcttgcaactaccaaactggataaagaacaacatcagttgcttgaagttatgttatcctctggagatcttgtattgcagctgatcaatgacatccttgatctttccaaagtggagtcaggggccatgaaactagaatctacgacatttagaccaagggaagtagttaaacatgtactccaaactgccgcggcttctctaaagaaggaattgacccttgaagggtgcataggtgatgatgttccagtggaggttattggtgatgtgctaaggattcggcaaattctgaccaacttgatcagcaatgcagtcaagtttacacatgaagggaaagttggaataattcttcaggtcgtgcatgacaagcaaccaggatgcaaaatagagggcgggaaaattcataagcgagcatattctgggacagcaattactgctgtagaaactgctgttgtctctccaagaaattgtgataaagataatttgcattgctcgaaacatgaagatgcttttcagaatggtgttccaacatgtgaaaatttcaaggaggatattgagggagaggaagtcgtttggcttcgctgtgatgtatatgacactggaataggaataccagagaagtccttaccattgctgttcaagaggtatatgcaagctagcaccgatcatgcgaggaagtatggtgggacagggcttggccttgcaatctgcaagcagttggtggagttgatgggtggtacactgactgtggtcagcaaagagaatgaaggatcaacatttacatttgtgctgccttgtaaaatccctgtaaaagaggagcatagtgatgatcctgatgaagtgcacagttctcagaatgattctgcaaacagcgatatagaaggttctttcttttttaagccacaaatgcgagcttctcttctgtctcctggagtttcaataatgaacaacacaaagttatttggtgccaagcttatgtgctatgatccgccggacaaattgttctcaaatggtttctcatcaacggaacctaattttacaaatacctctactgctcaccaacctaatggtgatactgttaggagcacagctgaagaagaacatgataatgcaatggtccttgaactgaatagtcaagctgaacgggtttccagttcccgaggagacttggtatctgtttcaggtgctgctccatgcaaagttcttgaagaacagtcattccacaagaaatcaaagtgttctccaaccagcaacaaagcaaagatcctcctagttgaagataacaaggtcaacataatagtggcaaaatcaatgctggagcagctgggccatgcaatagatatcgtaaataatgggatgcaagcaatccgtgcagtacagcagcaccaatatgatcttattctgatggatgttcacatgccagaaatggatggcctacaagccactaaacatatccgttcttttgagaataccggctgttgggacgtttctgtaaagcctgaagacaatcagatgataactgactcaactatttcatcagattctgcacatgcaaaaaagcaagggcagagggttcctataattgcgatgacagcaaattcattcgcagagagttccgaggaatgccttgctgcaggcatggattcctacatatctaagcctgtgaactttcagaatataaaagaatgcctgcagcggtatttaatgtctcaatga

SEQ ID NO: 3352 - protein, 959 aa, Sorghum bicolor
MGDNYVAEPEDEVPQSMWPENIGDKHQRQFRMENFRKDQDAFKDVKFDEKPVHVDYQRLIEMANSEKGISQMQYFMKHWEYKRANAARLLEEELGLLCQQRKEIEQNKQQILEEQRFQDESYYAVKRHVPILDEVYEDEWKRPSKKNDDLSRSRETKIDADYDSVSYWKERATKLEEKLEESIQRERSLVEKLEENIKNLQSHTPAEEFSGMLKRADYFLHLVLQSAPIVIAHQDADLRYRFIFNHYPTLADEDVIGKTDYEILSGEGIEEMNSVKREVMATGIATKREFAFNTPMFGAKTFVTYIEPVFSKGGETIGVNYVAMDITDQVKRREKMADIRVREAVQNAKETELSKSLHITEETMRAKQMLATMSHEIRSPLSGVLSMAEILATTKLDKEQHQLLEVMLSSGDLVLQLINDILDLSKVESGAMKLESTTFRPREVVKHVLQTAAASLKKELTLEGCIGDDVPVEVIGDVLRIRQILTNLISNAVKFTHEGKVGIILQVVHDKQPGCKIEGGKIHKRAYSGTAITAVETAVVSPRNCDKDNLHCSKHEDAFQNGVPTCENFKEDIEGEEVVWLRCDVYDTGIGIPEKSLPLLFKRYMQASTDHARKYGGTGLGLAICKQLVELMGGTLTVVSKENEGSTFTFVLPCKIPVKEEHSDDPDEVHSSQNDSANSDIEGSFFFKPQMRASLLSPGVSIMNNTKLFGAKLMCYDPPDKLFSNGFSSTEPNFTNTSTAHQPNGDTVRSTAEEEHDNAMVLELNSQAERVSSSRGDLVSVSGAAPCKVLEEQSFHKKSKCSPTSNKAKILLVEDNKVNIIVAKSMLEQLGHAIDIVNNGMQAIRAVQQHQYDLILMDVHMPEMDGLQATKHIRSFENTGCWDVSVKPEDNQMITDSTISSDSAHAKKQGQRVPIIAMTANSFAESSEECLAAGMDSYISKPVNFQNIKECLQRYLMSQ

SEQ ID NO: 3353 - DNA, 840 bp, Sorghum bicolor
atggaagagtatatcagagaagcaccccgtgccgatactgagagtaagagttcggaaaaccatgaagagaatcaacctagtgataatgaagaagcagctccacaggaagccgagaaaccagtggaagatgaaaaacaagaatctgcagagcctgaaacagagccacaacctgctgctgggcctccggaagaaccagtggaacctcagccacgggcgactactggggatctattaaacttggatgaagaagtaaaccccatgattgcagaccttgaagaaagcaatgcactggctcttgctattgtggcaccaggtaatgaaaacaagatgtcaaattctcgagacttgtttgcccttgacaaggctggatgggaattggctctggttactgcaccaagtaaccacacaaatcaacaagtggacaatcaattggctgggggatttgacaagctattgctagacagtctttacgaagacgaggcaaggagacagcaaatagccagtgtgacctacactggaagtcttgcagcaaacccgtttgccaccagtgatccatttgccacgtcaaacagctttgcgccaccgtcaaatgtgcagttagctatgatggcagagcagcagcaatattaccaggcacagcagcagcagtactatcaggtaccgcagcagcagcagcagcagcagcagatgacgatgttgccgccccaaacatatcagcagcagtctcagtattctgccccttcttctcaatctggattatccaatccttttggtgatccattcagtagccttgtcacgatggctaatccaccgaagcaaagcaattcaaatttagtctga

SEQ ID NO: 3354 - protein, 279 aa, Sorghum bicolor
MEEYIREAPRADTESKSSENHEENQPSDNEEAAPQEAEKPVEDEKQESAEPETEPQPAAGPPEEPVEPQPRATTGDLLNLDEEVNPMIADLEESNALALAIVAPGNENKMSNSRDLFALDKAGWELALVTAPSNHTNQQVDNQLAGGFDKLLLDSLYEDEARRQQIASVTYTGSLAANPFATSDPFATSNSFAPPSNVQLAMMAEQQQYYQAQQQQYYQVPQQQQQQQQMTMLPPQTYQQQSQYSAPSSQSGLSNPFGDPFSSLVTMANPPKQSNSNLV

SEQ ID NO: 3355 - DNA, 1734 bp, Sorghum bicolor
atgctccacttcatctcctcttcccctctccgtccccgattcctcctcctccctagcccaccctccaatcttcgcttcctcgccatgagcgccgccccctcgagctcctcgtcccgttcggtgcgcggtgtggcggtgccggtgccttccctcagcgccggcgaggcctgcgcagtggcagacgaggccttccagaggtacacgtcgccgagcttgaggagaggcggcgccggggtggccgtcgtgtggttcaggaatgacctccgagttcttgataacgaggcgcttctgcgtgcgtggtccgcttccgaggcggtcctgccggtgtactgcgtcgacccacgggtctttgcgggtagcacgcattactttgggttccccaagacgggagcattgagggcgcagttcttgatagagtgtttaggagacctgaagcagattctgaggaaaaagggcctcgatttgctagtccggcatggcaagcctgaagagatccttccatcaattgcaaaggctgtcagtgcacacacaatttatgctcataaggaaacctgtagcgaagagctccttgtcgaacgcctcgttagcaaaggcttggaacaagttcagattgctcaaggaggtgcatctgtcccgaagaagcctctgaaccccaggttgcagctcatctggggagcaacaatgtaccacatcgatgacctcccgttcccagttagcaacttgccagacgtgtacacccagttcagaaaggcagttgaatcgaagtcctcagttaggaactgcaccaagttgccaccgtcgcttggtccgctccctagttccagcatagatgagattggaggatggggggcaataccaacactggagtcattaggcctgagtgttacaaagtctgagaaaggaatgcatttcataggaggagagaatgcagctcttggaagagtacatgagtacttctggaagaaggatcagttgaaagactacaaggtgactaggaatggcatgttaggtccagactactccacaaagttctctccttggcttgcttctggcagtctttcaccacgttatatttgcgaagaggtgaagagatatgagaagcaaagagtggcaaatgattctacatattgggttttgtttgagttgatatggagagactacttcagatttctatcagcaaaatatgggaacaccatatttcatctgggaggtccgaggaaagtagtatcaaagtggagtcaggaccaagcactgtttgaatcatggagagatggtcgaactggatatcctcttattgatgccaatatgagggagctttcagccaccggtttcatgtccaaccgtggtcgtcagattgtctgctcatttcttgtccgagatatgggtattgattggcgaatgggagccgaatggttcgagacatgcttattggattatgacccagcttcaaattatggcaattggacgtatggagccggagttggcaatgatccaagggaagatcgatacttcagtatcccgaagcaagcaaagtcatatgatcctgaaggtgaatacgttgcatactggttaccagaacttcggtcacttgcaaaggaaaggagaaatttcccaggggcctcatacatcaggcagatagtacaactgaagtttgatggtggaaatcagaagaaggatcagcaattcaaccggcagagaagaccaaacaatatgtacagaagacaagtaaaatag

SEQ ID NO: 3356 - protein, 577 aa, Sorghum bicolor
MLHFISSSPLRPRFLLLPSPPSNLRFLAMSAAPSSSSSRSVRGVAVPVPSLSAGEACAVADEAFQRYTSPSLRRGGAGVAVVWFRNDLRVLDNEALLRAWSASEAVLPVYCVDPRVFAGSTHYFGFPKTGALRAQFLIECLGDLKQILRKKGLDLLVRHGKPEEILPSIAKAVSAHTIYAHKETCSEELLVERLVSKGLEQVQIAQGGASVPKKPLNPRLQLIWGATMYHIDDLPFPVSNLPDVYTQFRKAVESKSSVRNCTKLPPSLGPLPSSSIDEIGGWGAIPTLESLGLSVTKSEKGMHFIGGENAALGRVHEYFWKKDQLKDYKVTRNGMLGPDYSTKFSPWLASGSLSPRYICEEVKRYEKQRVANDSTYWVLFELIWRDYFRFLSAKYGNTIFHLGGPRKVVSKWSQDQALFESWRDGRTGYPLIDANMRELSATGFMSNRGRQIVCSFLVRDMGIDWRMGAEWFETCLLDYDPASNYGNWTYGAGVGNDPREDRYFSIPKQAKSYDPEGEYVAYWLPELRSLAKERRNFPGASYIRQIVQLKFDGGNQKKDQQFNRQRRPNNMYRRQVK

SEQ ID NO: 3357 - DNA, 3939 bp, Sorghum bicolor
atggagtccgacggcgacacgtcgccacctcgcccgcctacgccggcgccactgcgtgcctgcggcgcgggccacccggcatcgcactcgctgccgacctcggcgggcggccgcgtctgcctctcctgtgccgcggcgctcctctcctccgcgggcaccgcctccacgccatcccaccacgtcgcgcacgcgctcgccaacctctccctggcgctcgccgacccggcgttcctcaggccgctccgcgccgcgcacccacgcttcctcgcggcgccgctcgccgaggcactcgagggcgccgccgaccgccgcgatgccgcactcgccgcgcaggcgtgcgacgtcgcggccgacctcgccgccgttgtgggctcccccgctgattcagagctcgtcgcccgcctcgcccgcgtcctctcctccggctcactcgtgaagcatctccatacgctacattgtttggggcttttgctaaactctaccaaagatgctgcagcatatataggggacaaatgttctcttttcttaaaccttgttaatgatctccgacttccaagcgatgaaattcgtggagagatactctttgttctatacaaactcgctatactaaatgccaccccatgggacaatatatgtcaaattgaagatttggaccttctggcaattggtagaagcttgcttcagctctctcttgaagtcctactcaaaactcaaaatgatgctgttcgcctgaactgtattgcattgctccttactttagcaaagaaggagccctttgatcatttgctgattagcttccagagttctaacaactgcatagaagcagagtccatgcagacagattatatgtccctgaatgcttctcttgttctattcgctgaggctgtcaaaggatctctgctatctactaacctagaagttcagacagggacattggatttgatctttcatttcctgtcatctgatgcaaatatttgtgctctacttcaaattttgatcgatgaaaatgttgccgattacatatttgaggttctcaggttatcaggaaataatgatctacttgtcatttcctctattcgagtactattactttttgcgagattggaggaaaaattcaaagaaaagcttgccattggattttccactcttcttcctgttcttcactatgttgcagagataccatttcacccagtccagtcccatgttttacgacttgtttggatttgcatggtcaattgttccggtatcctctcaatgccccaagaagaacagatagcctgtactttgactgcaatcttgagaagaaatgtcaatggtgaacttgacatgagttctgaaacttttattctggtttgctcaatattaatagagattctgaagtcacctcatgctcatgatattgagaaactaccatcatttattgaagaagcatcaaaatatgcgatatcttcaacattgtcacatgagtgtgattctatgatcctcattcttcattctcttcttcttctgaaagaagcacttatattctgccttgaagggagcaaatacagtattgctagcacgaaggatcttgaggatagcatcatgggaacttgtggaactattttactgcaatggcttcaaagtgctgtggttgacggtaatgatgaagaaacattggcagagatccttcagattttccagattattttgtcaagggcatctgacaaaaagccgttaaagtttgctgaattgctagcatcatcatcatggtttagcttgtcatttggattcatgggcttatttcctactgatcgtgtaaaatcagtagtatatttggtcactagttcaattgttgacagggttttgggatgtaattatggagaaacaattcgagatgcacacatttatctaccatcagaccctacagaaatgatgtatttacttgggcaatgtagcacagaagacttcaacttggcatcatgccaatgtgctattctttctatattgtatgcctgttcattctacaatgaaaggctctgtgctaacaaccaaattctggcttctgttgagcaatacatcctcctcaatggtgggaacttcccatatgaaattaatggttctattatgcttacgcttctggtccatctttatgcctttgtcagaggcatttcctatagctgcagcattccatatagtccagaagccgagaatacactattccacttaatcatacataaggactgggatttgcttgtgacccgagtccattcggtagcaataaaatggctctttcagaaacaagaaattgtggaaccactcgccttccagatgctaaagttttgtaaaactttctgtgaagatgaaactgtcatgctctcaaacagcagtcagtcggtggacatacaaatgatttccgagcttgtactttctggagaaaccaccatctcatctttgctggtttccttgctagaccagatggtaaaggagggtacagaagatgagtttatatcatgtggtattgtcggttcattccatggcatatattgcttaccatactcttcaagcagcagaacagtttgttcctatttgatctttaacatcttacgttcagcaagtgcatcaacatttggccaggaagatgaatggcttcctcttgctctaaagttattggaatttatcacttcgggtattgactatacatctagtggccaagaacacaagatagtagttgggatactatgccttgttttgcatcattcatcaagtgaatttcttattgagcctgcaaaagccataatcttgaacagttctttggtttctttaacggatgccatagtaaacaaagcttgtgttaaaggcccatcattatttcaacacaaccaggagacaacctttggagaattcctgattcttgtacttctattggcgttcttctctctaagaagcttgcacaccattctagaggcaagtattgactggcaggacttccttcagcattcagatgatgtccagtccttttctgttctcggcattccatgccatgatttatgtcgtctcatgcactttggttcaccttctattaaacttattgcttcacaatgcctgttggagttgctcaagcgaatttcagatcaaaggtcatgtattgatgctgagttaagatgctctacgaaatatttgaagtccattattgcagtgacagagggtttgttgttcagtgaagacagtaaagttgctggaaattgcagtgcctgtctctctgtgattttaggatgggagaaatttggaagccaagagaaggtggcagtcagagaatctaaatggttcaggctaataatggaggaatttgttgtggccctgactgctcctggtttgacgtccaaatctttcaccagtcagcagaagtttgctgcaattatagctgtttcgttgctcaggctgagccaagtgccagattggctgacatcgttgtttgatgggcatctgatatctggcatcgtggctaatctttctgctaggaatgttactgcagaaatcgtcattctcttcagtgagctcatggctaggaagtatctcagtcaagagcacattgttgatctacataacttgttccaggtgtgcagaagacaggtctacgagggaagctccaaagcagcattgccagagcaaagggttgaaaaagtcgcgagaagcaccaatgacgtgctcgcatcgctctttgccctgatgaaccagtgcgcagagtccggcacggttcaagcggagcagcagagactcctgcgtgcgattgacctgttcttccaggagtctagcaggagagaacagcaatgttatgttacagctacttccccaccacagcgccaagacacaacaatgcctggggattctggaccaagacagggtcgcccaagcgtgaacacatccggctcagaatggatccggatccggcccgagtga

SEQ ID NO: 3358 - protein, 1312 aa, Sorghum bicolor
MESDGDTSPPRPPTPAPLRACGAGHPASHSLPTSAGGRVCLSCAAALLSSAGTASTPSHHVAHALANLSLALADPAFLRPLRAAHPRFLAAPLAEALEGAADRRDAALAAQACDVAADLAAVVGSPADSELVARLARVLSSGSLVKHLHTLHCLGLLLNSTKDAAAYIGDKCSLFLNLVNDLRLPSDEIRGEILFVLYKLAILNATPWDNICQIEDLDLLAIGRSLLQLSLEVLLKTQNDAVRLNCIALLLTLAKKEPFDHLLISFQSSNNCIEAESMQTDYMSLNASLVLFAEAVKGSLLSTNLEVQTGTLDLIFHFLSSDANICALLQILIDENVADYIFEVLRLSGNNDLLVISSIRVLLLFARLEEKFKEKLAIGFSTLLPVLHYVAEIPFHPVQSHVLRLVWICMVNCSGILSMPQEEQIACTLTAILRRNVNGELDMSSETFILVCSILIEILKSPHAHDIEKLPSFIEEASKYAISSTLSHECDSMILILHSLLLLKEALIFCLEGSKYSIASTKDLEDSIMGTCGTILLQWLQSAVVDGNDEETLAEILQIFQIILSRASDKKPLKFAELLASSSWFSLSFGFMGLFPTDRVKSVVYLVTSSIVDRVLGCNYGETIRDAHIYLPSDPTEMMYLLGQCSTEDFNLASCQCAILSILYACSFYNERLCANNQILASVEQYILLNGGNFPYEINGSIMLTLLVHLYAFVRGISYSCSIPYSPEAENTLFHLIIHKDWDLLVTRVHSVAIKWLFQKQEIVEPLAFQMLKFCKTFCEDETVMLSNSSQSVDIQMISELVLSGETTISSLLVSLLDQMVKEGTEDEFISCGIVGSFHGIYCLPYSSSSRTVCSYLIFNILRSASASTFGQEDEWLPLALKLLEFITSGIDYTSSGQEHKIVVGILCLVLHHSSSEFLIEPAKAIILNSSLVSLTDAIVNKACVKGPSLFQHNQETTFGEFLILVLLLAFFSLRSLHTILEASIDWQDFLQHSDDVQSFSVLGIPCHDLCRLMHFGSPSIKLIASQCLLELLKRISDQRSCIDAELRCSTKYLKSIIAVTEGLLFSEDSKVAGNCSACLSVILGWEKFGSQEKVAVRESKWFRLIMEEFVVALTAPGLTSKSFTSQQKFAAIIAVSLLRLSQVPDWLTSLFDGHLISGIVANLSARNVTAEIVILFSELMARKYLSQEHIVDLHNLFQVCRRQVYEGSSKAALPEQRVEKVARSTNDVLASLFALMNQCAESGTVQAEQQRLLRAIDLFFQESSRREQQCYVTATSPPQRQDTTMPGDSGPRQGRPSVNTSGSEWIRIRPE

SEQ ID NO: 3359 - DNA, 243 bp, Sorghum bicolor
atgctgtgggtggcgtgcaaggagccaagcatgcataacaaggccatgatcacctcctctctatcctctgatctgttgaatttcttttctgttcgttttttcgagatggtgatgcacttatttgatgctagctattgcatctgtatgattctctttgtgcctgcttgggttcgaattgtttctgcaggggtagaatttaggattaactcggagaaggcaggtgtgttcctctttcaaagctag

SEQ ID NO: 3360 - protein, 80 aa, Sorghum bicolor
MLWVACKEPSMHNKAMITSSLSSDLLNFFSVRFFEMVMHLFDASYCICMILFVPAWVRIVSAGVEFRINSEKAGVFLFQS

SEQ ID NO: 3361 - DNA, 1119 bp, Sorghum bicolor
atggcattgctggatgagtacagcagcgatgagctactccaggctcagcttcagctctggcaccaggccctcggcttcttcaagtctgtcgcgcttgcagtcgccttagacctcggcatccccgacgccatccatcgcctcggtggtgctgcaacccttcctcagatactcgcagaggctggggtcaacccccgtaagcttcgcaacctgcgtcgcatcatgcgtgtgctcaccttatctggcatcttcagcatcaaacaggcagcaacggcggcgtcagacggagaaggtccagtctacaagctgacgacggcatcccgcctcctcgtcaaagacgagagcttgacgaggagccagcagctgcctcctgttctatacacgcacctcatgctcacaccttgccgagaatccacggccggcatgggcataaacgcgtggttccggcaggagcaggatcagccgcagccagcggcgggtccattcgccctcgagtacaatggccagacggtctgggaaagagcagagcacgacgccacgacgttcccgttcgacgacgccatggcctccgacacggcctttctcatgccgatcgtcctcaaggagtgcagcgaggttttccatgggttaacctcgcttgtcgatgttgctggtgggcttggcggggccgctgctaccatagtggcggcgttcccggatttgaagtgcaccgtgctggatctcccacatgttgtcgccaaggctcccactgacaccaacgtgcattacgttgctggtgacatttttcaaagtattccaccggcaaacgcagtgttcctcaagtggattctgcatgactggcacgatgatgagtgtgtcaagatactgaagaactgcaaacaagcaatacctccacgagatgcaggagggaagataataataatagatatggtggttggatctgagccgtcagacctcaaacacatagagacacaggttttgtttgacctcatgatgatgaatgtcaatggggtcgagcgagatgagaatgagtggaagaacatcttcttcgaggcaggattcaaggactacaaaatcataccacttcttggtgttcgttctattatcgagctctatccttaa

SEQ ID NO: 3362 - protein, 372 aa, Sorghum bicolor
MALLDEYSSDELLQAQLQLWHQALGFFKSVALAVALDLGIPDAIHRLGGAATLPQILAEAGVNPRKLRNLRRIMRVLTLSGIFSIKQAATAASDGEGPVYKLTTASRLLVKDESLTRSQQLPPVLYTHLMLTPCRESTAGMGINAWFRQEQDQPQPAAGPFALEYNGQTVWERAEHDATTFPFDDAMASDTAFLMPIVLKECSEVFHGLTSLVDVAGGLGGAAATIVAAFPDLKCTVLDLPHVVAKAPTDTNVHYVAGDIFQSIPPANAVFLKWILHDWHDDECVKILKNCKQAIPPRDAGGKIIIIDMVVGSEPSDLKHIETQVLFDLMMMNVNGVERDENEWKNIFFEAGFKDYKIIPLLGVRSIIELYP

SEQ ID NO: 3363 - DNA, 1125 bp, Sorghum bicolor
atggatgacgacctgaaacatctgagggtcagcttctctggggtgaggcaggaagatcgtggccgccgcggcggcgagacaatcccaacaccatcttttcagcaaaggacgagttcacgcagagggtcactgagcaatgcagaggagtacgacgcggcgtatgcagccacggtggcagcagtggcatacgccattgccgcgcgagaggaggagaggctgttagcgtctcaagagagtccgtcgccgtatgctgccgcggacaagctttcgcgtggaaatggaaacaagcagcagcgtactgctgctgctgctgattccatggatgagcttgctcggacgaccacgccgcagtccagcaagtcaccacgtacacccaagagaggcgagagcctcaagaagccgattttcgaaggcggcagatcctcttcctcgagatggttcactggtaaagagcccatagacgacgattaccaagatgaacaagctaatgtgtcagtgaaacggataagactgccggttcacaggaagccagcacagggtgcggtttcagacgaaaggccccctgtttacactgatcctgcaccacgcgtaaagaaggaccccagtttcacccggaaaccgtcggaaaagagaggaagcaggagattcgagcaggatcagggcaaccagacggcgccggcacggccaatggacaagacgtcgagctcgtattcggcgggcggtagggagagtggtggagctgctactgctaccacgtcttctggtggtggagtggcggcgttctctagcgaaaacgaagccatggcagatgcttgggagaaggagaagctggcgaagatcaagaagcagtacaacgagacgatgcagacgattgctgaatgggagaccgagaagaaggccaaggccaagcgccagaaggagctgaaagatgagagtgagtcggacaggaagcgtgcgaaggcgctggaggagtacaacgaggagatgtcgaggatcaacaaggtggccgcggcgtcgaggctgacggcggaggacaagaggaggagcgccgagaggaaggtcagggacaaggcgcacaccataaggtccacggggaagcttcccgggacatgtggctgtttctga

SEQ ID NO: 3364 - protein, 374 aa, Sorghum bicolor
MDDDLKHLRVSFSGVRQEDRGRRGGETIPTPSFQQRTSSRRGSLSNAEEYDAAYAATVAAVAYAIAAREEERLLASQESPSPYAAADKLSRGNGNKQQRTAAAADSMDELARTTTPQSSKSPRTPKRGESLKKPIFEGGRSSSSRWFTGKEPIDDDYQDEQANVSVKRIRLPVHRKPAQGAVSDERPPVYTDPAPRVKKDPSFTRKPSEKRGSRRFEQDQGNQTAPARPMDKTSSSYSAGGRESGGAATATTSSGGGVAAFSSENEAMADAWEKEKLAKIKKQYNETMQTIAEWETEKKAKAKRQKELKDESESDRKRAKALEEYNEEMSRINKVAAASRLTAEDKRRSAERKVRDKAHTIRSTGKLPGTCGCF

SEQ ID NO: 3365 - DNA, 2847 bp, Sorghum bicolor
atgggcgcgctccgggcgatgctcctccgccgcttggcgctgctcgccgtggccgtggccgtgcccacggtcacggcggcggcggcgccgcccagcgaggtggccgtgggcgcgctcttcacctacgactccaccattggccgcgccgcgcgtctcgccatggagctcgccgtcgacgacgtcaacgccgaccgcaccgtcctcgcgggcacacacctcagcttgctgttccaggacaccaactgcagcggctttcttggcaccatcgaagcattgcagctaatggaaagaaatgtggttgctgttattggcccgcaatcctctgggataggccatgtcatctcccatgttgttaatgagctacatgtacctcttctatcatttgcggctacagatccaactctttctgcatcagagtatccgtacttcatcaggacaaccataagtgactacttccaaatgaatgccgttgctagcattgttgattactatcagtggaaagaggtgactgctatattcgttgatgatgattatgggcgaggtggtgtgtccgcccttggtgatgcgcttgcagcaaagagggcaaggatttcatataaagcagccattcctccaaattcaaatacagatgtgatcaacgatgtactgtttaaagcaaatatgatggaatcaagggtcatggttgtgcatgtcaatcctgacacagggatgagaatattttctgttgctaacaagctccaaatgatggccagtggctatgtctggatagtaactgattggctagctgctgtcttggattcctcaatgcctagagatcgtaaagatatgagtcatcttcagggactaattgttcttcgccagcacactcctgaatctgatgccaagaaaaagttcatatctaaatggaataatgcagctcgtaatagaagtattacttatggcttgaactcttatggtttttatgcttatgactcagtttgggctgttgctcgtggtatcgatcaatttctcaatagtgggcagcagatcaacttttctccagatccaatgttgcatgattctaatggcagcactttgcatctatcaactctcaagatatttgatggtggtgagcagatgctacagcaacttctgctcacaaattttacaggcctaactggtccagtccaatttaattcagatcgcaatttggtacacccagcatatgacatcctaaacctcggtggttctgaatcccggttgattggctattggtccaattactcaggcctctctgttgctcctcctgaaattttgtatcagaagccaccaaatacttcttcacttgtccagcggctccacaatgtggtttggcccggtgattccaccactactcctaaggggtgggttttcccgaacaatggccagcctctaagggttggtgtcccaatcaaaccaagctttaaggaattagtggcaggtggaaagggccctgataatgtgactggttattgcattgatatattcaatgcagcagttaaattgcttccttacccagttccatgccaattcataacagttggggatggcagaaagaatcctaactatgatgccattattaatatggttgccgccaattcccttgatgcagctgtaggcgactttgctattgtgagaaacagaacaaagattgcagaattcacacagccttatattgagtcagggcttgtgatagtagcaccagtgaaacaagcaacttcaagtgcctgggctttccttaaaccgttcacgttggagatgtggtgtgtaacaggtgctctttttatttttgtggggatagttgtttggattcttgaacatcggagtaatgaggagtttcgaggctctccacgacgacaacttataacaatattttggtttagcttctcaacaatgttcttttcacacagacagaacactgtaagtgcgctagggcggtttgtgttgatcatatggttgttcgttgtgctgatcatcaactcaagttatactgctagcttgacgtcaatcctcacagtccaacagctcgcaacaggaataactggaatcgacagtttggtttcaagtggtttacctattggatatcaggatggaaaatttaccaaaaattacctgattgatgagctcaacattcctgagtatcgattggtaccactaaatacaatccaggagtatgctgatgcccttaaacgtggaccaaaagacggcggtgttgctgcaattgttgatgagatgccatatgttgagatcttcctgtcataccactgcaatttcagaatagtaggacaggagttcaccaaggagggatggggctttgcattcaagagagactccccccttgctgcagacttgtcgacagccatccttcaactctcagagagtggccagcttcagagaatacacgacgagtggttcacagggcctagttgctcctctgatgacagcgaagtgggagcaaccaggcttggcctcggaagcttttggggccttttcctcgcgtgtgccctgatatgtctcttggctctggtagtgtttttcatacggatatgctggcagtataacaagtactccaattctgaagccgctggtgagcccagtgcagcagcaacagctgcagctgctgcagcagccgcagatgttgctgctgctgctgctgctgccactgatgctgtggaaagacagcggaagccatcacgccttggcagcttcaaagagattatacagtttgtcgacaagaaggaggaggaaattaagagaacgatgaaacgaagattaagcgagaaagataaccaagctgcaggatcctcagataaagataaccaagcctaa

SEQ ID NO: 3366 - protein, 948 aa, Sorghum bicolor
MGALRAMLLRRLALLAVAVAVPTVTAAAAPPSEVAVGALFTYDSTIGRAARLAMELAVDDVNADRTVLAGTHLSLLFQDTNCSGFLGTIEALQLMERNVVAVIGPQSSGIGHVISHVVNELHVPLLSFAATDPTLSASEYPYFIRTTISDYFQMNAVASIVDYYQWKEVTAIFVDDDYGRGGVSALGDALAAKRARISYKAAIPPNSNTDVINDVLFKANMMESRVMVVHVNPDTGMRIFSVANKLQMMASGYVWIVTDWLAAVLDSSMPRDRKDMSHLQGLIVLRQHTPESDAKKKFISKWNNAARNRSITYGLNSYGFYAYDSVWAVARGIDQFLNSGQQINFSPDPMLHDSNGSTLHLSTLKIFDGGEQMLQQLLLTNFTGLTGPVQFNSDRNLVHPAYDILNLGGSESRLIGYWSNYSGLSVAPPEILYQKPPNTSSLVQRLHNVVWPGDSTTTPKGWVFPNNGQPLRVGVPIKPSFKELVAGGKGPDNVTGYCIDIFNAAVKLLPYPVPCQFITVGDGRKNPNYDAIINMVAANSLDAAVGDFAIVRNRTKIAEFTQPYIESGLVIVAPVKQATSSAWAFLKPFTLEMWCVTGALFIFVGIVVWILEHRSNEEFRGSPRRQLITIFWFSFSTMFFSHRQNTVSALGRFVLIIWLFVVLIINSSYTASLTSILTVQQLATGITGIDSLVSSGLPIGYQDGKFTKNYLIDELNIPEYRLVPLNTIQEYADALKRGPKDGGVAAIVDEMPYVEIFLSYHCNFRIVGQEFTKEGWGFAFKRDSPLAADLSTAILQLSESGQLQRIHDEWFTGPSCSSDDSEVGATRLGLGSFWGLFLACALICLLALVVFFIRICWQYNKYSNSEAAGEPSAAATAAAAAAAADVAAAAAAATDAVERQRKPSRLGSFKEIIQFVDKKEEEIKRTMKRRLSEKDNQAAGSSDKDNQA

SEQ ID NO: 3367 - DNA, 393 bp, Sorghum bicolor
atggcgtcgcaccagcagcagcaggcgggagcggcagcagcggcggcgtccgtggacttcgaggactacctgccggtgatggcggagcgtctaggcgaggacgggctgatgcgggagctggcgagcgggttccgcctgctcatggacccggcgcgggggctcatcacgttcgacagcctccgccgcaacgcgccgctgctggggctgggcggcatgtccgacgccgacctccgcgggatgctcgccgagggcgacttcgacggcgacggcgcgctcagcgagatggagttctgcgtcctcatggtccgcctcagccccgagctcatggacgagcctcgcaggtggctcgacgacgccgtcgaccaggcgtcccgcttcctcttcaccagctga

SEQ ID NO: 3368 - protein, 130 aa, Sorghum bicolor
MASHQQQQAGAAAAAASVDFEDYLPVMAERLGEDGLMRELASGFRLLMDPARGLITFDSLRRNAPLLGLGGMSDADLRGMLAEGDFDGDGALSEMEFCVLMVRLSPELMDEPRRWLDDAVDQASRFLFTS

SEQ ID NO: 3369 - DNA, 2184 bp, Sorghum bicolor
atggctccgatacggcggaagaagcacgccatgatccggttcctgaagaaggacgtcgccgacctcctcgccaatggcctcgacacccacgccttcggaaggatggatggcctgatagttgagctgaaccatgcttcttgctatgatatgatcgaaggattctgtgattacattgggaagcaactgggaagccttcagaagcagagggaatgccccccagaattcagggaagctgtatcaaccctcatatttgctgctgctcggtatcctgatttacctgaactttgtgacctaaggcacatattcacagagagatatggaaattttgttgagcattttgttaaccgggagttcatttggaaacttgacagtacagagttcactaatgaggaaaggttccaagtcatgcaaagtgttgctgaagaattatccgttagttttgatgccaaggaattgcaactcaagttatgggccacaccggaaacagaacatgatatggttgagaagggttcaaggaagccagcagaattatcaatgcctttatccaacaagcagagatgcgtcaaggatgctccatatgaagaacaagaggatatccttgagaagagttcgaggaagccagcagaactagcaatgcctttattcgacaagacaaagtgtgaaggggatgctccatgtgaaagaaaaaataaggatatgcttgagaattactcaatcaagcccgtagaactagcaactgcttcatccaacaagcagaaggttactgaggatgttccatgtaaaagaaactgtgatgctgaacctgcataccatactgagaaagtggagatacagttgatccaaaaagatattcaagctgttgctgatgcacaccatacaatcgatgagcattcaaggaagcagcaacctgatgtgtctgatgagaaggaagatttgcagaaaccagtgtctcctgtggacactaacagaaggaacacccaaaaagatgttcagaagcttaacagaagagctgtccgccctttggaaaaggagctgatggaagcagtggagcttgatctcaatggcctacctaagaatggatttggtgcagtcaaatttcctgaaacagatggcaacaaatcagttcaactaaatgtcaagccaaacgaggctgtgagagattaccatattgaaaaagagaataacaaagtccttcatgcacgcatgcctggtggtcctgaacacaatggtagacatgcagattcagggctaagagttcagcgcccagacaatcaaggacgtccagtcagtcctcttagtggtaacactagaaataaggctccttacactaagcggaatgttgcaaacatgaagaatcctactgaaaaacaagcaaacagtggtttcttgcatgataaaccgcagcatttagctgatctgggatatccaaaaactccaagtggttacagcaagcccaacatccctggacaaactgaccacttggagaacaaagatgtgcttcgacctgtttctgttagaaggagaactgcaaagctgccagcacctgttgatacttatgttgaggtgcctaacaatgagaaggtcacaagccaaacacccaaaagtcacagaaaccactcaagcaggcagaatggtgctaaatatgaccagaaccggaaatgcaatgggactgatgatgttggtagagggacgaatgctcagataactccaggtagccaatcaaagcacataggcaggaggaatggaactttgaaccacatcaatgactacggcaggttgatgcagcgtaggcaacctgaagcagatgagactgctattgatttcggtaatctcttgcctcaaaatgcaaatggacagaggagacacaacagcggacacaatggagaccttgatgaggaggacaggatgatggacaagcttttgatgcactatagcaagaagaaaggttcggacccaaccaacaatgaaggacatatagatgctgtgcagaaggtttcgttgcatcccccaggtagagctatctcgctaccgcctgaatctgttggcccaggtgaagatgcgaaggttcctgctcggtccacctcacttcagccagatggtcctaagagtgcgcatgtgcacccaaaaatgccagactttgatgagttggctgctcgggtcaaggctctgaggaaggcggcataa

SEQ ID NO: 3370 - protein, 727 aa, Sorghum bicolor
MAPIRRKKHAMIRFLKKDVADLLANGLDTHAFGRMDGLIVELNHASCYDMIEGFCDYIGKQLGSLQKQRECPPEFREAVSTLIFAAARYPDLPELCDLRHIFTERYGNFVEHFVNREFIWKLDSTEFTNEERFQVMQSVAEELSVSFDAKELQLKLWATPETEHDMVEKGSRKPAELSMPLSNKQRCVKDAPYEEQEDILEKSSRKPAELAMPLFDKTKCEGDAPCERKNKDMLENYSIKPVELATASSNKQKVTEDVPCKRNCDAEPAYHTEKVEIQLIQKDIQAVADAHHTIDEHSRKQQPDVSDEKEDLQKPVSPVDTNRRNTQKDVQKLNRRAVRPLEKELMEAVELDLNGLPKNGFGAVKFPETDGNKSVQLNVKPNEAVRDYHIEKENNKVLHARMPGGPEHNGRHADSGLRVQRPDNQGRPVSPLSGNTRNKAPYTKRNVANMKNPTEKQANSGFLHDKPQHLADLGYPKTPSGYSKPNIPGQTDHLENKDVLRPVSVRRRTAKLPAPVDTYVEVPNNEKVTSQTPKSHRNHSSRQNGAKYDQNRKCNGTDDVGRGTNAQITPGSQSKHIGRRNGTLNHINDYGRLMQRRQPEADETAIDFGNLLPQNANGQRRHNSGHNGDLDEEDRMMDKLLMHYSKKKGSDPTNNEGHIDAVQKVSLHPPGRAISLPPESVGPGEDAKVPARSTSLQPDGPKSAHVHPKMPDFDELAARVKALRKAA

SEQ ID NO: 3371 - DNA, 1443 bp, Sorghum bicolor
atggcgagtagtgctgctgcgccatggtcgttaacgttgttcttcctcccgctgtgtttcctcctcgtcgtctccgtggcgctcggcgcccatgatgtcaacaagcccgggggccactacaacctcagcagggagaccttccctcccggcttcgtcttcgggacggcgtcgtcggcgtaccaggtggagggcaacacgcgaaagttcggacgaggcccctccatctgggacactttcctcaagtatccaggcactactcctgataacgcgacagcggatgtgtcggtcgacgagtacgatcgctacatggatgatgtggacaatatggtccgggttggattcgacgcgtaccgcttctcgatctcatggtcgcgcattttccccagtggaattgggagggtcaacaaggacggcgtggactattaccacaggctcatcgactacatgttggctaaccatattactccctatgttgttctctaccactacgaccttcctcaggtgctgcaagaccagtacaatggctggttaagccccagaattgtgcctgatttcacagcattcgcagatttttgctttaagacatacggcgatcgggtgaagttttggttcaccatcaacgagccccagatggtggctagccatggctacggagacgccttcttcccccctggcagatgcactggttgctacttcggcggcaattccgccaccgagccgtacatcgccggccatcaccttcttctttcgcatgctgctgctgtcaagctataccgcgagaagtacaaggttcatcagggtggaaagattggcatcctgcttgacttcgtctggtatgagccgctcaccaagtcgatcgaggacgagttcgcggcgcaccgggctaggatgttcacccttggctggttcctgcacccaatcacctacggccattacccggagacgatggagaagatagtgatgggaaggctgcccaatttcaccttcgagcagtctgcaatggtgaaaggttcagcagattacatcgccatcaaccactacacgacgtattacgccagcaacttcggatactcggactggctctacgttgttccatgggggctctataaggctctcatttggacaaaggagaagttcaacaaccctgtcatgctcatcggcgaaaacggaattgaccagtcgggaaatgaaactttgccgcacgccctgtatgacaagttcaggatagactacttccagaagtaccttcaggagctccaatatgccatacgcgatggtgcaaatgtcttcgggtactttgtgtggtctctgctagacaactttgagtggcggctcggctacacctccagatttggaattgtacatgtggaccgaagcacgttcgttcggtaccccaaggactcagctcgatggttccggaaggtgatcaagaacgaggactaa

SEQ ID NO: 3372 - protein, 480 aa, Sorghum bicolor
MASSAAAPWSLTLFFLPLCFLLVVSVALGAHDVNKPGGHYNLSRETFPPGFVFGTASSAYQVEGNTRKFGRGPSIWDTFLKYPGTTPDNATADVSVDEYDRYMDDVDNMVRVGFDAYRFSISWSRIFPSGIGRVNKDGVDYYHRLIDYMLANHITPYVVLYHYDLPQVLQDQYNGWLSPRIVPDFTAFADFCFKTYGDRVKFWFTINEPQMVASHGYGDAFFPPGRCTGCYFGGNSATEPYIAGHHLLLSHAAAVKLYREKYKVHQGGKIGILLDFVWYEPLTKSIEDEFAAHRARMFTLGWFLHPITYGHYPETMEKIVMGRLPNFTFEQSAMVKGSADYIAINHYTTYYASNFGYSDWLYVVPWGLYKALIWTKEKFNNPVMLIGENGIDQSGNETLPHALYDKFRIDYFQKYLQELQYAIRDGANVFGYFVWSLLDNFEWRLGYTSRFGIVHVDRSTFVRYPKDSARWFRKVIKNED

SEQ ID NO: 3373 - DNA, 720 bp, Sorghum bicolor
atgagaaccagggatacaggtatggctattgatttgcttcatattcacagaatcctctccaccctgttggagataaagggaataatcatcgcgagatatataaaaggtaaagataatatccagaaaataaccaaattattgctgaaagctggtgagcaaaagcttttatgcaccttggaagagccaatggacgagcactgcatacaagacagcaaggactcaattcggagaacaatcatggagcatgataaggtcttcagacagcaggtgcatgagctgcatcgtttgtatcatgtacaaagatcattgatggctgaaagcgataaccatagttatcaaccgagaacagaagaaactcatgaaatggtgcagggatcaaggtcgaatctcaagagtagtccttctacctcagggacaaatcaatctgctcgccttggtaatgcacaacactcaactccccagcaagtaactgaagatttgagtcttcatgaatgcaagccagtaaactgcctcagcctctttagtgaagaaaactcaacagtcaaagaaagatttcacagggagaaccataaatcagcagaagatgaaagttggaatgcctctgtagggagtgatcttgacctcaaactaagcattggccccagttcacattcaccaaaaagaccgcactggctattctcaggaagcagggaaagaaacccttctggtcagcatcgatga

SEQ ID NO: 3374 - protein, 239 aa, Sorghum bicolor
MRTRDTGMAIDLLHIHRILSTLLEIKGIIIARYIKGKDNIQKITKLLLKAGEQKLLCTLEEPMDEHCIQDSKDSIRRTIMEHDKVFRQQVHELHRLYHVQRSLMAESDNHSYQPRTEETHEMVQGSRSNLKSSPSTSGTNQSARLGNAQHSTPQQVTEDLSLHECKPVNCLSLFSEENSTVKERFHRENHKSAEDESWNASVGSDLDLKLSIGPSSHSPKRPHWLFSGSRERNPSGQHR

SEQ ID NO: 3375 - DNA, 564 bp, Sorghum bicolor
atggctctggcgccggcgcctctccagtgcttcctcacgggcagcagcagaccggtgtgcacggcgacgccgcccaagcacgcgaggaggccgtcgaggatctcgtgcaaggcgtccggcgacgacaaggacaaggtcccgtcgggagggaatgatcttggggtcaagctcgggaagctggccatggtcgcgctggccgccggcgtgctggcgctcggccccgtcgacggcgccttggcggccaagtccggcggcagggtcggcgggcaggccttccggtccgcgccacgatcgtccggccctcggataaacaactccaggacgaacatctacatcaacccgccggtggcgccgcctctgggcggatacggctacgggagcccgttcttcggcggctacggctacgggtggtcgccgttcagcttcttcgcgcccgggccgagcgtcgccgtcggggtcggcggcggcttcgacacgctcgtcctcttcttggtgctgggcgccgtcgtcggagctgtcaggcggtttctcaacaggaacaacgatgattacgacgactactga

SEQ ID NO: 3376 - protein, 187 aa, Sorghum bicolor
MALAPAPLQCFLTGSSRPVCTATPPKHARRPSRISCKASGDDKDKVPSGGNDLGVKLGKLAMVALAAGVLALGPVDGALAAKSGGRVGGQAFRSAPRSSGPRINNSRTNIYINPPVAPPLGGYGYGSPFFGGYGYGWSPFSFFAPGPSVAVGVGGGFDTLVLFLVLGAVVGAVRRFLNRNNDDYDDY

SEQ ID NO: 3377 - DNA, 2790 bp, Sorghum bicolor
atggcagatgcgctgtttgttgttctcagaaaagttgccctttccctgggagaaggcgcactggtgaagattggcacggatgtggttgaggcagcgccgatcttgacagattttgagcatggcatgagacagatcgagggtgagctcttgatcctgcaggcctttattgggcaggtccgaatgcagaaagccggtgacaaggcatttcacgcatggttggaccaggttagagatgtctcccatgaggtggaagatatcgttgacgagtatgcttaccttactgcgcaagacgtggatacaagcagcttcttcaagagaaagttccatcaggtgaagaactttgcggcatggcagaagttaccagtccggatcagtcaagtggaagctcggattcagaggctatctgaaatgaggaatcgttatgggatttctgtaggtgagcaagacaggagtagcaagttgcagcaatccaatcaactctctgtgtcagattctgcttacttaactgatgactctgaaatagtagggcatgccgaggaaattgggagactgacacaatggttacttgaggagaaacaagaccgaactctaatagccatcttcggtatgggaggtctaggtaaaactaccgttgcaagcagtgtctacaagaaccaaaagatcaggagagattttgattgtcatgcgtgggttactgtatctcagacttaccaagttgaagagcttctgagagaaatcatgaatcagttaacagagcagagatcaagtttggcaagtggcttcatgaccatgaatcgcatgaaattagttgagataatacagagctatttgcgtgacaaaaaatatttcattgtcttagatgatgtatgggagaaagatgcttggtcatttctgaactatgcatttgtcaaaaacaactgcggaagtaaagtgctgataacaacccggagaaaagatgtgtcttctttggcagttcacaatcgtgtaattgaacttaaaactcttaactatgctgaatcatgggaactattctgcaaaaaggcgttttttgcattggagggcaacatatgtcctaagaatctcacatctttggcaaagaaaattgctgataagtgtcaaggattgccattggctattatagccatcggaagtatcctatcataccatgcattagatgaatgggagtgggcatttttctacaaccaacttaattggcagttagctaacaattcagagctaagctggatctctactgtcttgaatctgagcttggatgatctcccaagtcatctgaggagctgctttctatactgcagcctatttcctgaagatcactggattaaaagaaaacagatagccaagttatggattgcggaaggttttgtggaagagagaggggatgggacaacaatggaggaagttgctgagcattaccttgcagagctaactcaccgttctcttcttcaggtcatagaaaggaatgcaaatggaaggccaagaacatttgttatgcatgatcttgtgcgggaagtaacctcaataactgctgaaaaggaaaagtttgcggttatacacggccatgttggtgcaacccaactttcccataatgcccgccgcttgtgcatccaaaacagtgcacattcccaaaactatttaggaaattcacatctccggtcattcattttgtttgacagtctagtaccatcttcctggatatatgatgtctcatcacatttcagactgctgagggtcttaagcttaagatttaccaatattgaacaagtgccatgcatggtcacagaattgtataacttgcgttatctggatatttcgtacacaaaagtcaagcagatacctgcatcattcagaaaactcgtgcaccttcaagttttagatctcagattcagctatgtggaggagttgccattggaaataactatgctaactaatttacgtcatttacatgctgttgtagttcgtgattttcaagaaagatcactgaattgcttcagtgctacaaaaattcctggcaatatttgtggtctaaagaatcttcaatctttacatacggtttcagctaataatgatctggtttcacagctaggaaagttgacccttatgagaagcttgactataatgagtgtgcggcaaagctacattgcagagctatggaactccctgacaaaaatgcctaacctgagtgtcctgattatttttgcgtctgatatggatgagattcttgacttgagaatgctgaggcccttacctaaccttaagttcttctggctggcaggaaagatgatgggaggcatgctcccattgatattcaataagtttgaaaagctaacacggttaaaattggactggtctggtctgaataaggaccctataagctccttctcttacatgttaactctagttgatctgtggctgttcggggcatattatggggaacatttatctttttgtgcaggatggttccccaatctcaaaactcttcatattgctgatatggaacatctgactcaaattaagatagaggatggaacaatgatgggtctacatcatctggaacttgttggtttaaggaatatgagggtagtacctaagggtatcaagtatattagaacactccgtcagatgtttctgactgatatgccaaaggagttggttgaaagcctgcgaggaagtgatagtcacattgttcagcatgttcctaacatccatatttttgactccactgattctgaagcaggtaatctccacattcttaaccaattaataatttaa

SEQ ID NO: 3378 - protein, 929 aa, Sorghum bicolor
MADALFVVLRKVALSLGEGALVKIGTDVVEAAPILTDFEHGMRQIEGELLILQAFIGQVRMQKAGDKAFHAWLDQVRDVSHEVEDIVDEYAYLTAQDVDTSSFFKRKFHQVKNFAAWQKLPVRISQVEARIQRLSEMRNRYGISVGEQDRSSKLQQSNQLSVSDSAYLTDDSEIVGHAEEIGRLTQWLLEEKQDRTLIAIFGMGGLGKTTVASSVYKNQKIRRDFDCHAWVTVSQTYQVEELLREIMNQLTEQRSSLASGFMTMNRMKLVEIIQSYLRDKKYFIVLDDVWEKDAWSFLNYAFVKNNCGSKVLITTRRKDVSSLAVHNRVIELKTLNYAESWELFCKKAFFALEGNICPKNLTSLAKKIADKCQGLPLAIIAIGSILSYHALDEWEWAFFYNQLNWQLANNSELSWISTVLNLSLDDLPSHLRSCFLYCSLFPEDHWIKRKQIAKLWIAEGFVEERGDGTTMEEVAEHYLAELTHRSLLQVIERNANGRPRTFVMHDLVREVTSITAEKEKFAVIHGHVGATQLSHNARRLCIQNSAHSQNYLGNSHLRSFILFDSLVPSSWIYDVSSHFRLLRVLSLRFTNIEQVPCMVTELYNLRYLDISYTKVKQIPASFRKLVHLQVLDLRFSYVEELPLEITMLTNLRHLHAVVVRDFQERSLNCFSATKIPGNICGLKNLQSLHTVSANNDLVSQLGKLTLMRSLTIMSVRQSYIAELWNSLTKMPNLSVLIIFASDMDEILDLRMLRPLPNLKFFWLAGKMMGGMLPLIFNKFEKLTRLKLDWSGLNKDPISSFSYMLTLVDLWLFGAYYGEHLSFCAGWFPNLKTLHIADMEHLTQIKIEDGTMMGLHHLELVGLRNMRVVPKGIKYIRTLRQMFLTDMPKELVESLRGSDSHIVQHVPNIHIFDSTDSEAGNLHILNQLII

SEQ ID NO: 3379 - DNA, 405 bp, Sorghum bicolor
atgatggtgatgggctacttccggtcgacgaacaagtccgcgacgtcggcagcgggcggcaagaacaagaagaaggcgaagaacagctgtgcgccggcggcgcgcgaggaggcggccggactgcgggaggcgctgctggaccagccggcggcggcggaggaggacggcggcgttcctaagggctacttcgcggtgtacgccggggaggagtcccgccggttcgtcgtgcccacggggtacctccgggagccggcgttccgggacctcatggagcgcgccgccgacgagttcggcttcgcgcaggccggcggcctgcgcgtgccctgcgccgaggaggacttcgaggacctcctgcgccgtctccagcgcaagaacggcggcgccgtcgggaagggcaagaaataa

SEQ ID NO: 3380 - protein, 134 aa, Sorghum bicolor
MMVMGYFRSTNKSATSAAGGKNKKKAKNSCAPAAREEAAGLREALLDQPAAAEEDGGVPKGYFAVYAGEESRRFVVPTGYLREPAFRDLMERAADEFGFAQAGGLRVPCAEEDFEDLLRRLQRKNGGAVGKGKK

SEQ ID NO: 3381 - DNA, 1947 bp, Sorghum bicolor
gtgtgggagttcgacgccgacgctggcacgccggaggagcgcgccgaggtcgagaggctgcgtcaggacttcacccgccaccgcttccagaagaaagagtcccaggacctcctcctgcgcatgcaggaaaccctgaatatacattatattaattaccattattttgggctcgggtctaggactagtccatgcttgggcctgcacatacagtatgcaaaacaaaaccaccttgtagaaaatattcctgccgtgaagcttgaaaagggtgcagaggttacagaggagattctattaacttcattgaagcgagctatgaatcagtattctgctctacaagcacatgatgggcattggcctggtgattacagtggaattctgttcattatgccaatatttaatgaagatggaggttggggcacacaagtgttggggccaagtagcatgtttggatcatgcttgaactatgctacattgaggcttcttggcgaggcgccaaatggcgagaatgatgcgttggccaaagggcgtgcttggattttaacccacggaagtgcaactgcgataccacaatggggaaagatatggctctctataattggtgcttatgaatggtcaggaaataatccaataattcctgaattgtggatggttccatattttcttccaatccatccaggacgattttggtgtttttgccgtttggtgtatatgcccatggcttacctttatgggaagaaatttgttgggcccatcactgaaactatactggaattaagagaggagctctatagcataccatatgacactattgactggaacaaggctcgtcattcttgtgccaaggacgaccttcgctatcctcgctcagagttgcaaaatattattttcagttgtctcaacaagtttgtggagccaatgttaaattgctggccagttaacaagctgcgagagaaagctttggacaacctcatggagcacatccactatcaagagaaaactaccaaatacatttgtatttgtcctattgataagaaaaatccaaattcagatgcattcaagaagcatcttccaaggatttatgattacttgtggcttgcagaagatggcatgaaggcacaggtttatgatggctgtcagagctgggagacagcattcatagttcaagccttttgctcaacagatcttgccaatgaatttagtcaaactctagaaagagcatacgattttatcaaaaaatcacaggttcttgaaaatcatataaattacgaaagctattatcgtcataaatcaaagggttcatggacactttcaacagcagacaacggatggtctgtatcagattgtacagcagaagctctcaagaacaaagacggaaccttttcaacatatgaatgtaaaagaacagtctcttggatagagattctcaatccttctgagagctttataaacatcgtcgtggattatccatctgttgaatgcacatcatcagttctcgaagctttgacattgttcaaagagctatatccaccataccgtgccaaagagatcaaaaaatgtattaaggattgtgctatgtttattgagaacaaacaacgaaaggatggttcatggtatggaacttggagcatatgtttcacttatggaaccatgtttgcaataaaaggattggttgctgctggaagcacatatgatactagttcttgcatcaggaaagcatgcaaatttctgttgtcaaagcaacaaattacaggtggatggggggaaagctatctatctagcgaaacagaggattatgttgatggaggtactcctcatgcagtaaacactgcttgggcaatgttagctttgatttatgccggccaggttgagcgcgatccagtaccattatgtcatgctgcaagagaattgatcaacatgcagctagagacaggcgagttcccccaacag

SEQ ID NO: 3382 - protein, 649 aa, Sorghum bicolor
VWEFDADAGTPEERAEVERLRQDFTRHRFQKKESQDLLLRMQETLNIHYINYHYFGLGSRTSPCLGLHIQYAKQNHLVENIPAVKLEKGAEVTEEILLTSLKRAMNQYSALQAHDGHWPGDYSGILFIMPIFNEDGGWGTQVLGPSSMFGSCLNYATLRLLGEAPNGENDALAKGRAWILTHGSATAIPQWGKIWLSIIGAYEWSGNNPIIPELWMVPYFLPIHPGRFWCFCRLVYMPMAYLYGKKFVGPITETILELREELYSIPYDTIDWNKARHSCAKDDLRYPRSELQNIIFSCLNKFVEPMLNCWPVNKLREKALDNLMEHIHYQEKTTKYICICPIDKKNPNSDAFKKHLPRIYDYLWLAEDGMKAQVYDGCQSWETAFIVQAFCSTDLANEFSQTLERAYDFIKKSQVLENHINYESYYRHKSKGSWTLSTADNGWSVSDCTAEALKNKDGTFSTYECKRTVSWIEILNPSESFINIVVDYPSVECTSSVLEALTLFKELYPPYRAKEIKKCIKDCAMFIENKQRKDGSWYGTWSICFTYGTMFAIKGLVAAGSTYDTSSCIRKACKFLLSKQQITGGWGESYLSSETEDYVDGGTPHAVNTAWAMLALIYAGQVERDPVPLCHAARELINMQLETGEFPQQ

SEQ ID NO: 3383 - DNA, 1323 bp, Sorghum bicolor
atgggttctttcgggatgaactggaatcagaagaactccatggtgtgggattgggaacatctagtgccatctgtctcgaatgcagttacaaggcatggatctgctaattcatctggtggtactcttacttctagctcagagctagggcatggttcatccaagagctctatttcagcatccattgattcaccatctggagtagggaacagcttagagttcaattttgccgctgttcaaaggcatgttaagaacacgggcaccaatggcagagtcgatgactcagggaattctccatcgtcaatgatagccttcagccaaggagagccactgatcagcctcaagcttggaaaaagggcttacttcgaaaatgtctgtggaggacaggaggccaaggtttctgcaccttcagatgttacttctgcagtcaccgtggtcaagaagactaaggtgtctcagcagaatgcaaagaactggtactgtcaggttgaaggttgcaaagttgacctgtcttctgctaaagattacaaccgcaagcacaaagtctgtgtagctcattctaaagctcccaaggtggttgttgctggtctagagcgccggttttgccaacagtgtagccggtttcatggtttggcggagtttgatcagaacaaacgaagctgtcgtaggcgtcttactcatcataatgcacgaaggaggaagccacaggcagatgcaatttcattcaattcatcacggctctcgtcaatgttttatgatacaagccaccggacaaatcttttctttagtcaacctctctatggccaagtgagaagcaatgcagtatctccgtgggataactcgggaggcttcaaatttatggaaacaaaacatctgtcagtgcagccaacaaaaacagtaggcctggatgagctgcatttctcaaccccccagatatcaactagtgttgtggcgcacactggacatcatcataacttcgataggttcatgccattcaagggaactaacacaaaggttcttaaccaagtttcaggtgtggaagcttcggcgaccgcttccaactctaataacggagccccagaacctgggcgtgctctctctcttctgtcagacggttcttggggctcaaattcagccgtcatccagcagcctccttctcacgcagatgctggtgcattgccgcccctcgccaccgttgctgtctccaacaccgccgccaggcatcctcttgacccgtccctgggaaggttctggcaagacgatcatcccccactcgacggacctgcacctcagattcaggaactggcgcacctccgaacatggtga

SEQ ID NO: 3384 - protein, 440 aa, Sorghum bicolor
MGSFGMNWNQKNSMVWDWEHLVPSVSNAVTRHGSANSSGGTLTSSSELGHGSSKSSISASIDSPSGVGNSLEFNFAAVQRHVKNTGTNGRVDDSGNSPSSMIAFSQGEPLISLKLGKRAYFENVCGGQEAKVSAPSDVTSAVTVVKKTKVSQQNAKNWYCQVEGCKVDLSSAKDYNRKHKVCVAHSKAPKVVVAGLERRFCQQCSRFHGLAEFDQNKRSCRRRLTHHNARRRKPQADAISFNSSRLSSMFYDTSHRTNLFFSQPLYGQVRSNAVSPWDNSGGFKFMETKHLSVQPTKTVGLDELHFSTPQISTSVVAHTGHHHNFDRFMPFKGTNTKVLNQVSGVEASATASNSNNGAPEPGRALSLLSDGSWGSNSAVIQQPPSHADAGALPPLATVAVSNTAARHPLDPSLGRFWQDDHPPLDGPAPQIQELAHLRTW

SEQ ID NO: 3385 - DNA, 1290 bp, Sorghum bicolor
atgcaggcgtcgggggggcgcccgagctccggcgcgtacgcgcgcctcatccgcgcgctgtcccgcgcggggcgcgcgctggaggccgaggcgctcctcctcgagatgcgccgccacggcccgcgcccggacgccgcgcactacaacgcgctcctcgagggcctgctcgccgccgcgcacctccgcctcgccgaccgcctcctcctccagatggccgacgacggcgtcgccaggaaccgccgcacctacacgctcctgctgggcgcgtacgcgcgcgccggccggctcgaggactcgtggtgggtgctaggtgagatgaggcgccggggcatccgcctcgacaccgccgggtatagcatgctcgtgcggctgtaccgggacaatggcatgtggaagaaggccatcgacctcgtcatggagatgcaggaggttggggtggagctggatgttaagatctacagcggcctcatcgacacgttcggcaagtatggacagctagcggacgcgcgcagggtgtttgataaaatgcgcgccgaaggcatcaagccggatatatcgacttggaatgcattgatacaatggcattgccgggtggggaacatgaaacgcgcactgcggttcttcacctccatgcaggaggaagggatgtacccggacccaaagatatttgttatgatcatcagccggttgggggagcaggggaagtgggatgagatcaagaagctgtttgatggcatgaagaatcgaggtttcaaggagagtggtgcagtatatgcagtattggttgacatttacggacaatatggccattttcgtgatgcacgtgaatgtatagctgctcttagagcagagaatatgcagctttcgcctcgtgtgttttgtgtccttgccaatgcttatgctcaacaggggttgtgtgaacaaactgtcaatgtacttcagttaatggaggaagaaggatttgagccaaaccttgttatgctgaatttgttaatcaacgcttttggcactgctggaaggcatttggaggcactagctgtattccagcatatcaaggatagtggtatgagcccagatgtcgtgacatacactacacttatgaaaacattcatgagagcaaagaaatttgaaaaggtatctgaagtatacagagaaatggaacgtgctggatgcactccagatagaaaagcgagagaaatgttacatgatgcaactgtagttctggaacaaagaggatgtaagtatttcatttcatatgactggtgctttaagggtgaatacaatggatga

SEQ ID NO: 3386 - protein, 429 aa, Sorghum bicolor
MQASGGRPSSGAYARLIRALSRAGRALEAEALLLEMRRHGPRPDAAHYNALLEGLLAAAHLRLADRLLLQMADDGVARNRRTYTLLLGAYARAGRLEDSWWVLGEMRRRGIRLDTAGYSMLVRLYRDNGMWKKAIDLVMEMQEVGVELDVKIYSGLIDTFGKYGQLADARRVFDKMRAEGIKPDISTWNALIQWHCRVGNMKRALRFFTSMQEEGMYPDPKIFVMIISRLGEQGKWDEIKKLFDGMKNRGFKESGAVYAVLVDIYGQYGHFRDARECIAALRAENMQLSPRVFCVLANAYAQQGLCEQTVNVLQLMEEEGFEPNLVMLNLLINAFGTAGRHLEALAVFQHIKDSGMSPDVVTYTTLMKTFMRAKKFEKVSEVYREMERAGCTPDRKAREMLHDATVVLEQRGCKYFISYDWCFKGEYNG

SEQ ID NO: 3387 - DNA, 339 bp, Sorghum bicolor
atggtggccgcaaagaagacgaagaagtctacggacaacatcaacaacaagctgcagcttgtgatgaagagcggcaagtacacgctcggctacaagactgtcctcaggaccatcaggaactccaagtcaaagctagtgatcattgctaacaactgtcctccgctccggaagtctgaaattgagtactatgctatgcttgctaaagtcacagtccaccacttccatggaaacaatgttgacctgggaacagcctgtggaaaatacttccgtgtctgctgcctcagtattattgatcctggtgattctgatatcattaagactacaccgggtgagcagtaa

SEQ ID NO: 3388 - protein, 112 aa, Sorghum bicolor
MVAAKKTKKSTDNINNKLQLVMKSGKYTLGYKTVLRTIRNSKSKLVIIANNCPPLRKSEIEYYAMLAKVTVHHFHGNNVDLGTACGKYFRVCCLSIIDPGDSDIIKTTPGEQ

SEQ ID NO: 3389 - DNA, 918 bp, Sorghum bicolor
atggctgcacggaaagaaaaccctgagcttattgcttgtcaagcacccaatggtcgaatcacgcgagctcaagccgctgcaaatcgtcgaagctttggtgttctcccttctgttccactgcctgcaaaaactgatcgaaaacagactacacaagggaagatgaaaaggggatcttcatatgacaacactagtgcaagtactgcaatttctggcccccagcctaagaggcgcacagttctcagggatgtgaccaatttgcgtaatgctaactctaacaaaacttttgctgctgcaccgaaggttcagacaaggccctccctaaggactggaagaaccgtgaccagaggcaagcagtgcacaaaaaggattcctaaaataccccaaccagctggtaatggtggttcattcgccaatgattcgagcattgccgaagaaacacaagagaaacttttggcacagaaagaagaacctattcttttgcttgagaacaggggctcactgtcattgcagaatgttgaaaggaacagggacagtgcttgtcatgaggcattctttaaggaaagaaatgtcagggatatatgtgaaccttctgtgtcaaagaatggggactcttctgtgttagacattgtagatatcgacaaagataatggcaatcctcaaatgtgtgcttcctacgttgtagagatatactcaaaccttatggtttcagagcttatgagaagacccagtccgaattacatggagggtttgcaacgggacatcactaagggcatgagaggaatactcattgattggcttgtggaggtttctgaagaatacaagcttgttccagacacgctgtacctaactgtatatgttattgaccggtttctttctcggaactacattgaaagaagagactacaacttctgggaataa

SEQ ID NO: 3390 - protein, 305 aa, Sorghum bicolor
MAARKENPELIACQAPNGRITRAQAAANRRSFGVLPSVPLPAKTDRKQTTQGKMKRGSSYDNTSASTAISGPQPKRRTVLRDVTNLRNANSNKTFAAAPKVQTRPSLRTGRTVTRGKQCTKRIPKIPQPAGNGGSFANDSSIAEETQEKLLAQKEEPILLLENRGSLSLQNVERNRDSACHEAFFKERNVRDICEPSVSKNGDSSVLDIVDIDKDNGNPQMCASYVVEIYSNLMVSELMRRPSPNYMEGLQRDITKGMRGILIDWLVEVSEEYKLVPDTLYLTVYVIDRFLSRNYIERRDYNFWE

SEQ ID NO: 3391 - DNA, 2424 bp, Sorghum bicolor
atgcgcaagtgggcgctctcctccgcgctgctcctcctcttcctcctcaccaccctccccgacccagctaagaagctacaggtgaatgccgaggagagcagcgatgacttagctaacccaccgaaggtagaggagaagcttggtgctgtccctcatggtctgtctaccgactctgatgttgcccagagggaagccgagtctatctctaggaagactctcaggagctcagccgagaagtttgagttccaagctgaggtgtccagactcatggacatcatcatcaactcactctacagcaacaaggatatctatttgagggagctcatctccaatgcctctgatgctttggataagattaggttcctttcccttactgataaggaggttctgggcgaaggtgacactgcaaagcttgagattcagattaagttggacaaagagaagaagatcctctccattcgggataggggtattggtatgaccaaggaagatcttattaagaaccttggaaccattgctaagtctggaacttcagcttttgtggaaaagatgcagtccggaggtgacctcaatcttattggacagtttggtgttggtttctactctgtgtacttgcttgctgactatgtcgaagtggtcagcaagcacaatgatgataaacaatatgtctgggaatcaaaagctgatggatcatttgctatctctgaggatacatggaatgagccccttggccgtggaactgagataagattacatctgcgagatgaggccaaggagtacttggaagaggataagctaaaggatttggtgaagaagtactctgagttcatcaacttccctatctatttgtggtcgacgaaggaggttgatgttgaagtgccagctgatgagggtgagacaagtgatgaagaggattcaaccccagaaactacagaggaagagacagaagaagatgaagagaaagagaaaaagcccaagacgaagacaataaaggagactacttctgaatgggaacttctgaatgatgtgaaggctgtatggcttcgcagcccaaaggaggttactgatgaagagtactcaaagttttaccactcactagcaaaggacttcggtgatgacaagcctatgggttggagccacttcactgctgaaggagatgttgagttcaaagctttgctcttcattcctccgaaggctccacatgatctctatgagagttactacaacagtaacaagtcaaacctcaagctgtatgttagaagagttttcatctctgatgaattcgatgaccttcttccgaagtatctcagctttttgaggggtattgttgactcagacacactgcccctgaatgtgtcacgagaaatgcttcagcaacatagcagtctcaagaccatcaagaagaagctgatccgtaaagctcttgatatgattaggaaacttgctgaagaagaccctgatgagtacagcaacaaggataagacagatgaagagaaaagtgaggtggaagagaagaagggccagtacgccaagttctggaacgagtttggcaaatcaatcaagctgggtatcattgaagacgcaactaacaggaaccgccttgcaaagcttcttagatttgagagttccaagtcagatggcaaacttgcctcccttgatgagtacatttcaaggatgaagccagggcagaaagacatcttctacatcacgggaagcagcaaagaacagctggagaagtctccattccttgagaggctaaccaagaagaattacgaggttatcttcttcactgaccctgtggacgagtacctgatgcaatacctgatggactacgaggacaagaagttccagaacgtgtcaaaggagggcctcaagctgggcaaggactcgaagctcaaggagctcaaggaatcgttcaaggagctatccgactggtggaagaaggctctggagagcgagaacgtggactcggttaagattagcaaccggctgcacaacaccccctgcgtcgtcgtcacctccaagtatgggtggagcgccaacatggagaagatcatgcaggcgcagaccctgtcggactcgagcaagcaggcgtacatgcgtggcaagagggtgctcgagatcaaccccaggcaccccatcatcaaggagcttcgtgacaaggtcgcccaggacaacgagagcgaagagctgaagcacacggcgaggctggtgtaccagacggccctgatggagagcgggttcaacctccccgaccccaaggagttcgcgtccagcatctacaagtcggtgcagaagagcctggacctgagccccgacgctaccgtggaggaggaagacgaggccgaggagcagcccgagatcgaagagaaggagtccaccaaggaggagtcggagccgtcctacgacaaggacgagctgtag

SEQ ID NO: 3392 - protein, 807 aa, Sorghum bicolor
MRKWALSSALLLLFLLTTLPDPAKKLQVNAEESSDDLANPPKVEEKLGAVPHGLSTDSDVAQREAESISRKTLRSSAEKFEFQAEVSRLMDIIINSLYSNKDIYLRELISNASDALDKIRFLSLTDKEVLGEGDTAKLEIQIKLDKEKKILSIRDRGIGMTKEDLIKNLGTIAKSGTSAFVEKMQSGGDLNLIGQFGVGFYSVYLLADYVEVVSKHNDDKQYVWESKADGSFAISEDTWNEPLGRGTEIRLHLRDEAKEYLEEDKLKDLVKKYSEFINFPIYLWSTKEVDVEVPADEGETSDEEDSTPETTEEETEEDEEKEKKPKTKTIKETTSEWELLNDVKAVWLRSPKEVTDEEYSKFYHSLAKDFGDDKPMGWSHFTAEGDVEFKALLFIPPKAPHDLYESYYNSNKSNLKLYVRRVFISDEFDDLLPKYLSFLRGIVDSDTLPLNVSREMLQQHSSLKTIKKKLIRKALDMIRKLAEEDPDEYSNKDKTDEEKSEVEEKKGQYAKFWNEFGKSIKLGIIEDATNRNRLAKLLRFESSKSDGKLASLDEYISRMKPGQKDIFYITGSSKEQLEKSPFLERLTKKNYEVIFFTDPVDEYLMQYLMDYEDKKFQNVSKEGLKLGKDSKLKELKESFKELSDWWKKALESENVDSVKISNRLHNTPCVVVTSKYGWSANMEKIMQAQTLSDSSKQAYMRGKRVLEINPRHPIIKELRDKVAQDNESEELKHTARLVYQTALMESGFNLPDPKEFASSIYKSVQKSLDLSPDATVEEEDEAEEQPEIEEKESTKEESEPSYDKDEL

SEQ ID NO: 3393 - DNA, 861 bp, Sorghum bicolor
atggtgggtctctctgaaggggagaagcacttcatctgcggcggcattgcgcaggacctccgcactgatggacgtaggcgactgcagttccgggccctctccgtccaaaccggagtcatcccacaggcgaatggctcagcgcgtgttagattgggggccactgaaataatcgctagtgtcaaggctgaacttggaaaaccaagcattcttcaccctgacaaaggaaaagtttccatttttgttgactgtagtccaaccgctgagcctatgttcgagggtagaggttctgaagaattgtctgctgagctctctgtttccctgcaaagatgcttgctgggtggtaaaagtggtgctggtgctgcaattgatctgtcgtccctaattgttgttgagggaaaggtctgctgggatctgtacattgatgggcttgtggtcagttctgatggtaatttgctagatgcgctagctgctgcaataaaggttgctttgagtgatacaggtataccaaaagttaatgtttctgttaatgctgcatctgacgaggagcctgaagttgatgtaagcgacgaggaatttctgcagtttgacacctccagtgtgcctgttattattacattaaccaaggtgggccggcactacatcgttgacgctacctcagaggaagaatcccagatgagttctgcagtgtcagtatcagttaacaggaatggccaaatatgtgggcttaccaagaggggaggtgcagggctggacccaagcgtcatcttcgatatgatatctgtcgccaagcatgtgagccagcagttcatctctctcttggattcagagattgccgccgctgaagctgaagaggctgagtga

SEQ ID NO: 3394 - protein, 286 aa, Sorghum bicolor
MVGLSEGEKHFICGGIAQDLRTDGRRRLQFRALSVQTGVIPQANGSARVRLGATEIIASVKAELGKPSILHPDKGKVSIFVDCSPTAEPMFEGRGSEELSAELSVSLQRCLLGGKSGAGAAIDLSSLIVVEGKVCWDLYIDGLVVSSDGNLLDALAAAIKVALSDTGIPKVNVSVNAASDEEPEVDVSDEEFLQFDTSSVPVIITLTKVGRHYIVDATSEEESQMSSAVSVSVNRNGQICGLTKRGGAGLDPSVIFDMISVAKHVSQQFISLLDSEIAAAEAEEAE

SEQ ID NO: 3395 - DNA, 2643 bp, Sorghum bicolor
atggagggcgaggcggacggcggcggcgactccttcgtgctgcgctccggcgtccgcgcgggcctcaagcgcgaattcgccttcgccatcgcctcgcaggccgccctttcgtcctcatccgcacccctcggccgcacccgccgctcatcccgcacgctcaactcatcggccgcttcgacctcctccgccgccgcctcgacatcctccttctcaactcacgacaccaagccaaaggccaagcgcccgcgcccaccggatcctccccctccaccagaggatgcccccgcgcccggagaagatcatgaaggggccgctgtcgagctgcccggccccgtgctcgccttgatggctgccgctgggcccagccctccgccgacgccttcgactccgcaaccccatgccggcgcggatgcggatccggcacaccgcgacaacatcatcatcccgccggagtcgtcgcccaggcgcatcacgcgctccatgctccagcccaagtctccccctcccaccgctgctcgttctcctgacaatgtggctccgctcaaacccaaaccggaaccgccggaggaagaggagcccgttccagcgttgaggcgcttcaccagatcactcttggtcaaggataaggacagcaacgacgacgacctctcaggcaccaccaccgccagcaatgcctcctcctcccctccactcaacaccaccactaccaccacaagtaccagcagcaacaagaggaataagaatacaaacaagattcccaccaacctcagggagctgctcgccaccggcctgcttgaaggtcagcccgtcaagtatatcatgaggaaaggcaagtatcgtgggtactgtaattttgaccagggatctatttctcatcttatttcagcgagcagtactccgtggagttatcaaacgcatcggcatactgtgctcatgctcttcatgcaaaggccgaaaagtgagttttctcctcttctccaaaatcaccacctatttatccctgctttgagaattgaagcaatggaacatgagttgcaggttgtttcaccttactactttgaggtgcatgctgggagtacgaaaaagcacccatccgattacattttcctggaaaatggaaataatctgcatgatgtattgagggcatgcacaaatgttacgttagacatgctggagtctgcagtacggaaggcaataggcccagcacctcagaagagaacattcagatgcaaaggctgcaaaagttcattcagcacactctgcagtgggaaatttgctttgttttgtgactcatgtcttgagtccaagggtgctaagaataatagcagggataaggggatgcataaggttgttttcatgagtggcgttttacaagagggcactgatgttggctactatgttggtggaaaggttagtccttcacagtttgaagctcatgctggtcgagctgctcgacggaaaccttaccacaacatatatatgtcgaacggcgtatcactacatgagctgtcaatttcactcttgaaaggtcaaaagatgtcaaacagacaaagtgatgacttgtgcagcatttgttcagatggtgggcaactactgctttgtgatacctgtccaagagcttttcacagagaatgtgttagcttatcttctgccccgaagggaacttggtgttgccgatattgtgagaatagacaacagagggaaagttgtttggcatataacaacaatgcaatagctgctgggagggttgaaggagttgatgccttggaacaaatatttacacggtcaatacgtattgctacaacacctgagactggatttggtggttgcgcactgtgcaagctccatgatttcagcaaaaagaaattcagtacccggaccgtgctgctttgtgaccaatgtggtagagaatatcatgttggttgcctcaaggaacataatatggctgatctgacggcattgcctgagggagcatggtattgttctacggactgtgtgcggattaaccagacactgcaagatttacttaaccatggaggagaacctgttcctaccatggatttagatgttattaagaagaaacgagaagtgaaaggttttaatgaggatgctgaccttgatgttagatggagagttttaaaggacaagagctcggatgatagtaaactagtgctctccaaagcagttgccattttccatgaaacttttgatcccattatccaggtttcaactgggcgggacctcattccagccatggtttatgggaggagtgcaagggatcaagattacacaggaatgtattgtgctgtgttaactgtgaacaatactgtagtttccgcgggtcttttccgcatcatgggtaatgaaattgctgagcttccgttggttgctacaagtagggatagccaaggtttggggtatttccaagcacttttttcctgcatagaacggctgttggcatctttggaggtgaaacattttgtgctaccagctgcagaggaagcagagtctatctggacagaacgttttgggttcacaaagataagccaggatgagctgcgtgaatacctcaagggtgggcgaacaactgtgtttcaggggacgtcaaacctacacaagctggttgcgaaagttgaatgctag

SEQ ID NO: 3396 - protein, 880 aa, Sorghum bicolor
MEGEADGGGDSFVLRSGVRAGLKREFAFAIASQAALSSSSAPLGRTRRSSRTLNSSAASTSSAAASTSSFSTHDTKPKAKRPRPPDPPPPPEDAPAPGEDHEGAAVELPGPVLALMAAAGPSPPPTPSTPQPHAGADADPAHRDNIIIPPESSPRRITRSMLQPKSPPPTAARSPDNVAPLKPKPEPPEEEEPVPALRRFTRSLLVKDKDSNDDDLSGTTTASNASSSPPLNTTTTTTSTSSNKRNKNTNKIPTNLRELLATGLLEGQPVKYIMRKGKYRGYCNFDQGSISHLISASSTPWSYQTHRHTVLMLFMQRPKSEFSPLLQNHHLFIPALRIEAMEHELQVVSPYYFEVHAGSTKKHPSDYIFLENGNNLHDVLRACTNVTLDMLESAVRKAIGPAPQKRTFRCKGCKSSFSTLCSGKFALFCDSCLESKGAKNNSRDKGMHKVVFMSGVLQEGTDVGYYVGGKVSPSQFEAHAGRAARRKPYHNIYMSNGVSLHELSISLLKGQKMSNRQSDDLCSICSDGGQLLLCDTCPRAFHRECVSLSSAPKGTWCCRYCENRQQRESCLAYNNNAIAAGRVEGVDALEQIFTRSIRIATTPETGFGGCALCKLHDFSKKKFSTRTVLLCDQCGREYHVGCLKEHNMADLTALPEGAWYCSTDCVRINQTLQDLLNHGGEPVPTMDLDVIKKKREVKGFNEDADLDVRWRVLKDKSSDDSKLVLSKAVAIFHETFDPIIQVSTGRDLIPAMVYGRSARDQDYTGMYCAVLTVNNTVVSAGLFRIMGNEIAELPLVATSRDSQGLGYFQALFSCIERLLASLEVKHFVLPAAEEAESIWTERFGFTKISQDELREYLKGGRTTVFQGTSNLHKLVAKVEC

SEQ ID NO: 3397 - DNA, 832 bp, Sorghum bicolor
atggaaatccctggtgctgatatttcagacttttttaactttggccttgatgaagagaagtggaaagatttttgcaagcagctggattatgacccagatttgccaccggagctagcggctgtgactggtcatccagacatctctgctgacagtcgcaataaaacggataacagccatacagattttagtgcccaaggaagaggtccggcaaacattgtgtgccagggccgtgattcaatggatgatgagacagtggaccaaactgaaaaggattctcaaggagaaactgaaagctccaacgaagtaatacctcgtcagtcatcttcaaagagacaccatgattcccggaaagagaaccttgttgagggctcagaaaataagggtgactcagaagggtcacttgctgctaatgatgacgtggcagataaactgagtacagaagatcattttgatggtggtggtggtggtggtgatgatgatgatgatgataagctcgcattggttggtagtgttgaagtggatggtgatgatgctacctcagaccccaacacgcctagtgatgcaaatgaggatgatagcctggttcactctgataaaaagcacaaacatatatctgtggttgaacaacctactggacacaatagcagtgaagctgatgaattgagggctagtgaaaatagtaaagggaggtctggtagcagcaaagatcagcagaaacgccttgaatctggtgaagaagttcttcaagataggcaatcaaggagagtaaataatgtaagaaggcatcatgacgcggaagaacgcaacctccgccgaaaagatgagtactcac

SEQ ID NO: 3398 - protein, 278 aa, Sorghum bicolor
  misc_feature (278)..(278): Xaa can be any naturally occurring amino acid
MEIPGADISDFFNFGLDEEKWKDFCKQLDYDPDLPPELAAVTGHPDISADSRNKTDNSHTDFSAQGRGPANIVCQGRDSMDDETVDQTEKDSQGETESSNEVIPRQSSSKRHHDSRKENLVEGSENKGDSEGSLAANDDVADKLSTEDHFDGGGGGGDDDDDDKLALVGSVEVDGDDATSDPNTPSDANEDDSLVHSDKKHKHISVVEQPTGHNSSEADELRASENSKGRSGSSKDQQKRLESGEEVLQDRQSRRVNNVRRHHDAEERNLRRKDEYSX

SEQ ID NO: 3399 - DNA, 990 bp, Sorghum bicolor
atggcgattaagcattttgtagttatgctgctgcctatggccctcctgctcctcgcaacaggtagctcaccggtggtggctcagctggagctcggctactacagcaagacatgcccgaacgccgaggcgatcgtccgcgccgagatggagaagatcatctcagctgcacccagccttgctggcccgctcctcaggcttcatttccacgactgctttgtcaggggatgtgacgcttctgtcctgctcgactccaccgagggcaacctggcagagagggacgccaagccgaacaagagcctccggggatttggttccgtggagagggtgaaggccaagctcgaggccgcctgccctaacaccgtttcctgtgccgacgtcctcaccctcatggcccgtgatgccgttgtgctggccaagggcccctcctggccggtggcgctcgggaggcgagacggccgtgtgtccagcgcaacggaggcggccgagcagctacccccagcgcacggtgacatccccctgctcaccaagattttcgcttccaaaggcctcgacgtcaaggacctcgccgtcctctccggcgcgcatacccttggcacggcgcactgcccgtcctacgccggccggctctacaactacagcagcgcctacaacgcggacccctccctcgacagcgagtacgccgacaggctcaggacgcgctgcaagagcgtcgacgacagggccatgctttccgagatggatcccggcagctacaagaccttcgacacgagctactatcgccacgttgccaagcgcaggggactgttccagtccgacgccgcgctcctcaccgatgcaaccaccagggagtacgtccagcgcattgccactggcaagttcgacgacgtgttctttaaggacttcagcgagtccatgatcaagatgggcaacgttggcgtgatcaccggtgctgacggggaaattaggaagaaatgctacatcgtcaactaa

SEQ ID NO: 3400 - protein, 329 aa, Sorghum bicolor
MAIKHFVVMLLPMALLLLATGSSPVVAQLELGYYSKTCPNAEAIVRAEMEKIISAAPSLAGPLLRLHFHDCFVRGCDASVLLDSTEGNLAERDAKPNKSLRGFGSVERVKAKLEAACPNTVSCADVLTLMARDAVVLAKGPSWPVALGRRDGRVSSATEAAEQLPPAHGDIPLLTKIFASKGLDVKDLAVLSGAHTLGTAHCPSYAGRLYNYSSAYNADPSLDSEYADRLRTRCKSVDDRAMLSEMDPGSYKTFDTSYYRHVAKRRGLFQSDAALLTDATTREYVQRIATGKFDDVFFKDFSESMIKMGNVGVITGADGEIRKKCYIVN

SEQ ID NO: 3401 - DNA, 138 bp, Zea mays; identical to SEQ ID NO: 651

SEQ ID NO: 3402 - protein, 45 aa, Zea mays; identical to SEQ ID NO: 652

SEQ ID NO: 3403 - DNA, 21 bp, Sorghum bicolor
cttggattgaagggagctcct

SEQ ID NO: 3404 - DNA, 1527 bp, Pichia angusta
atgcaactgtctaccttatgggaaccgccaatagtgaatccaagaaacctgaaagcgacctcaataccaatttttaacctatggaacgtctatggaagaaacttctttttcgggtggtttggtttttttgtttgttttctttcttggttcgcgtttccgcctcttctccatggcatgttgaagaaggacctaagactcactgcagtggatatatccaataataacatatgtggactgacaggaactttactaggcagattcattttggggccccttaacgacaagtatggcccacggattactttgacaggcgtgctggttgcaggagcaattccgactgcatttgttcctttggttacaaatgttgcaggtctacatgccattcgcttttttatcagctttctaggctcctcgtttatttgttgctcccaattctgcgctgtattttttgataacaacattatagggacagcaaatgccatctctgccggttggggaaatgctggaggaggtgtggcattctttgtcatgcctgccatttcaaatgcgttggaaaatagaggttactctttgcaccattcttggagctactcttttgtgattgggccgttcttaattttgatgatcacggcaatactgatctttgtatttggaagcgactgcccgagaggcagatggtcccttcgtggagatatccttggtatcaacatggataatatgctcgtgaagtctgtctctgtcacaaggcacttctctaaggaaggagagctcacttctgtatttgttgagcctgttaacgcaattgataaggtcgtggttgagcccaatcaagaccaggaaattcttgaagtcgcagatatcataaatggtgacgaaatcattgaagacccatcgctcaatgacgtggtcaagatctgtttatccccgcggacaatgctggtcggactttgctacatgtgctcgtttggtactgagcttgcagtagagtctattatttccaacctgttcgggcaaaagatgacaaactggagcacctctaaagctggagcatggggctcaatgcttggactcctgaacgtggtggcaagaccagctggagggatcatctccgattttttataccaaagattcaaaaccacaaaggctaaaaagttctggatgatcttcactggcctgatgcagggcatttttttgatttggattggactagttccggaattatccatcgcgggactcatagtgtccgtttcgtttttgtgtctttggtttgagatgggtaatggtgcaaattatgcatgtgttcccgttgtgaatagacatcacagtggtattgtgagtggagttacgggagcaatgggtaacttaggaggcattttgtttagtttagtgttcaggtacactatatcaaatggagtgaacaactacttcaaggcgttttggattataggaattgtttgcactgctgtaaatctggtctgtgtgcttattccaattagagaggagaggccaaggaaagcggaaaattga

SEQ ID NO: 3405 - DNA, 7778 bp, Sorghum bicolor
tccccgccatctgccttcctcgcttgggctaacttccatggcggacctgtctagatctgcctactgttgatcggctttgctgtttctagtggggcagactctccgataggtttctcccggtgctttttctggtcggtgatcctaggctgttgctaacctctcgccgcatcctaccttcatggtagggttgggtctccgacaacggtggtgtggaggttctcgtcttggaggcatgcttttctacctctcctcctaccatactggattttacaggtaaatctttcctcgtcaggttagtttgttgacattcttagcattgtttccttcttaaaggccctgcaaggctatccaatttccgtcgttgatctattgtcgtctgccatggtgcttctgctagggtggtagtgctcggtgctccaagtcattttgctagtttcttagttggagtttgatagtcaagttgctacgagggtcatttttcgaccaagttggcttaaggttgagcatgtagtcgagtgatgcactctcccagttggtggtttttgggtccgattttcacttaaaaaattggaccgacccttgattttaattttcttcatctaatataaatcacgacaaagcttttgccatcccttataagaagattttagttacaaggaagttgtgcgtatgggtgaactcactttgtacagagctcatccctaacatagagtgtgtcaatatagatactaacacatagtttattcttcctcatatttttcttccatgactgcccaccccacccgtctagtctgtcccaccccgaccgtctagtccatcagtccggccaccggtgacctcgccacccgctgccatccaacaattccttattcgcccttccctaattccaattgactacatatctacatctttggcgactccttgtccccaccaccagtggcccccatgccttgctcgccgcccttcaaatcatccgtgccacctggccctcccttgtaagctcaacgtcaatagagccccctccccacctaagaaaatacaaagttgtaaccctaaatcctatcgcctttgcctcgtccgtcgtccctgcctgcggtgatcccgtagtaagcccatcttcaatagagctccctccttccccccctaaaaagatccaaagctgtaaccccaaatcctaccaccttgcctcgtccatcgtccctgcctgcggtgatcccgccataagtccatcttcaatagagcctcctcccccctaaaaaaaatccaaagctgtaaccccaaattctgccgtctttgcctcgtccatcgtccccgcctgcggtgacccctttgccggccgcccctacccctttctaatttggacgacatttttcgggctgggtacaaatttcaaattccagaacagccaccttcataaaatcagcatcctaagaatgggcaagcacaaaaggaaacttcaagcaatggcccaacggccccaatcaaaagaatgctaccagtattcctcaccaacttcggctgggggccggggcgatccagcaagagtcctgatcggtagaaagttgcaaaagatggaaagctcaagaccatgtatggggatcttgaaaaatggaaggaaatcaagacaaaatcaatgcgagccgtttttaaaaggaagcacccggtagcggccagctaagcgcgcacgcagccatctcgagagagagagagagagagagagagagaaaagggcgccgcgccgcggcgcggaccggcccgccccgccgcaagtggaaagcaagtagagagacagggaggagagagaagtggtgaacgcgcagctcagccgcagccagccgcaaccgcaggccgcaggccgcagcagcagcccctcgccagcggcgtcattagcagtaactcgtaatcgctgcctgacccccggccaatcgcgtgatttactggctttactaatcacgcttagcgatttagtctcctcctcctcgcccccacctctcctcctccctccctccctccttgcctgcctcgctgttccctttccccgcccgtgcctgcggcttctgtctctgaatcagcggcggctcccgaggcgcgggctggcgagcggctaggcgccggatctacggcggtgatggaggtgtgatttggacgggagggagcgaggtgaggtctcggttttctcggtataggagatggcggcggcagaggcgcggggaggggagttccccgtggggatgaaggtgctggtcgtggacgacgacccgacgtgcctcctcgtgctcaagaggatgctccttgactgcagatacgacggtgagcaactgccccgctcctctccttctcccctcggttcggttgctttggcgtgcctcggcgtttgctgggcgcgaggcgattgattgcttcgtgttccttatcggtcaagaatgatatctttgcttctgtttcatgccttgctatggttttatctgtttgtagcccgggaaggcactgttttatgcgattcacgcgctcctcccgtaaattctggggaattctgagatgtcccgttgtcaatctaagaaacctcagaattctataacgggtgttttaagtaaattttaacgcgtctgtatttgggcgtagtttgatcgatggtatatatttgcatagagagatctgagtggatgcgttatatatgggaaatctgtgtacgtgcatagctactgctgctgcttgctagtcggagtgcttatgcatttaccaaagtatcaagattagattttgaggatttgccgcagctaaattcggattccaccactattgtatatgtagtgtagtatcggtgatgcacctgtcactacctcgcacgccctgatgatcatatattaggcctatgtttaaatgagaatactctttggctgcagacatgccatgttgcatttagtatgggaatatccatgtatatgaaacccacaaatccttgaaatgtttgtttcttgtgattctgttgtgggcgctagcaccacatgcgtgtacgggaaatgagtgggcgggaaccaggtttaacttcgttttgcagggattggtgatatcttatctttctattttcatttcctgatgtgtttgtcttcttctggacatatccttgtgcagcttgccttagaagctaactaaaactattgaacgcattatttcgatgctactgctagtttggtagaagatctaaaagggaaaaaaatactatgcatagggataggaccgtaaatgttagtcaaatgcaaagcatgagaaattactgagcaagcttttcttagccattgttgctcgtattgatacctgtcagctggatatgcatgactaagccacaacaagcatcaggatgcaatatgtttttttttccattaagttgcagttcaaatatagaatccaatacttgttgtagctatcgtggttttgaatctgtatttttttattctcgttgctccataaaactatattacatgctatggttttatttgttttcttttagatccacatttcaggaacttttttctatttcacagggacagaatctatctaggttagcttgttcttgaataatacggatgtgtcagtctccaattttgcctgatttctgttgtttaattttccttgttatgttctttaaagtttaaagcttgttgaccttttcttcttttgttttatagtgacaacatgtcctcaggctacaagagcactaactatgctgcgagagaataggcgtggttttgatgttataataagtgatgtccacatgcctgatatggatggattcaggctacttgaacttgtaggccttgagatggaccttccagttatcagtgagtatatatttcttcatgtttttctgtttagtatgttaacatgtggtgttggaacacatcactaataattgttgatgaaacttgcagtgatgtctgctgattcaagaacggatattgtaatgaagggaattaaacatggagcgtgtgactatttaataaaacctgtcagaatggaggagttgaaaaacatctggcaacatgttgttaggaaaaaatttaatgaaaacaaggatcatgagcattctggtagcctagatgataccgatcgtaacagaccaaccaataatgataatgaatatgcttcctctgcgaatgatggaggtgatggcagctggaaatctcagaaaaagaaaagagagaaagaagatgatgaaactgacctggaaaatggcgatccttcttctacatcaaagaaaccaagagttgtttggtcagttgagcttcatcaacaatttgtgaatgcagtcaatcacctcgggatagacagtaagattttgctacttgtatttgtagttcttacttttattgacatgaatttgctgtaaattcatattgccagttatgtgccttcttgattgattttgagtattgctgattactgtcaaaaacctgaacattagaacgaagtcatctcttcttcatcatgcttatatatgttttatattttctgcagaagctgttccaaagaaaattttggaattgatgaatgtccctggcttaaccagggaaaatgttgccagccatttgcaggtttggtttccagctttctgatcacattacctgtttagtacctttatatctttttattgcacatgatgttgccgcttatggacctgtacattttacacctcattattctacctaaatttaatctggattttttttttgaaaatttaatctggatttgttatccttttattgcacatgatgttgccgcttatggacctgtacattttagacctcattattctacctaaatttaatctggatattttttttgaaaatttaatctggatttgttagtgatataaatagatggtttcctgccagagtgaactcagatttgagcgccttgtgcttttattggtacagcacttatctattctttcattgtagaacaccaaaccatcatactattcattgtttgactgaaaacattgtgaaaacatgttacccccagttctccatggtacatatcacaaaaacaaacagcttttgacgctattttcagaaatatttaactgtagacattgctcagaaactgattagacgaggtttgtctatcctcattttattaagcactttgaatgtaccccatcaccctatgtaataccattaagtttactagtttctattggctgttgttgagctccaaggccaaccaatatttaataacctcatagcttaagacatcaaggtgataagatgcattttttctatgtgcagaaattcagactatacctgaagagaattgctcagcatcatgcaggaatacctcatccatttgttgcgcctgcttctagtgctaaagttgctcctttaggaggactggaattccaagctttggctgcttctggtcagatccctcctcaagctctggctgctttgcaggatgaactccttggtcgacctacaagcagtttggcgttgcctggaagggaccagtcatctttgcgactggctgcaatcaaaggaaacaagtcccatggagagagagaaatagcatttggtcaacccatatacaagtgtcagaataacgcatatggcgcattccctcaaagcagcccatcagttggaggattgccatcttttgcagcttggcccaataacaaacttggtatgactgattcaccaagcacattgggaaatgtgggcagttctcaaaataataatatgctattgcatgaattgcagcaacagccagacacattgctgtcaggaacccttcacaatattgatgtcaaaccttctggtgtagttatgccatctcagtcgttaaatgcattcccggctagtgagggtatctcacctaatcaaaatcccttgattctaccatctcaatcctcaagttttctggcatcaattcctccatccatgaaacatgaacctcttcttggatcaccttcaccgtcaactagtctgttgggtgggcttgatatggttaatcaagcttcaacaagtcagcctctgattagtagccatggagcaaatcttcctggtctcataaaccgcagcacaaatgcaatgccttcaccaggaattaataattttcaaagtgggaacataccttatctggttaatcagaatgctatgggagttagctcaagaccaccaggtgttctaaagactgagagcactgactcgctgagtcgtagttatggctatattggtggtagtaccagtgtggactctgtcttgctgtcttctcagtccaaaaatgcacagtatggtttactgcagagtcaaaatgatgttagcggcagctggtcgccttcacaagattttgatagttttggaaattctcttgggcaaggccaccctggttccacttcatctaacttccagagttctgcccttggcaagctacctgaccaaggacgagggaggaatcatgggtttgtcgggaaaggcacttgcattccaagccgctttgcagtggatgaggttgaatctccaactaacaacttgagccacagcattggaaacagtggagacatagtgaaccccgacatattcggatttagtggacagatgtgaaactttcttgaatttgtaagtaggtgagcacactttccgaatctttttaccagatgttactgcttctattaatattcttattaattcattctttgtgctttaacttcagcaaatccttgtgacagtattttctagttcaagcagtatcaacattgtccaattgttaatgttactgtttttttactaggatgaacttgattaagttatgcaggcttaagttatttttctatatttatgctgtctttattaaatgttaccgttgttctaactttgtgtttgcaaagatcctatttatcattcttggtgatttttgaaaagttattcatttccccttttctaccgtgaaccacctgatatgaaattccacattgacttctgccccccttttcaacttgatgcaatattgccaaacatgcttatccttttgagttctgcctcaacttctaacaaaattatttggcttgatgcagggttgatcattgagcactggaaacaaatttagtggtttgatgaatggttgctcatattttcctttcttcctttttttcttctgtaattggtttataaagggaataatctttgtgacagcatgtggaatcttgctttatagaagtttgttcagtttaaaggacgtaaaatttaatcagtcccttgtcatatggctccttttcctttcttctattttcctgtaattgccgattatagccgatttttatgagtgtcgtaattcagcctagacgatttatccacaaccatattatctctactgcattaggcaggaaacggttcatgtttcagctatgtcagttactcctgtttgaaggttttttttccccagttcacacctgtttgaaggttgaacagatagacaccgatcgcattacgatgaaacatgagccgtaactgaaataccaaattctagaaatatgtgcatgtatgattgtatttgcattaaagcaattcaacagcatgtttttacagtacaatgcaatctttggtatttggtatcgaatctgtccattggttagccaggcaagtatgtattcttcagaatttgctactccattgtggttccagcaagtagcgcctggttcaagccctcgtctcctgcagcatgggcaactaaactagcttcgcagtcgcagtcctgatcccccgccgcttgcagagcggccgtct

SEQ ID NO: 3406 - DNA, 7125 bp, Sorghum bicolor
tagacaatatttatcaaatataaacgaaaattctacattatccattttacaaaaaaatttacaactaaacaagaccgttctttaggttccgaaaagtaccacatagcactgagccactgacaagcttacaaactaatttgaaaataataaaatgaattaaatatctatcttgtcataaaataaaaatacgatactactgtatttgataaataattccgataactttgaccaagcatttcgtcctcaagaacacattttcatataggcccaataaatatacacagaaattctttaaaacttttactacaattcttttatctagcaactactacgcgtccaaaacgaatacaagccttttgtgtcgctagctagacataattctatgcctttttcttgggcccgtatggatctataaaattcgattgaattaaaatcatattgtttgggcagcctattttggtagaaatggcaattccaaataataatttcaatgaagcccacaacacctacgtacctgctctttgctgcccatcatgttttctgaagcagctcttgttttgtaatcgaacaacgacgatatcatgtcgagtatgcatgagatcaccggtttgcaacaacggtgagtgataaggtaatatgatcatacgagaccttcttttgtgtcacttggaacatttgaaagaaaagtaatggccggtggccgcatctcccaaacctgctagtttatggcaaaagaagatattgctattatggtatatatttctaaactgtcaccggaatggaacatgtgtttgtgtgagttatttatgatttaactttttagtactatggttttcctttttagtgctgtggacatgtaggggcctacatagagactggagttccatgcctctcagagttcttatacaaatttaacataatcacttaagataggggctcttgccatttttttaaaaaggctaggagtattatacattcccactctaaaaaaatcaggcatggtttggtagttatggggtggttttcacgtcacgtgcaattgtgcaaacatccgtgaactctcgttatggatttatataaaaaactccattaaccctcatcagacatggacatggtaacagaaaaatatttacgtatatagattttaacacaaaacattcattatgtctatttagattgagcgatgcatctatgttcatagcacgtgaaatattgtaaatactcagtcatgcactactataacaggtggttaccgatatagcatcaaataaaagttactccctccgttccacaaataaacgcaattttagcaatgaatctggacatacataattatgtttttttaggacagagggagtaggtgataataacagggtttgtatgatgacctatttcaagttgttctttccatgatctagcatgccttttggcgcataatttttttaacacttgagatcttggactgcccataaaccctagtccattcacgcacctaaaataaaaaggcacggaacatatattcgagataactaaaccataagcatactcctgtctcaaatcaaaagaatttacatgtggatacctgcctacctggtgctttcaatcaaaaggccacaaaatcctcctgttttccggtggaaaggaaaaagaaattcgcgagtatataatgcagggaggagagggagaaaggttgtgaagaggagcagcaaacaggctgcagacagcaggggtgccaaaagcagggaaggaagagcggaaaagcccaccaccaccaccttcctcggatccacaacccggacgccccacccgggtcctttcttcctccctccccagtcccgccccccccctcttctcgcacatcgcaagtattttagtcttactctattcgagtcctaccagtggcaagcaggcaggcaggcgagcgagaggtggtggaggagcggacggaaccgtcgcctgctgcggctgcctgcgagatctaggcgagcgagcgcgcggccatgggtgctcgctgctccaagctctccgtctgctggtggcctccccacttcaaatcgccgatgctcggtacgccgcctaccgcacattgccaccaccgctgcctccccctcggattctccgtgttttttgttttctctctctcctcatcacactctcgccgcgcctggttcttctgttgttgggggcggcggcgtcggcccggcatttggggtgttttttttgttctgctgcggcttttccggggtttctgctgttcgtttccgcgtgcgtgtgatttcgtgcttccgtttggtgggatgcggccccgtcgatctcgctggaactgtggctccgatcccatccgttcgatttgttcgcacgcgcaagagcgatccgaatcgcggttcgccgtggccggcggccgccacttgctgtgctgattcctcacgtttctcctccgctcggttcggcgaattcgcttgctctcgcgaggtttctcgacttaatcgcgtttggttctccgcgtttcttcgtgcactctcgtggcggagagcaatgtgaagctaacagcaagtggtttgctgttgattccgagcgtggtgtgccgctgtgtttgtctggctgtctgctcgcgcccccttggtcctgatccgactgccgtgttcgattccctgtgcagagaatggcgccgccgaggatgacggcagcggcgtgccggtgttcgccgagtacagcctcgacgagctccgggcggccaccgacggcttcgcccccgaccgcatcgtgtcggagcacggcgagaaggcgcccaacgtggtctaccgcggcacgctcttcagctccggccgcaccgttgccatcaagcgcttcggccgctccgcctggccggactcacgccagttcctggtccgtgtaccttgctccttatgatggacggatcgtttcttatgttcgtcccttgcctctgtggcgtctgattgagtggctgtgtgtccgtgggtgcaggaggaggcgagggctgttgggcagctgcgcagtggccggctggccaatctgatcggttgctgctgcgagagcggcgagcgtctcctcgttgccgagttcatgcctcacgagaccttggcaaagcatctcttccactgtatgtttggtttctccttcctcactcttctcttacattagctgcaactagcacatctgggcttgttagagttgattctgatgtcgtactagttcaatgtagcatcaatgtgatggtattgggacccatatttaaggatgtgtgtttgtcacctgtatccaatctggaagtgttgccttaaattgtagagggttgttcaagttagtttctgctgcataaccctttagctgtttgctttgtctggggctaattctgtactttaggctaactgaaaatcgacactggtcttctataattaattttttagtcaccatatttaaggatgtgtgtttgtcgcctgtacgtcagtaccagtaaccactgtggaaatgtggccttcggccgcagagggtggaagtagtttctactgccaaatcctctacctgtttgtttttatctggtgctatttctgtactttaggccagcttaaaatgaacatactggttttctatagttacttttagtcaccaatattgggttgtgtcacttggttctggttggaggtgcagcagtcattcatgccattgatttttaggccatactagaggatatctgtagcttgatttgcatctaacctgcaaatgttgcttcaacaaatggtacttattagggatggtttgaattgctatgacctttcatttagggagcactcttgaagggatatggctgtcaggagcttttagcacttaagattttcaatctttaagtggattatatcaatctaatatatgatagttgctctgtgttaaaaaagatgatagctgcattttatcctcatggtggctgtatgtggcaggggagacaaatccattgagttgggcaatgaggatgagggctgcgctttatgtggcacaggcgttggactactgcagtagcaaagggagggcactctatcatgatctgcatgcatacagggtcgtctttgatgtggtaggtctttacttgttagttgcttctcagatctttcatacaaaagcattaatccttttgtgttttgactgtgggccaattttgtaggatggtaacccaagactatcatgttttggtctgatgaagaacagcagggacgggaagagttatagtactaatttggctttcacacctcctgagtatcttaagacaggtaaatgtgtcacacactagcagtagcagtagtgtcccattaaacattttgggaatgtgcctctttaactgttatctgttctgcaggcagagtaagtcctgagagtgtggtttacagttttgggactgtcttgcttgatctcctgagtggaaagcacattccaccaagtcatgtaagttttcctactctatgtatgcttttaacatactctacaattataatacattggcgctatagtgctattaacatattctagattttacatagaaataaattttacactaaccttttctctcctttatttagttctttgtgtgtggatattattttttgccgttggttatttttttgagggaacgggttgacactaccttttattttccctgtaggcacttgaccttataagaggaaagaactttctagtgctgatggattcttgcttggaaggtcatgtatccaactccgatggaactgacttgatgcgattagcatcccgttgcttgcaatatgaagcacgtgaccggccaaatctgaaaactgtggtatctggtctcgcaagtctccagagagatgcttctgtaatgttctttcttactatggtctttttatgttaaaattcttataccatgaattcttgagtatgcaaatgccccttgtcaaattttgtttcaattgtaaattagaggtagtaagtcgatattatcttgttcgaatgcacttagtgcatgtgttgagaacacaaaggttggttgtgcgtgccatacattttatcttgttttttttctagcatgtggactcatgacattatttatatagttttccttgcttaatagttctaactgaattttaatgcagactccttcacacactttgctggggatccaacatgataagaaaaacccagatctagtttccttgtctgctattgggaaagctttcgccagagcagacctgaatgaggtgcatgaaatactgctgcatgatggttataatgaggatgacgcagctaatgctgaggtaaaagaactatttgccagtaaaccttattcctaggatgtttgttgctgcaacactattgtgctttactcttttccgcaagtaacattgtaacaatccaattactatagccatgtgatagaggggttgtcatcatttcatcaatggtcttgcatggccagctcatgctatatactgctccccccttggcactgtactctctgtgataaacagagaaaaagagagaagatgttatcttacccccgttttatgctgatttaatgtgataaaatacatatattgtagggattctcatcaatcatgaatgtgataaatataccatatcttactttgttttactaagtaaattctggtaacttgctttgaaagtcttactggtcttggatgtatgataaaacaatggcatccatatgctggtcacattctgcatgaaacacaactttgaggttacattcacatttcaactatttaatcatgatcataaatgttcttacatttgtattttgaatgttggaacttgcagctatctctccagtcatggaatggtgatctatctgagagctttgttgttaagaggcatgcagacaatgccttcaagtctaaggaattcgtgactgcaattgagtgctactcaagggtatgcttatattatcatgtgatgcacacctataattctcctacttaccttttgtcctatttcagaatggcagctttgctatttcattgtattcagcctcttttagattgcttttcttccaactaggcttttttatgggtttcagagtaatggcccaattttttgtcctctactgggttgctatgacagttgctcagttagcatgtgtaaggcgtttcaagcattgaggttgtcaggaggttttgtagctaaagttgtgatgatacacatacacctatgacacagttgtgcgaatgtctaggaactagttctcttcgtggtatgataacgaagacacaggcagtgtgaagtaatctgtgttgcaggattatgtttttggtatgttttctttgcagcttcaggctattaatctgtggtattggatacttggcagttcctcgactcaggcgcagcggtggctccaaccatgctggggcggagatgcttcgcatatgtggtgattggcaacccacaggaaggccttgaggatgcaaagagagctgtggttatggcatccgactggccgatgggatactacctgcaggccatagcacttcataaccttggaagggaggctgaaagccaagaagcactgaagattggcactgccttggaagctgcaaggaatagtagagctagatctgtatagccatgaatttgtcataccctgtcctgcttgtacctagatcgcctgcatttcgggtgcctccctccaatgctttgccaccagtagggctgtttttggtattccctaacttgtatcggtatttcccatggttttacatgtcaggaactcctaggttggctgttattacacaggaatgggcaactagtttgcaatagcattctgttgatgtgagtttgtaaagtgacagaatttccatttatttcaacaaattcatgtatatacaaacttttgaaccctgcaacttaagatatttgaggtcaggcaaccttcaactatggtcaatccttgagggcatctctagtgctaggctctcttatgcactattttctcggtctcaaaataaatacacatctcaaaaatagcaccgatgtttgtatgtagtatttatttattttttgtttttatatatagtcaaacgtaaaattaattgactcctcgaagtgtaagatgtgtatttattt

SEQ ID NO: 3407 - DNA, 4125 bp, Sorghum bicolor
ggacaccagcgggttgtagtcgaagtcgagtccagcaagaatgaaggtcaccagttcctcatctggaaccgggcgaccagcggcagcgagttcatcgccaagcgttttcatcttggcgaagtaggcggcagcagtttggccacccttcttgcagttgacaagctgcattcgaaggttggtgaccctggcctgcgactgcgcagcataaatgttgctgaccgtagtccagacatctgcagaggtggtcatcatcgccacctgccccagcacctcccttgaaagagagttgttgatgtgggctagcagttgttgatcctccttcaaccacctttcgtagtcaggattgatggcggtgtgcttcgtcttgtcttccttgatgagctccactagcttgggcggtgcaggtttggttccatctaggtaaccttcatactgcgccgccttgatgtcgggcatgatctgcgcattccatagaaggaagttgtcgcgcgtgagtttctccgagatggcagggccaaacggagagtggtgggagttgcttgacgaggaagatgaggaggccgccattgatgctagatgtgtttatggaagagcggctctggtaccatgtaaacgaagatggaaccgtgattgcctatcttggctcatcacgtgtacgtgttgagatatatatatatatatatatatatatatatatatatatatatatatatatatatatatatatatataacgattacaaacttgacttacaaggcattcggtaccgaatgcattacaggacaatacatatctgatatcttaacaaacctcgctaccctcaataggtactaattgtagcttcaccactatttgtagcttcaatggatgaggtgagagcgcattagttaaagtacacttgacaccccacggttaatggtattttgaatcatctccatggtttagaatagagagactctgatagtctgctaccaaaagcattaggcttaggcatcatgagacacgcacaagtgcaactacaaccatttgattcgcgatagattaagtgcttgtttgatgggctaaaagaaaggtcaatcgaaattagcaattggccgtcatctaagcctttgaggacaatagcaggactaattttttgtttttgtttatacacattctagctattactaaaatattagccagctaaagatggctaattaacttgagctaacttaaactgagactacctctttagtctcggattgtaagtcgttttgacatttcaatgctatgcatcttaattaatatacactgcgtttggattcatagtaaaagttaattgtgtttgctagaagtttataattttgaatggagtgagtatactagtactataaaaagttagcgtatcttgtgctctaaaggaagaacaccatttaattactccattatattaggacagatgatccgcgcgtatcaccgccacagaccgctcaaatatgtactatccgcgataatgattctcccagctttatatagctcctcctcgctttgccgagacaagcaggcaaggccagcagctaaccacgcctgtgtctaatccctggaccgtacatgattagattagattagattagattagattagattaaacacgtagtacatcgcccctagatttccggcagaattaacaaaaccgcgggcagcagctagcacagagccgatgccgatgactacaaagaaagccggagcctgctgaggcggcggcagctatggcattggcaggcaggggcacgacgtcgtgggggcccccgggcgcatagaaaaacccgaggaaatggcagactggcagcgagaagcacgtccgagaccaggcaggcaggcaggcgattcagcgtggggtgggggtggccaggggagacgaaccctgcctggatggctgcaggatccctccctctctccgcgcttcctgcataatatattcgcccaccatcgccacaacttgcacgggggccgatgactaatttgcgccagatgcactgcatcggtgcctccaacgtctccaaacctctctgtcgcctctctcttctgcttgtctgcgtctgcgtctgcgtctccatctctatcgtcgctgcgtgtatcaggttgacgaccaccagctagccgccgcagcatcggttcggttcctcatacgaaccagctaaaactggcatggacatgctatgccgcgtcaatcgatctcaccaggtatgccgcagctgctacaagcctaagctagtacgatcgatcgcagtatactctatgcctatgctcgatgctgatgtttattttgcatgtgatgtgatcgtatgtatggtgtggccctcgatcccatgtcgcgtactataccttttttagttgatatatcatataatccatcgtcctatatatatacagcaggatcattagttcactgatataaaagattaattgctgggttgataatactatatatggtgcccgctcgatctctctttcttgtatattctttcagctaataaagggttggtctagctcttttctggaagaacaaggaattgggtgtgcctgcttttgcctcctacctttacgagttctcttccctttgtctatggcttttaccagcttttttttcctgctgataaaataatttacacgtatgtcttacgcataagctagcagcaggtgccgatgtctgaatatctgatcatcatatcgcttcatgtgctgatgagatattttttcgccgaaactgcagtgctaatagcaagatctggcctgattcggcgatccagcagtcagagttcatgagatcgagtgcttcagctccaagactgcaggctacctagctgtgtgcactgtgcactgcatgcgtgccttggacttgaagacggcacacgcaaagtgcaaggcatcgactgaaccgagcgctccgatccgacccttctcatggttcttcttgagccccagaaacgatgagcaccggccggccggaggacatccagcagctaatcaacagtgccactagtagccccaaccgcactagtccatccgcctcgcccagcgacatggagagcggcggcggaagcgcgtcctcgccgcgcgcttcgacgtccgaccggcgcctgcagagggccgcccacagtcacagggaggagtgggagcctgctgctgctgctagcggcgatggcggcacgggtagcctctggtccaggtacttctcgctcccggtcctcctgctcgtcggcgtcaccgcgtcgctggtgatcctcccgctcgtgctccccccgctaccgccgccgccgtcgatgctgatgctggtcccggtggcaatgctggtcttgctgctcgtgctggcgttcatgccgacgtcgagcgtccgcgctgggacggggacggggccgacctacatgtagataatcacattgttttttttttcttttcttttgtcctttcgtttgaattttgtgatagagagaggtcatgggatggatcaattggtcctcagcttcagcttttctcaatcgtacaatgtctctctgttcggctaattaatttgcttagttatagccgagagtacagtatatatatgcttatactagtcacagcacagtaagggggtgtttagttcaaaaaaaatgcaaaatataaaataccaactattttggaatggtggaatgcaaaatgctaaaatttttagggtcatgtttagtttcatccaaaatgcagaatttttgcctcataaaagcctcttgaggatcattttggattcttttgcctcttgaggccaaaaatccaaaatgaagaataaccatatttttgtcaaaaattttgtatggtgtttagttccattttgcaaaatggtggatcaaaacctaaaattttttgggaaaaaagaggaactaaacaccccctaagttcagagaacgttaaattatttaaactttttatttgttcaagttctcaaatttcccaaataaaccagtatttcttactttttgagaagtcgaacttttttaatatcaatatttgtatctctaaataagtttattataaaactatactcacgatcaatataatgatgtttattatacatcatacatattagtatatatttttgttaaattttaa

SEQ ID NO: 3408 - DNA, 5641 bp, Sorghum bicolor
cttcatatcatcacgtgaccgtattggttcatcgatcttgacctcacttgctcttcaccgttgcctcggtccaccggcgtcaagtcttgctcaagcttcaccgtcacacgtggtctctcgcttcaaagcctctaacttgcccttcactcttgcaaccggtccatcgagccaagcctcatctcgatcttctccaccttggtcacatgactccatgtcatgtctcatatgcaatgagctcctccatcatcacataatcacctgtggactaatcttctgtgtatctcacataaacactattactccacctaagttgtcactcaattaccaaaaccagacaaggacctttcaacagctcaaccttacaatagctaagctgttttgaataagtgtttggtaaaatagcttcatcaactacttcatgcatagttgagagagagaaacgagagagagagctacaataagctacttttttcagatttatcccaactcatgtctttgtgagaggagaggaaaaacagcttcatccataaagctgttttggaaataagtgtttggcaaaaaaaaacagctcacaatagctcatgaagcgctatactaaacaggccctaaatgtttgtaggtttagcctggaaaaagtctactttacgtccctcaactttcgcgaaagtctgattttcgtccctgaactttaaaaccggacaaaatacatccctcaacttttaaaccgtgcacattacatccttgacctggttttgaaagcggttttacctttttctttttatttattttggctgaattttttgaaaaatcacaataaatcacataaaaatcataaaataaaaaactcaattttgttggactttagatgagtagatctacacattgaatatataatatagtatgttctagtacaaatttttttgatgcatctttagatttatgtttttctgtaattaattagactaattatagctacattttctatggtccaattgtgatgaaatttatatggtgagctaattattctatgtttaagttatagtaaaaattttatactcattgaatcacgtattacttagttatagatttatttaggtttatgcttgttaaattataataaatctataactaagttatacatgatctaatgagtatgaaatttttaccatagtttaaacatataataattagtctaacataaaaaaatcaccataattagaccacacgaactatagctatgaattattctaattaattatagaaaaacacagatctaaagctacaataaaaattttgtactaaagcatactatattatatgttcactatgtagatctacttatctggagtccaacaaaatcagatttactattttatgaattttatgtgatttactataattttacaaatattcagccaaaataaataaaaataaaaaagacaaaactgccttcaaaaccgctcatagccatgtcaaggacgtaatatgtatggtttcaaaaattgagggatgtattttacccggttttgaagttcagggatgaaaatcagacttttagaaaagttgagggacgtaaagtggacttttttttttcttgagcctgaaccgcagaacggcaccttatagcaggccgggtgggtgcgcgaactcattccttgatgattcggcccgttcgccgctaaatggcctgtttaccgctgggccagtgtccgcccagtgtctaggcagatatcgagattgtaagataatgggccgaagttgtacagtgaaccagactgcaaagcccatattggaggcccgctcgctctctctttgtctccctccgccaccacttccggcagccaaacggtactgacccgacggccgccgctcttctccatttcaaattccaaacccgttccatccccttctccgctcctcgacgcaaccaatcgccgtgtccttcaactcgaagctcgccccgcgttcctcgcccccaccagttcccgctcccgcccacgatgtcgacgcgtgaggagtggagcatgtccgacttcgagatcggcaagtacatcggtgagggcaagttcggcaaggtctacctcgcccgcgagaagcaggttcggcacgatcaacttgtaccctccaattccctcgattacctccaaaatttcgcctctatggaagttaacctacgcgtggtgatgatccagagcgggtacgttgtggcgctcaaggtgatatttaaggcgaaactggagaagtaccgcttccacgcgcacctgcggcgggagatcgagatccagcacagtctcgaccaccccaacgtgctccgcctcttcacctggttccacgacgaagagcgagtcgtcctcgttctcgagtacgcggcccgtggcgagctctacaaggtcctccgcgctgctggccgcttcaccgagcgcacgtctgccacagtaaaaactcccttcctgtttcccttttgcttcactgttatttcccgcttgtgcctacggttggattgccattccttctactgttgttaacctgaattatcttaacctgaaccataataaccgaggcaaattctcatatgacagcaactgtgtgattttttgtacaaacaaagttcagagaactaggcagctagaccttgagctgagtaggtctttggttggcaattgtatgatattattacttctactcaagtcttgaatggtagcaataaagttttgagtaattgcccgacttgattttactggaatcagatatcaagtatatgacagaatgagtcattaattgccggtattaagtattctttagaaactctaatgcatttcctaggaatgcaaggcaaaggatcaatcccattttacaagttaaactgaaccaaatgtttatatgaactgctacccatgtgtcgcacatgctgtacactctgcagtttttgactttattctcctgaagtcctgaacccatacatttaggccttgtttagttcccaaaaattttcaagattcccatcacatcgaatcttgcggcacatgcatggtacattaaatatatatgaaaacaaaaactaattgcacagttcatctgtaaatcgcgagacgaatcttttaagcctagttactccatgatttgacaatgtttttcaaataaaaacgaaagtgctacagtgtcgaaatccaaaaaaatttcaaactgaacaaggcatacacaaaacatagcgagaactcatggtatctcttttagcatgacactgtcttagtctcaacttgtgatgatgccattcaaggcaaagcttgtgctggcattgccatactacatcgtagagcatgatatacatatgcaggtttccttctatttgacattcttttgttagattgtgacaccaatgaatcctatgtgctttagtatgtcgcgagccttgctggtgcattggcatactgccacaagaagcaagtcatccacagggacatcaagcctgagaatttgctactagacattgaggttggttcttctttacgaagttgttgctgctgttatgtttctaggactatatttgatttatgcatttattattttgttatttattattgttgcaagcaaattgatctgtgcatgtctttatacttttactgttttttgtgttgctgtaatttttattactaggtcttattctacacaaaatggattctaatataatcattactgtaaaatactttgctccaggctagggcccgtagtttttgcaccattttgttataatttaataggctggtgatttagtactctagtttctgcatataataggatctaatagaaccattgctttaagtctgctcaagaatccaatcttcaactgatcgaataggttcaaaattctctttctaaatgtttgcccctcttaagtctacattataaaagtattttactgtttatgcaagcaattcagtctataagacttggctctttgtaagtgtcaaaaactgaaatgttgtataggaagtaggaaggaaattcatataaagaacactaaaatatgaaaatcaagttagactggcgcagatgatctagctactattgaggcatggcgcttagcgtttacttcaaatacgtagcccatgtgcttgatctttctttctttttttttttggctgcaaaactcctgaacctgagattgcaacaagctctcaggaatgaatgaatgaatcagggggggttctctcccatggatcataaaaaagaagaaaaactcaagccacagtatatatgttcaaagcagatgatatttgtcactacatctcaataagggtaagggtaattcatcttgcatacaagtcacacctggacagatatcatgcctctatgaatgaatatggaaacacatataacatattattgccggtttactaacatatctggggaaaatggctatacaaatgtttcttcaatgcctcagtatttctgaagaacttcaattgtcgtgatgggtattgctcttgattcatcaaatgctaggtgttgatttgataactagctaacttcctttttctccagggccggcttaaaattgcagattttggatgggcagctcgttcaaatgctaagcgacacacactctgtggcacaatcgattatctggcaccagagatggtagagaaaaaagctcatgaccatgctgtggacaactggacactaggaatcttgtgctatgagttcttatatggttcacctccttttgaagctgatgaacaggatgataccttgagaaggtataggctgaaacatctttttttctctctccttggtcttcattccttaacatcctgtgcgacatgccgacatgaactttgtgcaggatagttaaggtggatttggcattcccttcaactcctcatgtatcttcagaggctaaggatctcatttccaaggtgatatctaaaagtagtggttacataagagattagctaaattgatgggtgtggactactgatttataagtgtgattgtgtatgcagctgctagttaaggattcaagcaagaggctttgtcttgaagacattatgaaacatccatggataaagaagaatgcagacccttcaggaagttgcattaagcaaaaagatgtaacaagagcaaaggtaagcgataagtgaatatgcaagatatcttctgggcgtggtgttcttgatccttggagataatcagataaccatgtggtttagtgtcaggagaagccagccgtatcgaagttgttaaacttctgttgtttgcctcttctggggaagcaattaaccttggcttttgtggggatgcagtagttccatatttttccggtccctctgtgatcaaatatgtgaatgtttggcgggtgggtgcttttatttggctactatgaaattgttgacattgtaatttcattgcttcattgatgaaacttgggtttacctttttcgaaaaacacaatagtgttctctgatgactgctgggtatgaaaaaatataagttaattttattttagcttcattggcatggtattcttgtttagcttcacatgtttttgtcatataatttgctgtcaaatgcaaatgtggcacctgggcccctaattgatgccccataacaatatttcaatgtggtaatacacttccattcc

SEQ ID NO: 3409 - DNA, 16083 bp, Sorghum bicolor
acgccaaaagtgcggtatagtacgcatacacagcgctttattgtggtctccttgtctgttgtcgttcagctcactgttaaaccatgtgcctatgtttatcctatatcattttcacctttccatacatgtgatgtactattgtcgagtaaacaattaattactaatcacttattatatattaagaaaacattaatttttggattggatcgccggatatatatacaattcgtttagcttttttaaatatatatatacaattcgtttaattactcacaaaattagggagtgtattttgaaactcaacacgatgataggaaaaaatagctgtaaatagagccacatttaatatttatttaaaaaactccttatcataacaaactaagcctgacaaggggcacgctgatttttggaatggccaaagagaagcgcaaatttaagataaaagagtagacaatatgaggcttttgggtgatgggggtaaagtggggcattgatggatttattaggttattgttgggtagacgcttttagcaaaagcctataatcaatttgtacgattttggtctgctgaaagaattgctcttactaaagggagcatgccattgctaatacaggggaatgcggtagctttggcattggcatagaaaacgccactgatcgaggtgaatcttcacggaagctggtaaaaaaacacacacacagggggaacggagcacaacggccgtaaaaaccacgataaactggcacgaaagaattccggtccgctcattctgagggactatacaagctttgggcccccatgctaacttctgcatgcatccatatcggttcgtttggtaactctcacttggcatttagcatctctaaggtttttgcgtttgaagtttgcattcgagtaatttgctaaaaaagcttcaagagaggtatccaacggttttgtatttggagtttgcaatttaggcaacttggcaaatgagggagcaaatttggtaaaaatgccaagctgtggacgactttgcaaacccgatcgcgcgaacaaagtcacgcgcgaataatggagaccttctatttttatcctttactaagtccaaatatcaattactagaaagtgtctatttttatcctatgcattttgttatgggagtttgtaaatagcaacaaatctcaagttaattttccaaatcctttgaaaatgctcacacggttctaaaactttcatttgccataccaagaagggacgtcgccacactcccataacggaatcgagctgcggcgagagcagaaatcacccacaacgcagaagggatcagaggcgcgcccactggccacgccacgcactcctatgctacgctagtccatagagtggcaggggaggtgaggtgaggccactcttccatctctctctccttttgcttcccctctcttgctcacttttcagcggaggaagagaggagcaaaagcgagcagctcatcccagagagatttcagttccaccgcgacgtcaaaagaaagcgagcttttggtggtaatcccttggagcattgcggcggcgagcgagatctgccacgacgcgccgccagctgctgcagcggcctgccactgccactcacctgcgccgctggctgaagagtcgccgccgtcgtgcccattgcctactgcgccgtccactgtccctcgccggcgtcttatgcatggccttgcgacccgcgcactcacgctggagagtagagacacgcagatagcaccaagaccagcatcggctgcgtagctgctgctgctcggtgcggcgtctcttctttctagggggcgggggaaggaggaggcagacggccaggcagccaggcggcagcgaggaggggcgcgtagcatagcgccgtagcggcgtagagaagaggccgccgggcggcgagcgcgtacgtccgttgcagagcgtgcgcgcgcgagcgccgcgcgctctggcctccgtgcgacaccatacggcgcgcgaatcgccgatcgacatggcgctggaagctctgtgcacgaccaccagcgacgtcctcgtctacgacaccttcaacgccgccgccgccgcgtgcgccgcttctgcggggacggggagcttcctcttcggcaatgcagcaccggtggaggtgccgccggcggcggcgatggcgtcccaggcgaacggggaaagcggcgtgcagcaggtgcggaggaaccggcggcggcggcagaggagcgccaagaacgccgtggacgccgagagccagcggatgaaccacatcgccgtcgagcgcaaccgccgccgccagatgaacgagtacctcgccgcgctccgctcgctcatgccggactcctacgtccaccgggtacgcgatcctactacgctactttttcttataaaccggcaaaagaatctttgcttgcgaatcagatattcagatagtggcactgttaccgtttggtcatcccgcgacttttcttcttgccaaatcacacctacgtgtactgccagtcttaccaccccagctgttgctttgatttattcaaatgtttttgtaataaaaaatagaaattttgatcatatgtagagtgatcaggcgtccgtggtcagcggcgccatcgatttcgtgaaggagctcgagcagcagctgcagtccctggaggcgcagaagctggcgctgaaccagcagcagcgcagcgacaaggcggcggagcgcgacgcggcgcaaccgtcaccaggtcgtgacgacccagcgtccgccggcaacaacagcggggacgccgcggcgcgcggcgaggtgtcggcgccggagctgcagccgcagccgcagccgcaaccgcctccgttcgcccggttctttcggtacccgcagtacgcgtggctccacgccacgccagcgcgggaggacgccgtcgtggccgtcggcgcgggcgcggaggagaaggcggaggcgagccgcgcgtccgcggtggcggacgtggaggtgggcacggtggtggactcgcacgccagcctccgcgtgatggcgccgcggcggcccgggcagctgctgcggatggtggccgggatgcaggcgctcggcctcgccgtgctccacctcaccgtggccaccgcgcccgacgccacggcgctctacacgttcagcctcaaggtacgactgcgacacctacctacacacttccctgatgagtatcggttgcaacggcctctttctccttccgtccacggaccaaccgtcatcgtcaatgccctcattaccactggctcgtttcgttgtgctgcctgaaatggtggtgcatctccgtgctaacctgcactttggtcaccacacaccactgtcactgtgcaagtacatgaccaaatcctctgttgatacggttttatgtaaacatcacacgtccaccgaaattccaggagaggcatttgcaagacaccgcactccaccagcgcagaggccattgttcatcacactggcttttgtgcctgctgggccagcaccactgcagcaggagccatgggcgctcgcttttgaccacgagattccagggcgcgaaagctgtttgctgcgtttgaaaaagctgtagcactgggcttttgacgtccctgtactcccatcgtctgaaaaaatcgagcagataggggagtacagtgaaaaggaaaggccgtgtgttttcaccgtttcttggtgagcggagcaggctcagctagcctgacatggcgaggagatccatcgatatcgatatcgatcagcagcgacgaaaggctatggactgtgcagagaaaagattgtgttgtgtgccgctgccggccgccgccttttttctagtatcatgtgtttgtgtgcccaggagccggacacaacgacgcagtaggcttttgcttgcccttttgcctgacttcacgaacatgtactcatcgtctctcgcatgtggcgctctgcaggtggaggaagggtgcggcctggcgacggcggaggacatcgccgtggcggtgcaccatgtcctctgcatcatcgacgccgaggcgagcagcagggcagccgggcctcgagcggtctagctaggcaggagaaacccaccgcccagcctcccgacgaggtggtgtgccggcggcgcaacgcaatggaggcgagccggggagcatggactgcaggtgtctgctttcgtttttcttgtaaagtgcagtgtcgtgcgtgcgtggctgcgtgcgtagctggccagcaggggagcctgctgccgtatgtataacggcaggcaatactcacgcaagttcgtttctggactttgtggtctatggtcacgttcgtgcatgccgacggcgtatggttatgcgtgcccttgtcgcgttcactgcgatcgggcggcggcgtctcccttgcattgggccggctagcgagaacaagaaagcccaggccagctggaatcaaacatcaaacgaagatccaaaaaaaccagataggtaaagtgggatcacattaggctggtattgtttggcgtggattagagcaggtacaataattggtttatagctaaactaatgctgatgtggaggagagaagagcggagagataatagtttggctcttatgtaagcatcaaggtggacacggatgcatagctagtggtgggtccaaataacaagtgttgtgagaaagattagaaaagaaaatgtgttttagagacaagtatgagacaacttactgtataacttgactttaatcacttatagcttatagtcaaccacttgactttattattgaccttgctcttatgaaacaacaggagccctcctcacttttgtgcacatgccaaaacaaagagtaaaatacgctgatggcccttaaacttgtggctttgtgccacttacgtccacaaactcgaaatccaactccattaacttgctaagtcgtgcactgcaggctgactaggataaattttataaaaaacaccttcctcttcttcaccttctaccaggccacaaacccggtcgcgccgccagcctccataccgctcctcctctagctctcatgcaacgccttcgcgtggagctcccgcggggaaagtacatccccacggcaagggcccacatactggatgcgagcgtggccctgtagaacttcattgcttctgtcaatgggctaacgtggagctcacgccttgtttagatctgattttttttttatttcgacaatgtaacactttcgtttttatttaacaaatattgtctaattatagagcaactaggtttaaaaaacccgtctcgcgatttacagacaaactgtgcaattagtttttgttttcatctatattaaatgctcagcgcatttgccgtaagattcgatgtgacggagaatcttggacggggaatctcgaaaattttttggattttaggtgaaattaaacaaggcctcattatcatcgtctaaaaaagttagaatccccgtcaagtacggggacgaattgggatccattcaataaaactccgtaaccgtaaggatttgagaaaattcatctcgtgtaataaagttgatcctaacgatgctgctattggtagattctccagtgatgctaccgttcaaagcgcacgccatcgttgtcaggggcttcgtgccagtacctgcttccgtgcttcgtgccagcagtactatctagtaccccggaacgtacgtgcgccccggggcgccggccgggccacacgccacgcgcggcgtacagtacgctggtggcaccgggcgcgagcggtgccggtgcgccatggcacgcgagcactgccgtgtacctctgctggctctgcaactgcaaagcgtctgcgtctccatcgaccgaccgacgcccgctgcgtccggcaccgcgcctgctccggcgtccgagctgccactgccacgccatcggggattcggggcgccccttttcatgcgcggcggatcggcccggccggcggggccgcggaccgcggtttggcggtcggccggttgatgtggcggtgcacggccgggcccgcagctgagccgcttggagagaatctccagcgtcctgcgcctgctgcccggtcgccggccggccggactgctggcccgatccatctcgtcgggtcgacgtcgtcagtcgtcaccaacgcatggaatgcaaaagctggacatgggccttgattattttctttggtttgtgtactgttatatttttatttttatttaataattattattcaagtatgggctaactaaactcaaatattcatttcgtaattatagaatttttgttttttcatctatatttagtgcttcatgtatgtgccgcaagattcaatgtgacgtgtaatcttgaaaagttttggtttttgggtgaacaggtcttgtttagttcactctgaaaactaaaaagttttcaagatttcccgtcacatcgaatcttacggcacatgcataaagtattaaatatagacagaaataaaaactaattacacagtttgcctataaatcgcgagacaaatcttttgatcttagttactctataattggacaatatttaccacaaacaaacgaaagtgctacactagcgaaatctaaaatattttcacatctaaacaaggcctaaggtcgtgtttagacccaaaagtttttggattttgacgcgatagaattttcgtttttatttaataaacatcgtccaatcatgtactgactaggcttaaaagatttgtctcgagatttttagacaaattgtgcaattagattttgtttttatctatatttaatactcaatgcataccgcgtaaattttgatgtgacaaaaaatctttaaatatttttgatttttgagttgaactaaaatcttcttcttttccctcctcctacaagcacatgccctcgacctttgcctccgttactagtatccatcggcatcaatgcacccccgccagaatcaaaggactcgccaccaatgccctatcttgcccaccatcagcaaccagtgtcgcgccaccatcggcagttgcatcaactatccctgttgccacgacctctgccctcctctaatctcgggaggaggaagatgtggacctctcattcctgccgctgactccgtctgcgtctctccgatgtctctagctgctcacttggcggtgtttcaccacctcgcttgccccctccccattgttaataggggggaacggtagccttggcattagcatggaaaacgtcactgagatgaatctccacggaggctggtaaaaaatcacaggggaatgtgttaggccctgtttagattgtagataatttttttttatgttatatcgaatgtgtcggaaggatgtcgaaaaggttttagaaattaataaaaaaacaaattacataactcgtcagaaatctgcaagacaaatctattaagcataattaatctgtcactagcacatgtgggttactgtagcacttaaggctaatcataaagtaactaggcttaaaagatttatctctcaatttttaactaaactgtgtaattagtttatttttttatctatatttaatgttctatacatgtgcccaaagattcgatgtgatggataaaaaaattttgggtgggaaactaaacagggacttagggtgtacagcttggtcgttaagttttatgtgcaaacaactttgatttaatttataaaatataatatttttaatttcaaataaaaatatatcaaaactaaaactaaatgtacatcaataatactaattttgtattataattattaatatttttaaatatagatttagttaaatttatttttcaagaagcgaaaacgatgtacattaagaaataaagaaagattgatcatcatgttttatgcacaaacaaacaagtttgatttaatttatagaaaatatttataatcttaaatgaatttatatcaaaactacaattaaatatctatctaacaatattaattgtatattataattattaatatttttgaatatatatttagtcaaaaaaaatttacgtacttttagaaacagtagcagctgctgctgcacacctgcccgcgtgctgcataaagatgtcaatggggcccgcgacccgcgacccgatgggtatttactctattagggtaccaatatagagtgaaaccagtatccatgaatacacaaacggagtaaacccttcacccattgggtatgcgggtacggggacgttctagtagtccccatacccatttacccatgggtgaaaaataccaagtccaaaactaaagaagcctaccagccaccagtccaccggcagcccatacactgaaattctatgtagtgctagcaaagtactactctctactacgtgatttgtatggataataaactattatggtgttgtgactagtggttgcagcagaaattattatgttgctatttgctaggtatatggtgagatggctatgtgacgatgcttgtgaatggctatgtgacgatacttgtgaattgctactacgtgagtggtgcttgtgaattgctgatgtttggcgggtatgggtgacccgccgggtctaatttacccacctgggtatgggtctggggtaattctcccacccatcactgtatatgggaatacccgtggtgtcatattgttgtcacgggaatgagtctggggattcatacccgatgggaatttacccattgccaacactagtgctgctgctatcgtttctcatggctgctttgatggttcgagcctgactgaccgcattgaaatccaataatattaattttatattataattattaacatttttaaatatttagtcaaagaaatttttacgtacttttagaaacagtagcagctactgctgctattatctcctgtggcggagtggttcggtcgcgtcgaacatgaccggctaatattttttaatatatatttttgtcaaagtctctgtttatttcctcatctaaaatttttttatttatcttatcgaatatttaaatacatgtataaaacattaaatataaataaaaaataaattaattacatagttcggtagaaaatcacggaacgaattttttaaacctagttagtctatgattagccttaagtgctacagtaacccacatgtggtaatgacagattaatttttcttaatagatttgtctttcagtttcgagacgagttatataatttgtttttttattagtttttaaaaaccttttgacatttttttcgacatattcgatgtgatataaaaaagtttttcatcttaaatctaaatagggccagagtttttcacatactttccttgtttagtttttaaaaaattttacaaaattttttagattctccgtcacattaaatctaacgcatgcataaagtattaaatatatacgaaaataaaaactaattacacagtttagtcgaaattgactagacgaatcttttgagtctagttactagatgattggataatatttgtaaagtggtactattactattttataaaaaattttaaactaaaccaggtctgctgctgcactgctctgatggttcggtcgacgtcgagcctgactgaccagcgaatgcattgttccaggagtatggccttgggtagggcttgtttaggccttgtttacttttcgaaaaaaaatttcagattcttcgtcacatcgaatctttagacgtatacatggagtattaaatatagataaaaattaaaactaattacacagtttgatcggaattgacgagacggattttttgagcctagttagtctataattggacaatatttgttaaatacaaacgaaagcgctactatttctattttaagatttcttgtcacatcgaatcttgcgacacatgcataaagcactaaatatagataaaaataaaaaactaattataaagttacctataaatcacgagataaatcttttaagcttaagctttgtttagatatgaaatgtttttagatttcgctactgtagcattatcgtttgtttgtggtaaatattgttcaatcatggaatgactaggatcaaaagattcgtcttgtgatttatagacaaactgtgtagttagtttttattttttcatctatatttaatacttcgtgcatgtgccaaaatattcgatgtgatgaggaatcttgaaaactttttggattttggtgggaactaaacaaggccctagttactctatattagacaatgtttataaaataaaaatgaaattggtacagttccgaaaaccaaaatattttcggaactaaacaaggccttagttcccaccgaaatccaaaaagttttcaagattgcctgtcacatcgaattttgcggcacatgtatgaagcactaaatatagacaaaaataaaaactaattacatagtttgtctgtaaatcgtgagacgaatctttttactctagttaatttatgaatcgataatatttataaaaaacaaacgaaagtgctgctgtatagaaatccaaaaaagatttcgcaaacaaggcctatgggtcgctttgaccactgtagggagcttaggccttctttaattcaccccggaaaccaaaaggaaactaaaaagtttacaagattttttatcatattaaatctttcgacacatgcataaaatattaaatatatatgaaaataaaaattatttgcataatataactgtaaattataagacgaatattttaaactttgttagttcatgattagatattatttgtcataaactaacgaaagtgttacagtagcaaaatcaaaaatcatttcgcatctaaacaaagccttaggcctagtttaggccttgtttagttcacgcaaaaacaagtttttaaaattcctcgtcacatcgaatcttgcggcatattaaatacagacgaaaataaaaattaattacacagtttacctgtaaatcgtgagacaaattttttgactctaattaatctatgattagaccatattttatcacaaacaaacgaaaatgctacagtagcgaaatccaagattttttcacatctaaaaacccaaaactttacaagatttctcattacatcgaatcttgcgacacttgtatggaacattaaatataaataaaaagataactaattgcacagtttatctgtaaatcatgatacgaatcttttaagcctagttaattcatgattggacaatatatgtcaaataaaaacgaaagtgctacggtgtcaaaatccaaaaaaaattttggatctaaccaaagccttagtctataattagatagtattaacacaaacaaacggaagtactactataacgaattaaaaaaaaattatatctaaacaaggcattaggttttgtcataggccgaggcagccgtggcagcttgcagcacagagagagagagagcaaaaccgagcggatcacagctagctcagcctcgcctcgcagagagattgttccacggttccaccgcgacgccaaaagaaagcgagcttttggcccttgtttactttctaaaaggtttataaaattttttacaattctcgtcacctcgaatatttagacacatatatgaagtattaaatatatataaaaataaaaactaattatacagtttggtcggaattaacgagacggatctttttagcctagttagtctataattggacaatatttgtcaaatacaaatgaaagtgatacagtgtcgatttcccaaaattttttagacaaaaagttttcaagattctctatcacatcgaatcttgtggcacatacatgaagcattaaatatagacgaaaacaaaaactaatcatacagtttgactataaatcacgtgacgaatcttttaacctctttaatcgaataatatttatcacaaataaacgactacagtagcgaaattcaaatttttttcacatctaaggccttgtttagttttccatccaaaattttttcatccatctcatcgaatctttagacgcatacatgaaatattaaatgtacataaaaaaataaactaattatacagttggtttgaaatcgcgagacgaatcttttaagcctagttacttcatgattagccttaagtgctacagtaacccacatgtgctaatgacagattaattatacttaatagatttgtcttgcagtttcatgatgagctatgtaatttgtttttttattagtttctaaaaaccgctcccgatatttttccgacatatccgatgtgacatcctaaaaatttttatcttcaatctaaggccttgtttagttcgcaaaaattttcaagatttctcgttacatcgaatctttggtcgcatgcatggagcattaataaaaactaattgcacaatttacctgtaatttgtaaaatgaatcttttaagtctagttattccgtgattgaacaatttttgtcaaataaaaacgaaagtgttacagtagttaaaaatcaaattttttgcgaactaaacaagggcctaaacaaagccaaggccttggtggtaatctcctggagcattgcggcggcgagcgagatctgccacggcgcgccgccagctgctgcagcatcctgccacagccactcacctgcggcgctggctgaagagctgccgccgccgccgccgccgctactggccttgcgacccgcgcccacgctggagagtgagacacgcagatagcaccaagaccagcatcggctgcgtagctgctgctgctgctcgtctcttctttctttcaaggttgcgggggaaggaggaggagccaggcagccaggcggcagcgaggaggggcgcgtagcatagcgccgtaccggcatagagaagaggccgccgggcggcgagcgcgtacgtccgttgcagagcgcgcgcgcgctctggcctccgtgcgacaccaccgatcgacatgacgctggaagctcagtgcacgaccaccagcgacgtcctcgtctacgacaccgccgccgccgccgcgtgcgccggttctgccggggcggagagctccctcttcggcaatgcagcaccggcagaggcgccggcggcgtcccaagcgaacggggagagcagcgtgcagcaggtgcgggggaaccggcgggggcggcagaggaccaccaagaacgactcggacgccgagaaccagcggctgatgaaccacatggccttcgagcgcaaccgccgccgccagatgagcgaggccctcgccgcgctccgctcgttcttgccggactcctacgtccaccaggtacgcaatccttcgctactgttcgttccagaaccccgatcactccgctgtggccaactggccatgcatttccaattccatcctccgttagtttcaatgggattcagattctctagtgtatgccgctaatccggcgaaagaatgttggcttgcgaatcagatgatggcactgttatcgtttgctcatcccgtgacttttcttgttgtcaaatgtttttgtaatctaaaaaatataaattttattcatgtgtagagcgataaggcggccgtggtcagcggcgccataaattgcgtgaaggagctcgagctgcacctgcaggcccttgaggcgcagaagctagcgctgaaccggcagcagctgctgctgcagcagcagcagcggcgcagcgacacggcggcagagcgcaacgcggcgaaactgtcaccaggccatgacaacccggcgtccgccggcaacaacagcggggacgccgcggcgcgcggcgaggtgccggcgccggcgccgcagccgcctccgttcgcgtggttcttccggtacccgcagtacgcgtggcgccaggccaagcaagcgcggaagtacgccgccgccgtcgtggagggggaggaggcgagccgccgcgcggccgcggtggcggacgtggaggtgggcatggtggaccacgggcacgccagcctccgcgtgatggcgccgcggcggcccgggcagctgctgcggatggtggccgtgatgcaggagctcggcctccacgtgctgcacctcaccgtggccaccgcgcccgacgccacggtgctctacacgttcaacctcctggtacgactgccacagctacacactttctgatctgtatagctagcaacgatctcttgctccttccatccattgaccaaccgtcgtcgtcaaagcatcattatcccctggctcgtttcgtcgtgcggcctgaaatggtgcatcgccgtgctaacctgcactttggtcacctcacaccactgccactatgcaagaactacatgaccaaatcctctgtcctttatttacaccaaaggctctctgatacacacttgctagttgcgaaattttttttcggatttcggcaccgtagaattttcgtttttatttgacaaatattatctatttatagacttattaggctcaaaatattcatctcgtgatttatagacaaattgtgtaattagtttttattttcatctatatctaatgctttatccatgtgcttcaagatttgatgtgacagggaatcttgaaaagtttttggttttcggggtgaactaaacaaggcctagattagtttctgtactggtagtttgcaaaaaattttgggtttcgctactgtaacactttcggctttatttgacaattattatttaattatagactaactagacttaaaagatttgtctctcaaattacggataaactgtgtaattagttattttttttatctatatttaatgctttatgcatgtgccgcaaaattcgatgttaggaaaaatcttagaattttttggaaactgaatgatgtagcatcacgtccacccaaattccgggagaggcatttgcatgacactcatcacacattggcctgttcccctgcgagcccagcacgactgcagcacgagccatgggcgctcgcttttgaccacgagattctagggcgcgaaagcggaactgctgtgtttggcaagctgttgcactgggcttttgacgtccctgtactccatgcggtctcgtcaccttcaaaaatcgagcggataggggagtacagtgtaaaggaaaggccgtgtgttttgaccgtttctttttgacgtaggccttgttttagaaaattttacaaaattttttagattctccatcatatcgaatctttagacacatgcataaagtattaaatatagacaaaaataaaaactaattgcacagtttggtcgaaattgacgagacaaatcttttgagcctagttagtccataattagacaatatttgtcaaatacaaacgaaagagctacagtgtcgattttgcaaaatattttgaaactaaacaaggccgtaataaaggagaaaagaaccaccatgtagaatctcttggtgagcggagcaggcagctggcctgacatggcgaggaggaagcatgcccaggagccggacccccaacgacgcagtaggcagaggcgattgtcacgaacatgtacatgtactgtactcatctcctctctcgcatgtggcgctctgcaggcggaggaagggtgcagcctggccacggaggaggaaatcgccgcggcggtgcaccacgtcctctgcatcatcgacgccgaggtgacggcgcacaggctgctcgccgccggagctgcagggcacccgggcctcgagcggtctagctaggcaggagaaacccaccgcccagccgcccgacgaggtggtctgccggcggcgcaacgcaatgcaggcgagccggggagcatggactgcaggtgtctgctttcgtttcttgtaaggacttgtttgtatgttgtcggatttacctcaatcacgtgtgttgaagtggattgtggtgaaatttagtttaagttttactccaatccatccatcccaacacatgtgaattgatgcgaatccaactatatccaaacaaggcaaagtgtagctgccaaagtgtagctggccagcaggggagcctgctggcgtacttatgtaacgcaagttcgtttctggactttgtggtctatggtcacgttcgtgcatgccgacggcatatgattatgggtgcccttgtcgcgttcactgcgatcgggcggcggctcccttgcattgagccggctagcaagaacaagaaaagcccaggcctgctggaatcaaacatcaaacgaagcccacactaggct

SEQ ID NO: 3410 - DNA, 3224 bp, Sorghum bicolor
tcaaaatccaatattatcaatcctcttctatctttcatacaattactaacatcagtttcattgtcagcaagttgcttgatcttttgttgaagcatcattgattttcctcaccacttggatatattttttttttagaaatttgcttaaattatagactgagtgcaaatacaatagcctccattacatggaaactaaaggaaatatctggtcaattattattactgaaaatgcagtctcaactgaccagaactgaagccctcctaatagattgagtctcatttggtacttaagcctgaataatatgctaagaaaatagaacacatgtttgctgagagaatcataagtaacataatgtagagaactgtatggctaatagagtccgtaagccaagtagggtgatatttttgaccttcagccatcagcatagaacagaacacaacaacacataagaggatgatgtaaaaacttgatatgtacacatgtatgtaggaacataaagcaatgagagctaaaatctagaaaaagtaacagcctccatttgaaatttgcttgacctctttgtttgttattttgtttgttggatataattaaatattatgaacaaactaagacaacggacgatttgcagaacaatcaaaactcaagctgtagctctgcaagtgcactgatatcagcagggaagcggacaaaatcgagtaccatgtagtgaactacgacactaaagagccagctggtagtatacctcgtcgttcacacagccgccgcagcgccgctactgtagccagcgagagtctccacacaagaacacaggtccaccgacgggagcgagagctgggcggacatgacctgcagcagagacagttagggtttactgtagcacatgagcagacgcggagtacagggaggagaggaaggaaggagctctagaggacggccgcgctggcagccagcagccgtgcccaccctccctgcgtcctggccggggatgggcggtgccgcgctgcagcccgggagtgccaccgcgccaccagcacgccgcacgttgaggcgctgcgcgttgagagacgccgagcgctggccggcacgtggcgacatcgagagggagaggaagaggaagaggaagggatgcgcgggcgggggcggcggcgggggcgggggggtcgggagcggcggaagcgtcggggcgaggtgcgggtctgcgggagcacggagaaggtgcgactcttttttttttggctggaaggatccagaatgagaatctgaagctcaggtatatatttggtgggctggcttcgtcggagaagccgaatagcactgagagaaccagaggggaagccaatggaagtcaagaaggagccggagaagctgcttttattagaatccacttcggataatcatggccacacgatcaaagatccaatggctggaaaaaattcaagtgacgtggcacctgcttcactccttgaaagccaccgggtggtttaggggagaattcttcaagatatctataaaagatcaaagtcttttaattatgtgcggtttgcacatgaaggtaggatgttcaatagggaggctcatatgattgcaaagttcgtatgtacttttgattctggaagatatatatggtttgagtcccctcctgtatctatttatgtaaacacttcaaagtgataatatatatcctaccttcctctaaaaaaaacaaagagttggcaggaaaaaagggcaggaggcgggaggttttcgtgaagcacgggtcctgtgagcggtgtggtgtccctaccctagttccagcgaaccgcggaacactctggagtctggacccttttggacgtcagatcgagctcaatcaaacattctcaaatggaaccggctaaatcatcatgcaccgtatctttggttctcttgagcgctttctgggggtttctggtggaggactcggccgcctattaaaagatagacatgctcccgtgcagcggtccagctttgcattgcatatccttcacttcaccttgctctcctgactagcactactttgcttcaacagatcataactctggccagtgatctccggtgcgttgctgtagtaagcttgtgcgcagctcgagagcggatgccgccgctggcgccgacgacgacgtcgtcgtcggagccggaaccgccgttccggccgcgggagaagatcctggagaagcagaggtacttccagagcgtccgcaggccgacgtacctcaagggccgccacgacgtgatcacctccgtcgccatcccgctcgccctcgcactctccagcatgtacctcgttgtaagtaccgtagtagcaatacctcgcctctcatttgtttatatatatctggatataccaaaacgaaaacaaaaaaaaatgttgcattttggaggactcatgcgtacgtgtatgtatctgtgctgatcgaccgacgtcttggtgtttgttgtttggtgcaggggcgcgggatttacaacatgtcccacggcatagggaagaaggaatgagctctcgtagatgatggcgatcgcgctacgtcggtgctactgttgtctctgatattactgtgtgtgtaatgtaaatatagtgagtactcgaaggccatgtatattattgtgtccacgtccatgggagagtggtgccttgtgagtttgacagaggagtttgggtgcaacaggagcttgtattgatcagattaagaatctaagccgttgagcaaataattgaagcataagaccttgttaaggatcgagcgaccaatcacgcgtgtaacgcccgcctctcacgcaacttaatctcgacagatcacatgacactaacgggattctaatttactattcctatcagatcagaagtactcccacataactcgatcaaccaattgttctgtacttatctgccagagcagcaagccagacatataatccaaagtgttgattgcgacgaactcggaaactctggaactcgcgatccgctaatcatactgagactcatagtatctatctacaataaagatctgcgcagattagagaattagactatttattaatcggcacattcaatcaatagcataagaaaacaagagacgaaacatcgatgggtcggtgcctcggtgggtgtaaaatgtaatcgtgcccccttagcatcactagttcagcacctccgccggaggtcgacgacgacgacgctaacgttatccgtgctgcggcgcgcgagc

SEQ ID NO: 3411 - DNA, 6667 bp, Sorghum bicolor
cggtagttcaggccgttttcgggtccagctggccgcgccacgtaccggcagttggaaggcagactaccggtcagtggtcaggtcaggggccgggcgatgcaggcatgcagccaactgtcaactgtgaggccatcggcacgaacagtctcacacgcgcaacggcgcagttgggcctgtagctgtgtggaacgaccgatgcaaagcatcatgtggccatgatggggctgccaggtggaaatgaaatgaagcccgagatgcctgggaatcctatttccttcgtccttttctcttcttctcccagcgtgaaccgtacgtggaattttcacggagaacgacgatcgcaaaaccgcctccgaaatcctaaaaatcaccgttaaccgagaatttccgaagagtgttgttgtctgtatcgtgccgaattctgggactccggccacaccaacaccacctttgcctccattgcgttgcggggcaatggctctctactgttccgacgccgtgtcccgtgtcctcctctactctactcggccaacgccagccaaccgtcttgcgtctccggcactccaccgcagcggtgggcggcgggggcccgtggccgcacccgccccacccaagataactcgccggccgcggcgcatagagatgccacacggtacgtcatacgtgggtggtacagcagcagtggcatttgcatttcaacacgccgtgagagggggtacaacacaatactaaggccttgtttacttcctcaaaagttttgcaaaattttttagattccccgtcacatcgaatctttagacgtatgcatggagtattaaatatagatgaaaataaaaactaattgcacagtttgatcgaaattgacgagacgaatttttgagtctagttagtctataattagacaatatttgtcaaataaaaacgaaaatgctactatttctattttgtaaaaaaatttgaaagtaaacaaggcctaacggaccaccggtagagcaatctaaggcccttacaattttttttaaaaaatttgttaattatttatcaaatcaaattttacgacacatacattaaatatttaatatataaaaaactaattatacaattacctataatttataagataaatttttaaatttagttaattataattaattaatatttattaatacaaataaaaatgctacgatatctattttacttaaaaaaattgaaactaacaatgtctaacccgcagaggatcccaatccgttctcccagtccccgtcgtcgtccatcgaattccggagccggacgcggcacgccggccaacgcggccgtgactacccgcccgtacctcgccactgacacaccgggcccgctctgaacccagcggcgaggccattccacacggcaatctcgcggccccacaagggtccggagggagaagccgtcttggattccctttgccttttttttcgttctcccttcccccgcttctgccgcagtccatggcccaactgccgcgcgtgaacacccgtgacgctggcctctgggccctctggcgggccgtccagctgtgctccagcgcggagacaggcgagatgagacagacgcaaatcgccccgccttttggtgcagggatcgcggcgctttacagccaccgccgcgtggtccccacacgtcggcgagcgtgagctggcgtcgtcttccccgctgcaccggctcttctcgtgccctcgccgctgcgcgagaccgggttcaaaccggcgcgaccgggagagggcagtcccgtcattatcacgccggggcggctgcagccctagcaaaatcggcgctccccacacacggcgacggggcccacgcatgtgccaccggccctctccccctgcccatgtgccctgtactaccccccactctctctcttcacttaaaatctcacctcccaaaacttactcctgtttctctctcttctctcatctcttctctcccccaactctctgcctctctctctctctgacgcaatgccgtttcccaccgcctccaccgcgcggcggcggcggcggtacgagggcgccgccggtgggtggtgcggggtcgtggtcctggctctggtggcgctcgcggccggcgcggcggcggagacgtcgccgtcggacgttgcggcgatgcaggcggtggcgaaggcgcttggcgcggacaagacgctgggatgggacgtcgccggcgacccctgctcgccgaagcggtgggacggggtgtcctgcgactcgtcgggccgcgtcaccgcgatccaggtcgggaagcgcggcctcacggggaccctgcccccggaggtgggcgacctcaccgcgctcacccgcctcgaggttttcgagaacaagctctccggcccgctgccctcgctcccggggctctcctcgcttcagattttacttgcccacaacaacagcttcgcctccatccccgccgacttcttcaaaggcctcaccgggctcaccgccgtctccatcgactacaacccgttcgcgtcatggacgctccccgccgacctcgccgcctgcgcttccctcgccaacttctccgccaacggcgccaacgtctctggcacgctcccggacttcttgggtgcgatgccggggctccagcggctgtcgttggccttaaaccagctgtcaggacccgtaccggcctcgctggccggcgcgcagctggtgcagctctggctcaatcacgccaacctcaatgggtcgattagctttatcagcaacatgacctctctggagcaactgtggctgcattctaacgaattcactgggcccttgccggacttcgcgatgttgaataatctatgggatttgcaacttcgcgacaacaagctcacaggaccggtgcctgagagtcttttcaagttgaaggccctgaagaaggtgaccctgacgaataatttgctgcaggggccgatgcctcagattcctgttcaacttgttgcagggacagacatgaaagcagattcagagcggttctgtgtgctggaagccgggaaactatgcgatccccgtgtgagcctgctgcttgagattgctgctgggttcatgtacccggcctcacttgctgaggattggaaggggaatgatccgtgtagctttccgggtgttatttgcagccaaggtaacattactgggctgacttttaccaacaagggtctcagtggcagtatctcaccggccatcgggaagattagctcacttaaggtgctaaatcttgctaacaataacatcactggtactgtgcctgaggaggttgccgcgttgcctttgctgacagatgtcgatttgtcaaacaacaatctctatgggaaacttcctacctttgcttccaagagtgcagtggtgaaaactgctggtaaccctaacataggcaaggatgctcctgcgccagcggcaggatcaggtgatagcaacaacaatccatcagggggaggcagcagcgggagcaatggtaacattggtggctcctcttcgtcttctgttggagtcattgcaggctcagtggttggtacagttgttggactaggcctcgttgctgcattaggattctattgctacaagaggaagcagaagcctttcggaagggtgcagagtccacatgccatggttatccatcctcggcactcaggttcagatgacatggttaaaatcacagttgcagggggggacgctaatggtggtgctcgtgcaagcgagacatatagccaagcaagcagtggtccaagggacatccatgttgttgaaagtggaaatatggtcatttcgatccaagttctccgcaatgtgaccaacaacttcagtgaggagaacatccttggtcgaggagggtttggcactgtttacaagggtgagcttcatgatggcacgaaaattgctgtaaagcgcatggaggctggtgtgatgggtaacaaggggctaaatgagtttaaatcagagattgctgttttgaccaaggttcgtcaccggaaccttgtctcactgctgggctactgccttgatggcaatgaaaggattcttgtgtatgagtacatgccacaggggacactgagccaacacctgtttgagtggtcagagaacaatttgcggcctttggaatggaaaaagcgactaagcgttgcacttgatgttgcaaggggtgttgagtaccttcacagccttgcccagcagacctttatccacagagatttgaagccatcaaacatacttcttggcgatgacatgaaggccaaggtggcagactttggattggtcagacttgcaccagctgatgggaagtgtgtctccatagagacaaggcttgctggcacttttgggtacctcgcaccagagtatgcaggtgatcatcctatatttcttcttaccaagtatatagatgttttttgttcaattcaatagacaagcacattacatctaacctacagctacctgtaataatatcatttaatggttaaatattaatagctttcctcaaaaatatctattcatttcaacgaccaaacattaagcataatacacttgagatatgccatatacataataatatcatgaatacttgcatgttacatctttcctctaaaatgacttcttagttttgaatgatgtattaaatcgtagaaatcagctaacttaccactgtatttttcttccctggtgcatgtgcacacccttattatactctgacatcgcccctggttgtggcttgtgacttgcttctcgtaccttccatgagagatactttaggtgctcactaagaaatttggaattccaaatgtgatacctgaaaatatcttttaagttttggttgaccttgcgatcaactagaatgagtttatttgtggagtaaagagccatttaaaattgtactagttctttcaccccaaccccaagcattactatcggccagattacctattcaacataaacttaagatttcttttgtgtgctggacaattcccttgtaccactaagacattttcagtagcccaagaccatcaatggagctttaattgtacctttcacttgtaactagcgttttgcccttcatcttcctgttaggaaacaaggctgttagctatatcatctttcctgcattgtcctaggccttgtttagttcccaaaaattttgcaaaattgacactgtagcactttcgtttgtatttgacaaatattgtccaatcatagactaactaggctcaaaagatttgtctcgtcaattccgaccaaactgtgcaattagtttttatttttgtctatatttaatactccatgcatgcgtataaagattcgatgtgatggggaatctgaaaaattttgcaaaatttgttggtaactaaacaaggccctaattgataatttcagccatgctccttttttgaaaagcgtgttgatgaatttagatatgctacttgcaacatctgtctaacaaaaatgaacatttttatgtgcagttactggacgagtgaccacaaaagctgatgtcttcagctttggggtcatcttgatggaactgattacaggacgcaaggcacttgatgagactcagcctgaagacagcatgcatttagttacatggttccggagaatgcagctcaacaaggaaacattccgcaaagcaatcgaccctgttattgaccttgatgaggagacatatgctagtgtttgtactgtttcagagcttgctggtcactgctgtgctagggaagcacaccaaaggcccgacatgggccatgctgttaatgtgctgtctaccctttcggaagtttggaaaccaaccgacccagactccgatgacagctatggtatcgacctgaacatgaccctgccacaggctctgaagagatggcaggcattcgaggatagcagccactttgacggtgcaacctcttcatttgttgcaagtttggataatactcagaccagcatccctacgaggcctcctggattcgcggagtcattcacctctgctgatggaagatagacagttagttgctagggtgtgcaaaaccttatgcttccgttgaaatagaaggctcaagtgatccttgtgttcattcttttagtctcttacccgatctttccatgtctctttattctgctctgtactgccgtgtagctgctctttgatcatgtatgctgtgatcttgtctcagaattgtctggaagttcgaaaaatttgctaactggcgatgtcatttgctaagattaaagtagaagaatgctagggttgtatcggattggcaatttgcaaatgaaggtgatcctgtattcgtcaaaaagtatgaccctggcctgaagtttttccatgttcttctgaagcaacacctcagctgtggtcatttcactggtacttattgtatcagttattacctgtgggatggccatgaaggatcatgagtccatgacactacctgtggtagctcaagttattcgtcatgatctggtcttttatctgtccataatcattgaaaacatagataccttttcatgtgagtctaactaggtcaagtatagagctaacatgttttggcttttggttacctggacattgagatggcctggtgagcgtcaaatctccagagcataagcttcagctaatcatctatgttcatgtgaggcccaagcccttttgtgctgctgcacct

SEQ ID NO: 3412 - DNA, 9688 bp, Sorghum bicolor
gaacatgtttagttcaccctgaaaagtaaaaagtttttaagattttccgtcacatcgaatcatataacacatgcataaaacattaaatatagacgaaaataaaaactaattatacagtttagctggaaatcacgagacgaatcttttaatcatagttagtctatgattggataatatttgtcacaaacaaatgaaagtggtaaaaaattttcacttttcgaaactaaaaactaaacaaggcggaaccgttgaaggaccagtaaaaacagtggtcgaggcatcagaatgacgggagtcatgtagtgagagcgtccgcccgcgcgcaaccgcgttcacacggcgagcgacaggactagtcgtgggtagacgtgacggctcccatccatccatccatccatcaccgcttcactgacaccgcagacgccagtcgcaccaccatgccgtcacgcgccgcgccaccgtccgtcctcgccctccctccctccccgccgccaccccacgccactgacaccacttaccccaccacccgccgggcccctctcaccggtgtcctccgcgcgtgcccacgctgcgtccgacccccggcacgcgtcccttttgacttccccccacccccccctctcgcacaccgcagcagcaggcgccagcggcggaaagggaagacgcttcggggaggaaaagaaaaaaaaagtccttttaaaaaaataatttttatttaataatcaatatatacgtctaaaaattttcgtttatatttaatactcaatacatgaatacgattagtttttaatacatgaactagtttttaaaaaattaatttatatttaatactcaatacatgcgtctaaaaattgtctaattatagactaattaggttgaaaaaatttatcttgtcaattccgactaaactgtgtaattagtttttattttcgtttatatttaatactaaaaatttgatgtgacaggcgaaccgaaaaaaaaaaaaacaaagccgcacacacaaacacgaacgcgaagcgagcgagcagcgaaccgcaggggcgccggaacagcgagtcgaggcggttgctaccgggggtccagcgaacccgcccggcgtgacgtctccctcgtccctggggtccacgccgggcccgccacgtgtctggcccgcgcgtcagcgggcgcggggcgaggaggcggcgcggcgggcgcgggtaccttgacggaatccaatgcggttgtgagcgttttgacgtccgcaaggccaaggacgggtccctccccccggccccggggacacgcgcacacacgcacccgagtcgcaggattttctactgctgctactgctccctgcccttctcggcttctctccccttcccttcccttctcgctcgcttccgcttccgcttcctgctgctgcgcgcctcggctcgcggggaaagtccagcggagtctcgccgtcgcgggagtgcggagtccgggggcgccacctcggcgccggaggagggagggtcgtttgttcgcggtgctgcagcggaggaggaggggttgagttgaggcccggatcgccggattccgccgcgggctcgctcggatcgaggaggcgcggagggctgtggctacgccggccgcaattcccgcggtgtccgccttgcgttccgacacgcggggctagggggcggagctcccgtgcctgcttcgcttgcttccttgcctcgtcctgcctgccttgcctgcctgcctgctcggtgccgctactcgctccctcgctcgcttggttccgcgcgctggcgtacaggacgaaaaaggtggtggggaggtgacgcgttcgcgcggctccggtttcggctgccaccggaggagtcgcaatctcgcctagatttgccttgctgcggcgggggatgctgcttggacgcgcggcggatctcgacgaccgttgttcctgcgccgcggagtgaaaaggtacggttccctccggcaggattttgttgatggtgccgtcggggcagcccaacccgatgggcggcccgggccaccagcaggtggtgggcgcgtcgctgctccggaccagctccagcctcctcggcggcggcggagccggcgcgggtgccggtggacagccggggatggggatggggatgggcggcggcggcggggtgctcccttcgcagtcgcccttctcgtccctcgtctcgccgcgcacgcagtatggcggcggcgggaacggcttgctggcgggcgcgtccagcgtcgcgtccatgctcagcaggcagcagtcgtatgggaatggggggactggggcaatgccgggcaccggtgctggtctccccatcggtgggatgcagcatagaggcggccttgatggcgttggtgatttggttgccactggagggcccgattccatggtgttctcgtcctcgggccctggtagtttgggcaaccagcttggtgctgacggcttacagcagcagcagcagcagctggatgcaccacaagattcacaaaatcagcagcagcagcagcagcaacagcaacagcaaatgtcaatggcatataatcagcagcatatgatgccacaaactcagcagcagcaacagcagcagcagcctgcagtgaagttggagaacggaggcgtccttggcggggtcaaactggagcagcagatggggcagcctgatcagagtgtttccacacagatgctgcgcagttcgagtggcggcgtgaagctcgagccgcagttgcaagcgttgaggagcttgggtgctgtcaagatggagcaccaaagctcagacccatctgtgttcctacagcaacagcagcagcaacatatgatgcagctgtctaagcagaacccccaggctgcagctactcagttgagtctcctacaacagcagcagcggttcttacagctgcagcaacagcaacagcagcagcagattctcaagaacctgcctttgcagagaaaccaattgcagcaacagcagcagcagcagcaacagcaacaacaacagcagcagcaacatcagcaccagcagttgcttcgtcaacaaagtctgaatatgcgaactggtaaaacacctgcttatgaaccagggacctgtgcaaagagattgacacattacatgtatcaccagcaaaacaggccacaggtaaacatttctcacaaataaatatttccattattgcaaccttggtggatgcttattattaaagatatggtattaggacaataacatcgagtactggagaaactttgtcaatgaatactttgccccaagtgccaagaagaggtggtgcgtttctctctatggcaatggtcgtcaaactactggagttttccctcaggtttaccttttctctctgacattgagtataggctggtagttcaattttaatgttgagtataggctggtagttcaatttaaatgtcctgagtgttgttatgattgatagcaatcatgcagtcttttgtttgcatgtgatatgtttttgggaataccccagtttggtctttttgattattctttaacctgtatacactttcattttatgttttaggatgtttggcattgtgagatatgcaataggaagccaggccgaggttttggtgggtataattgtgattgaaatctatcctactagacattttctatttctgtgctattatgcatcactaataactatttgatggtatcctaccttttatagaaacgacggttgaggtcttgccacggttgtgccaaatcaaatatgccagtggtacacttgaggagcttctgtatgttgatatgccaagagagtcccaaaattcatctggacagattgttttggactataccaaagcgatccaggagagtgtctttgagcaactgcgagtagttcgtgaggggcatctaagaattgtattcaaccaagacctgaaggtaatatgttctctagttgagatactttcttattttgttgggttggtgttccccgcattttctttttggcattctagggtaaactgaatgatagtctggtctgaaaataccattctagccttgttaattaatgtcatcaagcattagtgctttttttctcatgtgattaaagagacattttactaaaatattgcaattactgaaatttattacactaggcaatcttcttgcccccatgcatgcatgcactcatgaattcactcgtagagctataattcagaggaaggcaaaggtagcctttttctgtctcccttcgttatggaaggcaaaagggtttaaaggaagggatactagtaaagccacctcaaaacataggatgatgtacatttgtgaatgaagaaaagacctataatgaagcataattatgtagtacgagtagtttgttacacttctgctaaatttaacactgttaaactgttgcccattgtactcattagattgcatcttgggagttctgtgcccggcgtcacgaggaacttattcctcggagatcaatcataccacaggtattattttcccaaagataatggaatgtgtatttttcatctgcattgtgattctgatcatggacttaatttcatgcaccttttgttcttctattaggtcagtcaacttggttctgtggtgcaaaagtatcagtcttccgttcaaagttcagcatcgctctcaagtcaggacctgcaaaacaattgtaactcgtaaggacactttgaacttcaaacccagttctttgttaaattcaatattttgccaagcttttgttctgagcttagttatccagtctggcaatctccccacaatcctatgctgatataactatccatacttgtggcgcatggtttcttgatctttgcagattttgcctcttattgattagcgcttctagtgcttgtatggttgtacctctatacatcaaccatagtttgcatcctcatcatagaaccggttatttgctatttgctattttttttggcaagatactggagtcgtgatttaaattttgcatgccataaccttcattttataaaatattagtgcatgtgagtatctagtactttgcattcgaacactgcacaaaatggagagtttcaaggtgctttgttaagttaactagaacatgcatagacatcatcctatgtgtgcgttggaagctgcttgtatagcatgcatgccagctgcgttagtaagtagttaatacacttataccagaaacatggttcctgtttcaaaagaatattttattgagccaaaaaaaaactgaaactaaactgggagcaggagtaggagcatcaaaatactgcaatgaatgaacaagtaaacctgttgctattggacatttgagcttcctttgacataagtacactatctgaaattatgagacgttttggcttttttctagatacatagcttttgctgtgcacttagatatacatgttattaaccttggggattcagaagataataacttcagtagtggagatgactgtatatagagagagctacatgggctatatgggcctatattagatgggcatttatagcaatgtatgtagaaaagcgtgtcttacaatttggaacagaggaagtagtatacaagctgttgaacacatacatatttttctatgctgctgtgagccacctagattttgaatgatactgttatcctgtacttgcaggacctgctaatatttataaaaaaataggtggggaacttccccaacctcctaaaaaattatactgctctttcttcttttcttttgatcaattatactgctctctatatagccgacatttatatgcttcaagtggtgcccttgtagttaatatggcctcattattaatggcccctgacttgctttgttattatcaacttatggcatttccgtcttggttgctgctgaattgattttcagtaatgggttgagagcagtaatgggcaccattagtaataactatggccttgtttagttcccaaaaaatttcaagattccccgtcacatcaaatcttatggcacatgcatggagtattaaatgtagacgaaaacaaatattaattatacaatttatctgtaatttgcaagatgaatcttttgaatctagttagcccatgattggataatatttgtcacaaacaaacgaaagtgctacagtagccaaaaccaaaagttttcctcaactgaacaaggcctatgtatcctgcatgggttttgggctgtagctcctgcatgggttcacgggagcaatgatttataattccttgccatacaagtcgctggcctggccacatgaagtttggtcgtgtgtagtatgtacagatgtttgttgctcctgtaatctagtgctccctgggtcctaaaatataaggcgggatttgacttagtgcagtcttcaagattgcactttgaccgcttatatttaatttatggcaacaaaagtttgatcatttgaaaatattttaaaatacaaattcatatgattaaagtatttgttggtcaaagataacaaagtttgaattttgaaatacgtgcatgctttatattttaggatgggggagtttaacgtcaaacctccaatatttgatgtcgtgttaccctgaattaagagaactgcttttatttcccttgttataatttctgtttgtatcggcacatgtgattgccacttccgtgtactctgcattatatagttgttctaatatacaaaaattattgaactaggtttgtcgcatgtgctcgccagttggctaaggcattggaagtgccgttggtaaatgatttaggatacacgaaaagatatgtccgctgcctccaggtactgactatttcatgggtccttacgcatttccatttaagtttaacttttgattcagttaatattatcccctactttcttgcaatttgtgtccacaactccacatgattccattatacttagcggtgtagatttagctaccaatgttgtcttcttttatgccactcctatttaagtgaagttatcaccatgattaatcttttcttttgtctaaacattgataatcagattgcagaggtggtcaattgtatgaaagatttgattgatcacagcaggcagactgggtctggtccaataggtgcagtattattcaccttttttatgcgttcttgttgcttaagtattcttgctttgaaacataatttgttcaatatggagaaaggaaaatgttatctgtaccacttcactcaattctgactccagttgtttgtaacttcaagtacagtatcaatgttaatttctcatttgtcaagtggtacaagttttattagggattttgtctgttctaccattgattttgaaccatgctacttacacatatctcctgccggctatgaccgtatcacattggaacagttctgtttctttgttttgcagcccatatgtttctgacactatcttggtaagggatgtctttgatgttccaacaaaatcaggataactaaaaaacatatggacactatctgttaatgttcatcatatctttgtttcttatatagttcttaaccatccaaatttctgtatcttagtttctctaggattttgtctagatgaaaagctaatgaaatatacaattgaacatacatcatgtagttattggctatgagttggcatgcattattatagtattattattcataagttgtttaacatttttaatgtggcaagccttggtattaatcagtttcttctgcttgtttttaacatacacaatcatgttctttttttctccagagagcttgcataaattccctaggagggggaattcagggggggttagttctgttcaagcccagcagccatctgaggagcagaaacctgttccacagaattctaaccagagtggtcaaaattctgctcctgcaactggaatgcaaatctctgcctctgtcaatggtgatgctgcgtcaaacaattcactcaattgtgcaccatctacttccgcaccatcttcttcatctgttgttggtctcctccaaggctcagtaagtggcagacaagaccatccaacaagcagtggcaatggtctgtataatggtggaaacagtgcttcagttgctaaggccaactcaacgaactccatgcaatcaaatgggccagcatcgtttccttcaccagcaccctcggcatcaaatggcaatatgatgcctgctcctcagcactcaagccaaatgaattcgccaaccatgtcatcaaacccacctcctatgcaaacacctacaagtcgacttcaggaacctgagccaaatgagtctcaaagctcggtccagaggatattgcaagacttgatgatgcagtcccatattaatggtgttggaccagtgggaagcgatatgaggagagcaaacacaattactcctggtcttaatggtgtcaactccttagttggtaaccctatgacaaataaccctggaatcaatggaatgggatttggggctatgggtggccttggtcaacaaatgagaacggcaatggggaccaacgcattggcaatgaatggaaggaccgggatgaatcacagtgcgcatgacctgacacagttgagccaccagcagcaacagcgagatttaggaaaccaattgctcgggggccttagagctgcaaacagcttcaataaccttcaatacgactggaaatcggctcagtagagtgagcaggagtcagaaaggtcgcacctgatattatacagttatccttgctgggtccatcactgacaacacaaaagttacgtcgccacaacctgccctccctcggaagtggcgggttcttactgatggtgcatgctacatgttacagcaaaaaggaaacattagcgatgatcggtacatgttacaacaactgtctgtatggctgtgttcctttgtattccgcctgtggaattcatgtctgcttaggcgatcctaccgcaaaaatgagatctgtgaaatgagagcctactttcacttgtgcccattggggcaagtgttggcggattccaaactggggggaagatcagagcgtctttcccctgttttttcgggttggatgacgatgatttctctcttccagtctgtactcttgtgtaccatggctctccgtaagttgtgaaagcatgagtacctatttccacctttgatggccaagaatctcattgtagctgtgctatactatgtataagctgttatttactagtggaaagcatcaggaaaattttctaaaagagggtgtgaatcatgatgtctcatctgtgtacctgttcttcggatgaatgatctcgtttggttgcttgatagcagcaggttgatctgtatacatgagcacagcgtgttgtcattcgctgacactcactagtattgctaaacaccgctctagggcattcttgcttcctcttttcctttgtttgattaacatgggttggaagccgggctctgagtttactatgtgtatcattcatgtgcatttgtattaggcaacggatctagtgtaaactcatctcccgtgcaaactgtgtaaactctaatctggaccataggatgttgatctaaggggcggagagattgggtaattttgcacttaaccgtctgctcttaatcacacttttacaaatccctccttccacctctcttatgcgtcttcttggatcaacatcctgcggttcagattagagtttgcacaggagatgagtttgcactagatctgttgcctttgtatta

SEQ ID NO: 3413 - DNA, 10102 bp, Sorghum bicolor
gaaaatacctttgtgtggaataatagtctactttatcatcacaaagaatgcaattctagatatagaacaagtcaatttgtttagttttattgaacctatataaatactagaacagtgtcatatttgagtataccaagtttgactaattatagataaaaaattataaatatttataatatcaaaataaaaactattggattaattaaagaaataattaacaaattgatttgaagcaataaatgtgaatactatttactaaaaacttggtcaaacgtgacacactttaactggcaggcatatcatagttgtattcttttcaggacatagattgtatgtttattatgaaaatatatctaacaatttatctaatgatactaatgatgcaccaaaaaattaatcaatagatatatgttgatcaaaataaaaaatgtctaatttcttagaaaataaaaaagacactcataacaggaccggaggagcatgtcttagaaacttatgagatactgcttggttggctccgaaatatgctaagctaaaaactagcagatatgattgtaggtatttatttgttttattaccaaaacttagcaatctcttgtatttggctccaaacttttgtttgtgaaattttccgaaagtttataagcatattgaatcttacggcacatgcatgtaatattaaaaataaataaaaaaaataactaattgtatatttacttgtaaatcgcgagacgaatattttaagtctagttagtctatgattggacaatgtttatcaaatataaataaaagtgctaccgtgtgaatatctaatttctttttcatgtaaacaagaccttagtagacaaactttgatcccaaacaagcaagtccagattctagtgaaactaacctaaccttaagctcaggcgaacttttctaatataaaaaaatgtttttatcttggaacaaactcaggcagcttatcattatcagacggcaaacacaggtatcgaaagtgtggtggtccaccttgagttgcccccctgcagactcacggctaagcatgtttacttccaattttttttgcaaaatagaaatagtagcactttcgtttgtatttgataaatattgtccaattatagactaactaggtttaaaagattcgtctcgtcaattccgaccaaactgtgcaattagttttaattttcatctatatttaatactcaatgcatacgtctaaagattcgatgtgatgtgaaatttgaaaaattttgcaaaacttttcaggaactaaacaatgccttggttctaaaaaatttgtaaaattttataaaattcttggtcgcatgcagtacaatatggagcactaaatataaacaaaaaaaataactaattatataatttgtttataatttacaagacaaactttttatgtttagttaatttataattagataatatttattaaatgctatagcgcatattttgaaaaaaatagaaaatacccaatccaaactcgcagggccccacttgtcagctgtgccatactcctcgatctgtttaggccttgtttagattgagaaaaattttagatttcgctactgtagcactttcgtttgtttgtggcaaatattatccaatcatagactaactaggatcaaaagattcgtctcgcgatttacaggtaaactacagaattagtttttattttcgtctatatttaatgcttcatacatgtgctgtaagattcgatgtgacaagaaatctcgaaaaattttgggaacgccttactcgagttctactgctctaggccaaccagatggagagagaaaagcactgtagatcgttgatgtgacctctcagtgtccttctcccaatctctctcatcagtcatcacaagaaaccgctctctagcgccctaaacagccattctctttcctctcaaaactccaaactagtccgagctcctactcctccatagccccccatagcccatagccatagcccctgctgccctgccactctatcgcctatcgcccagccatacagctactcgctgtcactgagaaccagcggcgcaagtgcgcaaagccgagcgcgagaacccacgaaaccaaccaagctctgcccccattaaggcagggcaggcagaggaggcaggctcgctgcagcacgcttcgcgctccatcgtcgctgtcctcttctccctgtaatgtcactcccccgatgcctgtccgcagctcagtggccatgacgacgacggccgcccgtgctctcgtcgccctcctcctcgtcgccgtcgccgtcgccgacgatggttggtgatctgtttcttttttggtttctatttccattctctttatttctttcttctctgggaggagccctctctggtggttgcctactggggagcaaagattcagggggttgggtttgttaggattagtattttattagcgctgcaagtacgcgcttttggaggcatggtgattcgctagtgttccattcccattttttattgccgtataagcccgtaacccgagtctaacacttaactaatccttgtgagctgtgcctcttctcatctcatcatcttctattcttctcttcttccttgcctaggagcttttgtaactagtctgcccatgtttccaaatgtgatcttttttctcttcaatcatgttcagttttgttttttacatgtgccttttgtgcgttcttgtgctgcttattggagcaaatgctcagagcattattattaaaaatcgcttgagcatcgattcttgtttctttatttgacccttcatgctggaagcttggtctcttttgtttagtctgttctatttttgtgtgttttagctgtgtttggttgctattccggagtatgatcctgtttcctatctgaatgaatcccagtaacttcatatttcaccatcgtgtcatatttgggctttccaaatctgacgttccccagttcctttgctttcctgcatgaaaacactagccagaatccaactatcttgttatccgactccctttctgcggatatttcatttgcccaatggcctgtttggatttctaccagtctgtaatctgtctgtgtctgcgtttatttttcttctgctaataatgcggctagttctgcatcttccaggggcgacgctggtggagatcaagaagtccttccgcaacgtcggcaacgtactgtacgattgggccggcgacgactactgctcctggcgcggcgtcctgtgcgacaacgtcacattcgccgtcgctgcgctgtaagaagagcgtccattgaactttgctgctttcccaacgattgcgatgtttggctactgatgcgggttggcgccaatgcaatgcagcaacctctctggcctcaaccttgagggcgagatctctccagccgtcggcagcctcaagagcctcgtctccatgtacggttgatttcttatttctccaaacgactgctgtggattggattttagttctcctgacctgtgttagctggtctcctttgcattcacattcagcgatctgaagtcaaatgggctatccgggcagatccctgatgagattggtgattgttcatcacttaggacgctgtaagttgaactttgagtaacccttgtttaattgcggttgtggtggtagtgcttttattcaaactttacctttttgtttagggacttttctttcaacaacttggatggcgacataccattttctatatcaaagctgaagcacctggagaacttgtgaggctcttccctctgaaatccatagaaatacatggcatttggggcttggaagtttttacagactttgtggttctgtttgtgatttctaggatattgaagaacaaccagctgattggtgcgatcccatcaacattgtcacagctcccaaatttgaagattttgtaagctactactactacatgattcttgtaaggtggatcgactaggatggttcagaatttctaatgtgatgcgcactccagggatttggcacaaaacaaactgactggggagataccaaggcttatctactggaatgaggttcttcaatatctgtaagtcatccttgaggttggaaaagtttgtactagtgctgaactgcttgtactgtacatacattgctactatatatttagtcgagggcttggctgctcagtaaaagttgggcagcattattacgtctttgtcgtttggatattcttgtgaaatggcattcaaacacataagttgttactgaatcatcaagtaatttcttctaagttttgtggctaaattagtaactataattactaggggcttacggggcaatcatttagaaggaagcctctctcctgatatgtgccagctgactggcctttggtacttgtaagtacactgcttgcctagtttgctgcaagttttttttttcaatctggttttaaacttcccactaattttatcagtgatgtgaagaacaatagcttgaccggggtgataccagacaccattgggaactgtacaagttttcaagtcttgtacgtatatgcattcttgccactccttaaataattgatttcactttttatatatatcattttcctaacattttatattggtagggatttgtcttacaaccgctttactggaccaatcccattcaacattggtttcctacaagtggctacactgtatgtgctgtttgcctgtttcttttcactgaaaatgatgtaattacatgcctaatatatatataagcttacctgcaaagatgcatgtaccctttattagatccttgcaagggaacaagttcaccggtccaattccttcagtaattggtcttatgcaggctctcgctgttctgtaagtccttcagtgaattctacagttactgtagataattgactaatccacaaatgagacattgctttctcattaccggtactgaaagaaatatgatcgctaattcatgtaacttttactctatcagagatctgagttacaaccaattatctggtcctataccatcaatactaggcaacttgacatacactgagaagctgtaagaactcttatccccctaaatctggatcatggattttcaagatcttagttttaaccgatacaattcagccctagaaagtttgatgtgtacatatttctaagttacgtctttatacatgttaaaacttcataggtacatccaaggcaataagttaactgggtcgataccaccagagttaggaaatatgtcaacacttcattacctgtaagttttagtatttcttctgttatggatatcaagattcaggttgaccattgatctatctttgacataactatttaaattcagagaactgaacgataatcaacttactgggtcaattccaccagagcttggaaggctaacaggcttgtttgacctgtaagtacttttcaggcacccttttattacttgtcacgtgaaccagtgttttcttgccctccagaaaactacattgcatgaacatagctgattctacttgtttcacaggaaccttgcgaataaccacctggaaggaccaattcctgacaacctaagttcatgtgtgaatctcaatagcttgtaagcacaaattatttctgaaagtttgcaggtcatgtgcaatgttgcaagtatctatataacatgctaattttatttaacagcaatgcttatggcaacaagttaaatgggaccattcctcgttcgttgcggaaacttgaaagcatgacctatttgtaagttcgaataaattttgagcctccatgctgtgctaaattgagttgaacgcatttccaattttttgtactgatgtgctgttttgctcatattgatttgtaactcacattcatccttttcctttgtttctttagaaatctgtcatcaaacttcataagtggctctattcctattgagttatcaaggatcaacaatttggacacgctgtaagccttcatcagctcacatgtatcaagagtatccatttcatgctaatgctatatataacatagatatatgttccagggatttatcctgtaacatgatgactggtccaattccatcatcaattggcagcctagagcatctattgagactgtaagttttttgagctacggtttcttgttatgtttcctgcttcatgtcctgacattaaacatgtttctctagtaacttgagcaagaatggtctagttggattcatccccgcggagtttggtaatttgaggagtgtcatggagatgtaagtacttgaccttatttatgtgaatccttttatccaatattccttgcattatattctgaatgacttgactcttgtttctagtgatttatcctataatcaccttggtggcctgattcctcaagaacttgaaatgctgcaaaacctgatgttgctgtaagttatatccaagtttttagtctgtaagtttggtttctcaagtgcagctttgttctgaatcatcatttactcttgtagaaaactggaaaataacaatataactggtgatctgtcgtctctgatgaactgcttcagcctcaatatcttgtaatttcataacctgaatattagaaggatggacaaaattttgtatttttctaacgttggccttttgcatctttggacagaaatgtgtcgtacaataatttggctggtgttgtccctgctgacaacaacttcacacggttttcacctgacaggtattgtgtccatgatttccatcatgactatctttttgcttatacttggaaatagtagtttagcgatcttgttatttcttcagctttttaggtaatcctggactctgtggatactggcttggttcgtcgtgtcgttccactggccaccacgagaaacgtaagaagagtgttgcattcatctatttattttacctgaattttatcaatacattataaaccaacatcttttcttcccctggatttcagcgcctatctcaaaggctgccataattggtgttgctgtgggtggacttgttatcctcttgatgatcttagtagctgtttgcaggccacatcgtccacctgcttttaaagatgtcactgtaagcaagccaggtaatgcatttactaactttggaatctcctcttacaataatatgattgtccacccaccttatttagtatcttatcttgtaatgttgatgtactaataatttttgtcaaataataatattatctggattcaacccagtagtttaagttatattatataagtggtctctaacagttgatgctagaaacaacattgatatcctgtaattgatatccattctgtttgcagtgagaaatgctccccccaagctggtgatccttcatatgaacatggcccttcatgtatacgatgacataatgaggatgactgagaacttgagtgagaaatacatcattggatacggggcgtcaagtacagtttataaatgtgtcctaaagaattgcaaaccggtggcaataaaaaagctgtatgcccactacccacagagccttaaggaatttgaaactgagcttgagactgttggtagcatcaagcaccggaatctagtcagccttcaagggtactcattatcacctgttgggaacctcctcttttatgattatatggaatgtggcagcttatgggatgttttacatggtaagtccagctcccaaactcgttcagacattttttttttgtggtcaaggaatcatgaaaacagtttataaagcgaccaggaactagcatcactatgctgcttttcatttcaatagtctttatttgtttcatctcaatagtcttagtttgtttacctgtcacacaacatcagttgggctctcatgacagttcatgttttgacaaaggcttgtttgtttaatggtcatggataattggctgcaactactaatgtaaacctattttctttcagaaggttcatccaagaagaaaaaacttgactgggagactcgcctacggattgctcttggtgcagctcaaggccttgcttaccttcaccatgactgcagtccacggataattcatcgggatgtaaaatcaaagaatatactccttgacaaagattatgaggcccatcttacagactttggaattgctaagagcttatgtgtctcaaaaactcacacatcaacctatgtcatgggaactattggctacattgatcctgagtacgcccgcacttcccgtctcaacgaaaagtctgatgtctacagctatggcattgttctgctggagctgctgactggcaagaagccagtggacaacgagtgcaatctccatcacttggtaactattcttcagtctcctgcgtttattcaattagaagtcgcttccttcatcttatatcgctttggattccaatagtgcccaataattgctgaacaatgaccattaggcttgtgttcctacaaggggaccagtgacatgaaacctagcatgtgagtagatctatctgcactgtagaccagctgtggactgatgagctgatccattggatttggtgactgaaagctccattataagtagctgtgtgtctgtcccctaaagccttccgttggtgtccccctgtcataaataatgtagatggaaagcaaaaaatgaactaacaagatgtcagtggtttatcatgtgccttatagctttccatgcgcaacagtttaagtgacctcagattcaaacaggtggaacatgactcaaaattgacagtaggtatgcgcaacagtgtgataaattaggagtcagtttgtagttccagaattgatccatttataaaatcataacatgtgctggtggcgctgcttgtttggaagaaacttttttttccatatattgttgaaacacaggaaaaaaaagacttcagtacttaactctgatgaggttatcaatgtatcctccaattgcagatcctatcgaagacggcaagcaacgaggtcatggataccgtggaccctgacatcggggacacctgcaaggacctcggcgaggtgaagaagctgttccagctggcgctcctttgcaccaagcggcaaccctcggaccgaccgacgatgcacgaggtggtgcgcgtcctggactgcctggtgaacccggacccgccgccaaagccgtcggcgcaccagctgccgcagccgtcgccagccgtgccaagctacatcaacgagtacgtcagcctgcggggcaccggcgctctctcctgcgccaactcgaccagcacctcggacgccgagctgttcctcaagttcggcgaggccatctcgcagaacatggagtagggaagagagagaggtctggggagttgaaggatgcagggagtagtgggagtagctgactgacattttgcgggatgcaggaggagattaacatggggaactcagtagggtgttggttaactgtaaaaaaagtcatgtgcctctagagcagcagtagagcttcttcctcatctttcttttttttatcaccccccatttttccttggtggtctctaacttgttaggaggctgtattggtcatctctcacagttgtgtgcctgatgatcttttgtgtgacttttgccgtgttggaatcatgggaggtgactttcttgatctgcatatagccgccactagctcctgcttttttttactgacctctgtaaccggtgaagtccctcttttttttttctctcctgggatcatagattggcgagcgaagagcagagtttaccacaggatttgctgcgatcttttcctccgagccgtacggctgccggctgccgctgccattccgtggtggcccctggggcatctggagagcgggcatgtgctcgtgttgtgcggatgtcgccgagccccatggacggacgcgtcggggccgtagcgtgtcgtcagggaggcgtcgtaaatgatgcgatgcgaggtgaggttgcagcgcaggatgctctgctggggccgagcgtggcggtgactgattgatgcgtgggccaaggtccaaggacgaggagggaggacggggcggtgcagcggcagcgcaacgcgatcctcgtgaacccgaggacggacgacgggcgagtcgaggagctagagctcgccctgccgtggtaggccagcgtcg

SEQ ID NO: 3414 - DNA, 5641 bp, Sorghum bicolor
ttttgaattgcctgaactgtgtaatctgtttcaaaacataggtgaaggtgtgtgacatatgtggagatattggtgaggaggagaagcttgctgtctgtagcagatgcaatgacggtgcagagcacacgtaaggcctcttcgctgcatcactttcttttttctgtactaatgttcagttgcatatgatggattgcatacgccgaagttgcccaattactgttttatggtttttaattgttgactgcaagctaatggcacaattagcatgccagaacactaataagtctacaaatttattagctttgtctatacacctcctgtcagggaactcttttcagcacttgtttccattatgtcttctcagatgttgcatgcgggaacgagtgtgttttaatatctatttgcttcaggtattgcatgcgggtaatgatggaagaagttccagatggtgactggttgtgcgaagactgccaaactgcggtagaatctgaaaaggagaatagactaaaaaaatctcaggtgaaggttgacacttcaaaagagctgtcctttgaaggggagattaacaaacctgccattgctgcaaagagcagaagttcttctgactgtgaactgaaggctgagaatatagaaaacaaagagtcagataccacaaatgagggaaatgatatggtcaaaaccaggacggaagaagatgctgcgacgacatcctcaattagagatactacccctgaaactggtggcttgtacatgggggctgactccagaaagagaatgcaaccatcacgcgagatattcgtgtctgatgctgacaaaggaaagcaacctagccatcaagtggcaacttcattggcggttaatgctctgaagaatcaggcaccacagtctcgtggtaaattgttaatctatttttttcagatttgaactctctacacaaaatccttaatgttcaatttatggtacttttagggcttgccctggtggcatgcaatcagatgaaactgtactaagcaaggtctaatgcaggtcaactttccaaatccacttctttcaacaactcaaaggttccgaaagtgaaacagctattgaatgaagttcctcagaagccaaaaattttgaaggattcttggtcttctgttatcaataaaaaggaagggccaatcagcatgactactaagtcagcgaccttcaaaaaacctaagccttgtgagccagcaaacagggcaaagtcttccatcttgtcacctgccgaggagccaagggcgatgaatcagttggtgagccaaaatgtaacaaatggtcagtgttcttcgatattggggcctccctctgccacagcatcaatggttgctcctgttctaaaaactgataccagagctcagctcttctctacaaaaaataacacggctgactcaaataatataggcgctgttcatgtacagggtgctaaaaattctcttggtaaatttcctttccccccttccccttgcatgtcattttccttatgacacagttcatatattttcctgattgagtaactctaatttgtttgttcaggaaacagtgagctcaagaagcctcctttggcaaaagtgccgggaaatatgatgctatctaatgctgaaagatcctcaggtgggattcttggttccggtgctcatagaaaagtgatacaaaattcagatccttcacagagggatactaaaataaaggaccaaactggcttcagacagggtgctgctagcagcaatcggacaatccgttgccaaagatgtaatgaagtgggccattctgcccagttttgcggagttgaaaaacttcgcctgtcttcagtaaaacctttgagtgagcaaaacttgaaagatgcatctgccaaaagaaacaagacatctgaaactagtacattggcatctagtgaaaaagctccttcaagagaagagaatcaattagagcatatcataaaatgtggtacctatcagaatccgataaatgggccaaaagatgctttacctgccccattcagccatgtgaagaagccctcattatcacctcgagctaatgtgcaggatatgggatgtattttgtccatcccggggagcgtagattatagcaatctgaagttcaaagataatcatccatctctatctgccacagcaggaatctctgctaataatggttgcattatgccaaatgatcatagggatgaacctgctcaaggtttttcagctggtgatgaatcaatggcttcaactgtccctgagctggactggatatggcagtatgaatattctttcctttccatcgcatatgtgaaattattaatttactttacattttaaatgacttagtaaattactagacattccaatgccagtctaccatcaactatgaagctactttattgataatgctttcgcagttttgtcatgtttgtgtgctttgtggttcatcccatttttgtagacctgattatcactcaacctgtattatttgatagcaattgtgatatttcctcgatgtgtttattatatgtattttaacttttgtatttcaacagaggtggttttgagctgcagaggactggaagatcaccggagctgtgtgatggtttccaagcccacttatcatgttctgcttcacagttagtgctggatgtagttaagaaattcccttctaaagtccagcttgaggaagttcctcggcagaattcatggccgacacaatttcaggaaaatggtccaacttatgacaacataggtctttttttctttgctagggatgttcagaggtgtgttgtttgcagtttttcccctgattcttatttgcttcattcatatgttgttttcaatttgaaattctaacacttctatcttttacagctatgaaaatcactacagtaaattagttgaaaatatgctgaagaatgatttagttctcagaggaagtgttggtactgttgagttgctcatattcccttccaatatcctgtcaaagaacttccaaagtaagaacccttcagctagttgaagtgtcatattatctcatgctaggttttagtttgattcatcgtattcttattatgtctcagggtggaatatgttctactttctatggggtctattcagagttagcaaaaaagattcctctaacctcggccccaatttggtaaagtcaactaattttgcaccgagcttggaagccagtcatgaggtgtgtttggatggggagatatctttgaatcaacctctatgcagaagagctctagatgatcacctagattcagatacaaaagcaagttcaacaattagcaatggtgctatgggtccctctgccatgtctatgcaaagaaaacatcaggtgaatatttattcgtcattctgaatattttctctacattagttgtgtttaagttaccattttttccctcacatagagtatgcatgcgagctgtgtatcagtgcattaagagaaaaacgtagaataacgcatgccacactaccttacacctttagtaagttatacatacgtggcactaacattaagttgaccacagataaagttacacctttagtaagttatacatacgtggcactaactatgagctttctagaaaattccctagtcactgattcagcctatgggcgacctgccaatatgtgaaatttccctacacaacttgagaatttcggatgccagcttgacaactggcattctgtcaccttgttttacagcatcatttagatgccgcgtatcagttaacattttgttatggatgtgcagaaacctgattatccagaacaccaagataaaatgagggacacttttggtggtaatgttagtgaaagagattttgatgtgaacatggtgcccgttacttgttctgtctccttaacccaccttgaggaaggtaactaacattgttcccaatcatcatgttagcaagtaggagttaatttatttatcacccaagttttctctaattttttgacttgtttggttaaagaatctggcaaggtgagcacaaccatcaaccttaatgacgcagacaaccttatggatatagaccatgtaaatacctgtgaggttagcacaggtgcactggatcgttcacatgcatcagttggtgcaaataaaagaagttttgagatggccaaagtagctgatgaagtcgatgaagaacccgagcataagaaaattaaattggaaaatgtagtgcctatgaactctggttcatgcgagaatgcctacaatggaaggttatcatctaaggtgcatcccctttcagcttcctctgtgaacgatggcactagcaataaactgatggctggaagctcaaacagtgatggaaagtgtgtgtttccacttgatctaaatgcagtggatgatgagaacatcgtaaatattccatcttcagatgatgaagagttgccagaacctgtttcgttacaggttggaaagcagaccaagggagatctatccctctcgcttgcatttccatctgggaaggaactaggtagcaaaccacaatttgagccacagagccacttgcctgagaggagcaataagaataatacatcatccatttggggccaacagtgatggcgagttgcccttgcatttctgatgtcttttgctcggagacaaatcgttgaggctcccgtccaccacaaaatgaaccacccagaggatcattgtcctgaaacagatgcacttgcaattttgccttgtctgcagtgttagcctcaaatggttggcgtcacatctatctggattcaaagctgcaatgagctccaatgctcagaccatggggacttggttcagaatgagcgagctggtcctccagaatttagtgcctgatattagtggttaaaaacatataaaaaaagaaatctgcattgtaaatggcatctgcatttttgccctttgcttaggtccgacaattagatggtacaaagctcgagagaattgctggtgtttgatcgctattgatgactgttggtcgtttttgttcctttgtttctctaagccatgaattttctgtaaaatttgcactaacccttcggcgagtacactggattagccaaataccctaactccgcttgtccatggctgtttatcaacaaattaaggaacttgtaatgatatatctctgaaggagtctgcttagcaatgtagtggttggctgatctgtgcatctatccagattctgtcgattgatttcgggtttgtctgctgcagcggagtgttcacaaaatttttattcccccatcacatcgaatcaacgcatgcatgaagcattaaatatagatgaaaacaaaatttaattgcatagcttgcctgtaatttatgagacaaattttttaagcctagttagtccatgattagataaaatttgtcaaatataaacgatacggtagccaaaacaaaaaattttcttaaagtgaacaacgcctaatcaattcctccatccgttagatcgaaccgatggcttgtattaaaaaaaagatctcaacgtgacggtgtgcctcgtgaagctttgcttcttatgtctatgtatttgtaattagtatgatactcctgctccaaattgtaagacgttcttttttaaatatgtacaccttttattatacacttagatatc

SEQ ID NO: 3415 - DNA, 3343 bp, Sorghum bicolor
attggtaccctcttagtattcactggacaaagaccattggtgatctttatcaaagccccccccccccccccacacacacacacacacaaacaatataataattgatgggagcaatatggaaattaatgaaatcagtaattagtaaaatcaatgcaaaccatttgattcagggatgagaaagccccaagctaatactgctaccattggttggacttggaacagctacgagattccgccactaccccagctaggtgtcaagcaaatatcatggcattgcccaggagcagaaatttgtcgccaagctgtacttgtctccatctctaccactagagcattgtgccaagcaggcatgatggcatttgaccataacagaagaatgcatgaacctgtatttggctccaccacttatggaaatctataaaaatattttaatgcctcaatcaagaggaacctatgagctttttatgattgaattgacttctcagcactagacaccacctacatgatggagtggtggcggcactgcattctgttcctttattcttttcagtgacttgttcagtattccaaagaacaaaataaacagatatagtgataaatcagatgctattatagtttgaggaaagattgtaacagcaatagaactcaaaccatctcttttccttaacagaaaaagagacagctgaatgaagtaagccagcaaagatgaacacctgactgtcgagaggtttccatgcagacagtgcagcattttatatcaatataataatatacaaaaatattataaaataggaggataagaatatcaataaatcaagtaaacatcaaatcaagaatggcaaatgcaattgatagtttcaccaaaacaatgcatataattccaaagaaccatattccatttttcccatttagctccagaaagccatacttcctaactcgccacgaacaattccatctagatgtttctttttcttttcatcataaggtatttaagtatgttcactaggaatcaggttctagtatatatatttccagaatagctcatatgttctttttttgcttcaaaaagtgcagagccaatgcatgaatttgataaggtgactaagcatcatattctgcagagcgcaaagccttccacgttgacagtgtggccttttttgtctccaagctaatgaaaataaatgtcccccttatttatcatttacctccacaaaaccatacatccaaacttgcacaaaaagttacatcgagatgtcattttttaagggaaaaagataaaaataaattgcttgaagtgcgctctccaaaagtcagatggtaataatgattttacataatatctaacatgctatttctgaaaggtacagagataacgagacaacaatttgataacatgattatgtatcaaatcctgcggaatgaattgtcatgtagaccctacatgtaggtaggtgagcatgttttccaacaataccagatagtgtagcaccgtagtgtttactgattcactttcctgggggtttgttttgttctagtacaatggtattcttgaggactccatggtgatctggaaggttttgtttcagtcatgaaagaatatctacagtacgttcataaatattaaaagaacaattttgcacattctaaatgctttatccctagaacttgaaagaaaatacatgaaccattgcttgcatagattctacctgtaacagttagagaatttgaagaacacctttgttggctttcttggaaaaaggggtacatctttcctgtagcctttttagctgcatccacagcacaaccaactaaaaaaacacacatgcctcacatcctcttttgatccaacaattggcagaaggatccaaaccactataaatagaggcttgtcctcccaccaatgcccaataagcagctcacggcacatcattgagtgcattggcttgctgcattcaaagagcatcttctgtgtgcaaaacaaaataattgaccctccaaccatgtctagatctgtggagtctctcatagttggtcgggtgattggagaagttctcgactcctttagcccatgtgtgaagatggtagtgacctacaactcaaacaagcttgtcttcaatggccatgagatctacccatcagcagttgtatccaaaccaagagtagaggttcaagggggtgacttgcggtctttcttcacattggttagtagtcagatacttgatccttgactccaagtattctatacatactataccttccctaatcgccatagttcctaaaatttcaggttatgacagacccagatgttccagggccaagtgatccatatctaagggagcaccttcactggtaatattcagcatttcttaccttggggttgtcagtatgttcttacagaggaatagcaccacatcttgcatatatacaaacagcgtatttttctgagcgcttgaaattgcaataatgctgtggctaagtgttatcatttgcctttgcaggatcgtgactgatatacctgggacaacagatgcctcattcggtaggtttttcctctgctttgtgcttagtccattctttgttacaattgtttctcgaattaataagcaataagcatgcatttttcagggcgagaagttataagctatgagagcccaagacctagcattggtatccacaggttcatttttgttctcttcaagcagaagcgcaggcaaactgtagctatgccatcctccagggaccatttcatcacacgacagtttgctgaggaaaatgatcttggactccctgtagctgctgtctacttcaacgctcagagagaaactgctgctaggaggcgctgaaaattccagttctaactgtccaagttatgagcatgggcctctcagtcttctttgtactaagccaataatcttattcgacattagatgctcctgggtcctacattataataaataaaccagaagcattttgcagattgtattagtttgtttgtaagtgacatgattgagaactattaatggtccatgatattagtcaaaattacatgtataagacaatctatcactgaaaatctgaaaccagggttggtggacatccctcacagacaaaaagttcgtttattgtaggcagtataatgcctcttgccagcttcagactacgttcacctttttgtggcatgcaatctcctggaaacagaaaaattattgatcttgtcgtgtcaccttgtagaactatgaagacactcctaactgcattgaactgctaagttgttggagacatgatactgaagggagatatccaatgtatcttggggattgcccacaagtagtgttgaaggtat

SEQ ID NO: 3416 - DNA, 3816 bp, Sorghum bicolor
gatcgcgtgccttttgggaacatttttgttatctccaaggaagatatgcttctcctttctcatgtttaatattcaccgagtactacggggcacatcactgcttcagtttcagcatctgacgagtaaatcagatattgtccccagtcactcaaccatagccacagtaaagactaaagtgtcataggacaacagatagtaaaagcttctaaggtatatatgcacatttacccgccccccatgtgctggattctactttgttagcaagagggacaaactagaatccttatcgagttatcatagaatggagaaaagttggtcatcttccaatttatgcccagaaaaccttgcatataccaaatctgaatctggcacacagctaagacatctcctacaaatgtagctcactaggtgaacctaatgcatcatgaataagtaacgacagataccagacctcaaaattactactatgtcggcatgtttgcctcctggattatataacaatacacaaaaacagaaatcaagcaaaccagggaacaaatgttataacaattccataatactatgccacaatacatgttaaaaaacacactggaaaaaaaaatcatatgcgacagaagaaacccaacaaagaacaaggatcaaattcagtacgacaccaactaccttagacatttggcgaaactttgtgtagaacaaaacaaagggtttcaaaaattcgatgggagcttgcttcgaaggtgccctctaaaattgtctttccctgcttcaacaagagtacaagatactaaccctgtcagaagcaagtccccttgtaaatgatgttaaggcaccatggctcaccgccttgctacccagtacccagccacccaagcattcctggactaaacaaaagtacttcagctgcaaggttttttttttcctgttcttatttttacaacatctgcaatttctggattcaaacgaagaaaaaacactcatgcaacaaagagagcacaaaaaaggcagtagctagtatcaaactacctcagatctgcagaacttccacagaacaaaagaaaaggcttcagtaattcctttggtaataacagaagagtcatgtcccttccatgatgagaactacctcgtcagcatcagttgaagaaattccagttatacattatacatggtattaatgcaccaaacctcacagtcagcctttgcaaaggggggcctgttttgttattcctactgtaatttatctgtgatccctaggtttacatggtatagatttctgtacagaatgtggattctcaacaagtggaaatacaactcaatgctagtgtatggtctttatgtggaagaacaaacactaaggtatgcagcacaaatttcagattagacgaaaagagaaacaaaacaacactaattagatgtctaacctaatatgctcttgcaaggaaaacaaaacatactaaatgcacctcaatgttcacactactacagctgactgcaaagctgccagtagtttatatgctttactccagcaaaccccagcaatgttaataactaagttgctaaagcatataactgaaaagactatgcaacattgcaacctgactacaccacagagatcatgctttggcaaagaagcacacctcagctatctgggtggacgtatgacatgacaatggtatctcaaatgctagaagttgaataagacagccttcctcaactccagtataaatagttcatgctcagactgcagcttcctcagtcccacagggaggaagttcagagttctaataagagcagcagccaatatcattcacaagttatttttctgcaacatgtcagcaaccaatcctttggtcacggctcatgtcatacaggatgtgttggatccctttacaccaaccattccactaagaatagcatacaacaataagctacttctggcaagtgctgagctaaagccatctgcggttgtaagtaaaccacgagtcgatgtcggtggcaatgacatgagggctttctacaccctggtgagtcaagcaatttacagataatgccaccgattgggagaatgtatgtcaatccttttgttatgtaacacataaaagtattgtgcactttgtagaggatttatcagtattagtttgaaaaaattcaataagaacaaaatgccttaaatctagcagtatatcaacatgtctatatgctaacttgtttgtctttgacttgagaaggtactgattgacccggatgctccaagtccaagccatccatcactaagggagtacttgcactggtaaataaagtgcaatacatttcactcttcctagatttggttctttttagtttgccttattatgatattggttcactattctgtaggatggtgacagatattcctgaaacaactagtgtcaactttggtatgaatgcatatagttatctgtcattccattgtatttctgcttaatacagtatttgtggagcttaagttgtagtctcttcttgcttctccgactaccactgaactgatgcagataaggatatacatgaaatcagcaaccatagactgattcctagaccagcttcttaggtgaatgcaatatgccagcttagcgcttacatgcgtagtaatatcatgaaagacactaacttagtagcataactaatgaagcaatcaggtagaactgatctaacccagtaccagagtctggaaatatcaatattaaacacaaacaagtatttaatagcataaataaactggtatagtatggttcacaaggcccctgtttgccctttaattggttggtaaccttgaggacaattacagcagaactaggtccatttacagttgtcatattaaagttatattctagtacattttttagtaaataaagtttttcatactcaattttacctgagagaaacagatattggaaacaaagcagccattaattgtctcaaacaagaggagctatctctaaaaggcctctatccgtctaaattgaaagagttaaaaagaacaaatgacaatgtttccacacacttagtgctccttaaactcttcagtagataatgtcaggatgcccttgcaggccaagagctagtattttatgagcgaccggacccaagatctggcatccacaggctggtatttgtgctgttccgtcaacttggcagggggacagtttttgcaccagaaatgcgccacaacttcaactgcagaagctttgcacggcaatatcacctcagtgttgccactgctacatatttcaactgtcaaagggaaggtggatcgggcggaagaaggtttcgggaagagtagagaccatagactactgcatggtcacactatgaaatatcatcaataatgtgcactatattgaatgtcaatgcactacctctatatgctgaatgttatgtatctcaaactatgattgtaatgacttgaagggttgagagcttagtctcttaacagaatatagaccaatattactagtatattccatgattaatcagatattacaaaatattctccaggaagaaaccggtacagtttcaggatcttactagagtacctgcttgtttcaacaggtattaaacaaactcagcacaatctgaataatccaaagtatatctcatgggaaactaacagagcatcacagattgtacattattccttactgtatcagaatagcacagcacattattccttattcccattgaaagtattatgccataccagttgcttagaaagtagtcaacaagacactacaaagcattacaaattccagagttaacttacagtagagtcaccatggagag

SEQ ID NO: 3417 - DNA, 6502 bp, Sorghum bicolor
atgggtgtgtggtaaatccctaccccaagagccattgatcctccaaacccatccttaaaagtcccaaaacaaaaacacctaaatccaatttcaacataacttaggtgatatggatctacgtgatattagtcacttaatctagcaagctctatcaaaaagaattcctcctcacttggaccaggaccacaaactctactctatttgacaaagttaaaaaaaattcatcctcacttgttttacaaagttaggtccatgaagtttagtagagcctgtataaactaattaaccatgaacattaccaaaaacccttctttgtttcttcaaaggatcggaatatccccccctttgcccccaaaacatcttcattgcacgacatggcctatcatgatgaagatcccataagggattactaaatcactacaccatataaggatgtggatttgtatatacattcatttgtttcttttgatgtctaagtagcacaaccctacactgcatgattaattgcaatctcttatttttgatatagcaatttttcttagtcgttgtattctaaataatgattgatttaatcaattccttgctgcatcttgtgtctcatccgtttgaaatgctttgtgcctagtccatttggatgagataaatccttctaacttctcctcccctacaatccttataaaaacacactaacatgaggtaaacccttgtcccataaatcaagaatttgtcaactatctaaaccccaaatctctaatcctaacctctaaatcttgtttaaatttgtctattctagtccatttgtggtgcttcgaatttagtccatttgtcttatgtgtctcctgtgtatacataatagggaggtgtctataatagtcaacaagttttgccttttgttgttgaatctattttcaatcttttttgtttggttcgcttgttgttgtaaaaaattgtgtcacaccttttttttacttttccccttaccacatactctatcatggagcaccaataacctttggatgctacattaacaaactaaaatcatctgcacctactccatagtggcatccaaacttaccggtcaccataagtttttggcaaccacatgttaaaccaccattgggtatcagccttgccctaaatagtaagaaaagttgaaaggaagaagtgatgggttgtagtcggtacaagaagtggttcgacgaaagatctctaactaaatctttaaacttctttcttttctttttctttgagatatggaagttttaaagattttaaaaatgaagttaaagggtcatattgtgaataggcggcttgtgttttacttacatgttaatcactttttgtaaccgttggacatagatccaacggtctaaatcatgccccattaacctaaaccctaatcaattccctcctcctactctctctttgtgctgccgccgccgcttgcctgaccctatatatatttctcaccctcgatatgtgttgcctcacttcgtctcgccggcctctccctccatcccctttagcatgatagcacccttgttcgcttttataccttcgatgattgaatcgagctccttcgctgccatggtcaccgcctggctccgatggtcctgccgcctccaccagccgtcgacatgctcctaccacttgggcgaggtaatatcactacctccttgtcagtctgcctaccgcttttgccttgaggtgaatttctccatcctctggcaaaggtaaatacctaatcccgaaccctaatcctaaatcctagtttctactctttgagatatctaatctcattttttttactctagtgtactataaggagcaaagctgaaaattaaataaaaaaattggcttaaaacctgtttggaaattgggaacgcagacattttgttgttcctatgttttctttaaaaaaacaagaatgattcgtgtaaaatttctttttaaaattcctgtctttcgaacacacactgaattcttttgcccggatcccttccgatcctatgcttgcccaaacccacaaaaccctcgccggccgccgcgacactagtaacggtctacacctgtacaccagaaaggccctcctgcagaattcaattccagcaaattccagcttggatttgagattcgatttgaagtccgaaagccccttccaatttctctcttgaatttgctaatcctgtatttaagtctctgctgtgctgcgttaaatccctataaactccacagtgcggccccgccccagccacgccggaagaggccgccgcgtgaggtcaccgtccccgttgctgccgcctctaacccgaagcccaggccgccgccggtgcaaagcaaggagaatcaggcggaggggggagcagcagcggagggggcagcagctgaggagggggagaagtaccggccggcaccggaaatcctgccgctgccgccggccatggcgaagctggggccggggcaggggctcgggtgcgaggcggcggaggggtcgctcgtgcccagccggaagcgggagtacaagccctgcggcaagcacactgaggggaagcgcccgctctatgccatcgggttcaacttcatggacgcgcgctactacgacgtcttcgccaccgtcggcggcaaccgcgtaagccatcgattgctctctctctctctcttgtcgtccttttttgtttcttcatgaggtttggggagttcttgttgatactggcaaggtaaagcttttttttttgattttggtggtcgattttaggaagcggagcacttttgtttcaaattcgatctaaagccgtatttttccaaaacatggagtttgctagttcatttgatgaaaagctgcaaccttagacagagaaattgttatcattggggaaagtatagtgaggtgtggggaatcagatagtaccgatattactttgattaatgattataggataatcttttaatgttccttgtaatgaagccatgctgctttcacctgcttgtgttgagaagtcgcttatcttgcttcttgatcttgcagttgacaacttaccgctgccttgagaatggtagttttgctcttctacaagcttacattgatgaggatgtaagaaagacaatgcccactgctttttcttgctgattttaagtttgatagtgtgctttctctaatgctcgtgatgcctatttacctcagaaggatgagtcattctacactctaagctgggctcgtgaccatgttgatggctcaccactgctggtggcagcaggaagcaatgggatcattcgggtcatcaattgtgctacggagaagttagctaaggtaaggtacccttaaatttgtatgtgttcctatgacaaacttgattgaagttttatttgcataaatcaatagctcagttgtttagttggcagataccacttcatctatggtatttgatccagaaggtcattgaatttgctttagttaaggaatggtgcttgctatgcattaataccattagcaaacagtaccttttgcctacagaatattctggatttttgaatacgtcaatatgtccgttatagacttatagtcaagacacatcaacctagtgtatctacttttacgttatctgtattgtcaagagattgggcatgccaataaatactatcccctgtgccatttattagaacgtgcactgtgtgtcttatttggtaattctgtttacggattctgcagagctttgttggccatggtgactcaataaatgagataagaactcaaccgttgaagccttcgctcatcatttctgcaagcaaggtgacacgataacctgttcttaggttcaacataccttttttttaaccattctgagttttgacaccatttcatatgacattatcgaataggatgaatctgttaggctatggaatgtccatacagggatctgtatcttgatatttgctggagctggaggtcatcgcaatgaagtgttgagtgttgtaagtagtgcctgactattattatgacattgttttagaacattacttgcttaaagtgccttgattataccattcgttgagcttctgatgttaccatttgttattgagcgttacatcagggataaaactccctactgttttgtacttccattacattattaggcataaaggtactgatgaatacattattttgtctgaaggactttcaccctagtgatatcgagcgttttgcaagctgtggcatggacaacactgtgaaaatctggtcaatgaaaggttagaaagctacttcaaagttgcttcatgtttgcatttgcatgtcattgagtttgccgttgttgtcatagaattttggctatatgttgacaaatcatattcatggactgaccttccatcgaagtttccaacaaaatatgtccagtttccggtatgttaaacattcataattatcttagatccattctcttgcaaactcctgttggtgtttggtcctcatgccatcagattgacctatttcttttgtttcaggtcttgattgctgcagtacactctaactatgttgactgtacaagatggcttggtgacttcatcctatcaaaggtgaaatttctgattcgttaaaatggatacaaatttctgtagcacagttgttactcttttgttggtttgacatgccactgtctggttcatctattgctactgtgcaagtgttcagtttttcaatcttttttatcagtgccaattagggatctgatctgtgaaaaattctatttgcagagtgttgacaatgaaattgtgctctgggaaccaaagacaaaagaacagagtcctggggaggtaattcagtttaactttcccagaattgtatacctattataatgtcatatacttgcctacagttgtaaactatttccagtgatgtcttagatttcaaggcatttcccatattaaaaagactccactgaagtaatatgattttctgttacctcatagggaagcatcgatattcttcaaaagtaccctgtcccagaatgtgacatctggttcatcaaattttcatgtgattttcacttcaatcagttggctataggtaatatctcatcaggattgtttctgacacagaagttttattttttattaatatttttgctttgtaaaatttcacacaccacaagttgttttgatgtttttgaatggcaatctgttaactcatatatatgacttttttccccatagaaatatttgctaatcagatatctgcaaataaattcagatgtgtttgattatatttagagatacagaaaaagttgactgctctaataaccatccactgcaaacaggcaatcgtgaaggaaaaatatacgtgtgggaagtacagtcgagccctcctgtcctaattgctcggtattttttactgcaagatctcagttattcttgtcttccacttgtattgttgctgagttactaactcttatgcttctggatgcgaatgcttcatcattttcaggctgtataatcagcaatgcaaatcgccaataaggcaaactgcagtgtccttcgatggaaggtacctcactctaatgctacatttggtgtactgcctattctagcatttgctttcttttgttctgcctgagaaattctcagatgcatgtcatgcgcttaggtattttatttttctgtttttgtggtggattgataaaatgtgacgatgtcttccttatctagcacaatccttggagctggcgaagatggcaccatctggcgatgggatgaagtggatcatccgagcaccaaaaactgaagcaagtgttgctgctctgccaccagtggtagttctggactgatggttatgctcagttggggttgtgatgatttaatctctttgtggaaggtgcaacctggtggttttttagtcaaaacggttggtgttaactgaatgttgaatgttatgcttcgaatgttgtaagttgggatacttgtgctgttactttgctccgtggacaagtaaacttaaatcgttgttgcaactctgggaaccgttgtcatctgtttgttctgcatttctaaaaaaagagcaaatatttagatctcagattttttccagtacaagaaaactaagttttaggcaaatgttttttttaattactcttttttttaactggatttgtgattcaacgatgcattcattgttcatagctttacttttgaatcttgatagctgggcctaaggttaccatgccaactagtatcagaagcaatgcgtgcaaaccacctaaagttacccttccgttaggttattgaatgtttccttactgtcacatggaaatcttcgaattgcgaccctgaacttaaactcgtcgtggaagagacttgaccgaaactaggacttcagcatttagcaagctgcacaactcctactccttcagtccgttagtcatgtttagatcctatatagctaatagttagttgagatcccatatagctaagttagctgttaaaaattagttaaggtcttgtttgatccttatgt

SEQ ID NO: 3418 - DNA, 11172 bp, Sorghum bicolor
ttagctgtaaatcacgagacgaatcttttgatcctagttagtctatgattggataatatttgtcacaaacaaacgaaagtgctacagtaccgaaaagttttcacttttcggaactaaacaaggccttctcggttagcctggcgcgaaaaatatctcacatctatgtgtatatagcaggaaaaatattacgtttaagacgctaaaaacgacttataatctgaaaaggattgaatataaataatcattgaaaaaatacttaagcacacttcaagtctcgatctattgctttctcaaaagcaaaggtaatctcctttcaaaaaaaaaagtctcaatctatgtgcagaaaaatatttaatttaggataaacataatacaacatgtagaaatggagggagtatcaacccaatcaatcttaatattagttgttcctaagtatatgatgtgtgtgtgtctaagtcttgccttgaaaaattattacaaagatcatcactaatgtaaatgtaaattataataggtaaggacttaaacatcatttttttgacacaatgcacacacacggcctcccctcacgcgcacacgcatctctcttactctcctcacgcgtgactttttccacttcgtgccccgacgttttcttcaatctttcttcccacgcggctcctccctctctcccttctagtggcggcggcgaggtccgacggtggaggcgctggcgctggcggacgaggtaggattcctattcttcttcctcatcttcgtcctcctgatgctccttcttatggatccacgatttagggtttctggcgagttcttcctctcttgttcctccagtaggcttagaagggaagatttagagcgaggaaggccgatcaggcaatgaggatgcctggatgccgatttaggggttgtggcggtagtggaggttgtcgggctagatcagggcgggggaagggggatgggggctccatggccatggtggagcttcgcatgagagggtgaggaaagaggaggaaggtgttcgtggagctctgatgaactctagtatgttcacgggggctggtggcagcgacgagggcaagggtcgccggagaggaggagggcgggggagatggagccgctagcgccgaagaaggcggttatgcggtaagcccactgattttactactttttcattataatatgtctgctatatttttttacatctttagttttgtcttaagcatacaattgcttacgataataagtaggtagactatgaccttgtttagttttcaaaagaaaattgcaaaaaaattcagatttcccgtcacatcagatcttgcaacgcatcatagaacattaaatatagataaaaaattactaattgcacaatttgcctataatttgagagatgaatcttttgagcctagttagttaataattgaacaatatttatcaaatacaaacgaaagtactacattgtccattttgtaatttttttggaactaagcaaggcctatgcaaatatatttcatgataaatttgatcttaatagtgcctaatttgatcttaatagtgttttatataagcttttaatttaagatagtttggtttaggacacggcacgactagaaatgattctttttggattttggatgcaggtaatatttattatgtcattataaatcgccaaacgaaaaaaaaaagaagaagacctttttcccagttttgcaatcatagaccggagccacacgtgagcgcaccgaaacgccccgcgccgcgcgaaacggccgcaccgcacgcgtccgaaggcctccttctgcttctgacatctaggcccgtccttcggatcctccctactcctagtttttaatacttgtcaccgacacgtacacagagccagcgtcggccccacctttactgcgacagagcggaacagaggagcctttcgaagcgcaaggagtggagactggagacggaggccaaggggggccgtcgcagaactcgcgccaccgcccgccatggcttcgtcgtcgaaggcctccgactcctcctcccaacgatccaaggtgcacgcggcctctcgattccatccgccccgggttcaccggcccgatctccccaatttgattggtttcgattctctccctgttttctgtgccctgcagcggtcggatcaggggatgatgggcagggacgccgctgccgcctctgctgtctcgatccacgcgaacctgacgcagctgatacgccaaatcaaatcggggcgcctcgcgtacatcaaggtgagcgaccgcgctcggcccgatcatcatgtcactgaaatttcgggggaggagcgtcggttttagttttctcaatcgtatgtgtcggtggattgggtgtttggctctctttgcaggagaaattggaggcgaacaggaagacgctgcagaggcactcctgtgcgctgttcgacgtggcagcggcggcggaggtggcgtcgaggggcacctatggcggcaacgcgctgtcgcagcgcgcggcggagggacagtccaggctcgctgggtcagacctggcaaacgggataggggagagggacgtggtgtacatgcaggaggagaacctggcggccgggacgctcgcgctctccagctcgggcgctgccgcgcagcggacagtcgtgcggttcgtgaagctgccgttggttgagaggatccctccgtacaccacttggattttcctggacaagtatggtgctgttgcctacacccctcccccctctgattacgtcttaccgtattatgctgcttcgcattttttcttggagctcatgacttcatgtgccaaattgatcttggagtgagattatggattggatagtcgataaacgcatgtgcttatatgatgctccaaaccaatgtaggagtacttaagtcatatgataaaatataaaacttttgaaaaaaaaaacagcaaatttccataccctttagctgtgggaactctatcagcatctgtgatattcattttatatctttattaccaccacacatccgacactttagatattggtattcttatgttcatatgttttccaaatgggatggccaagggcactattttctgatattcatggtcactctaaggagattggactgtagttatgtgcatgacaacattgtagatataacgtcttagaataagtattgcatcctttatctttttgatattttactatcttctaaataacacagcgcagaaaccaaagaatggccgacgatcagtcagttgttggtaggagaagaatttactatgatccagttggaaatgaggctctgatctgcagtgacagtgatgaagaaatcccagaaccagaggaagagaaacactttttcacagagggagaagatcaattgatatggtaaactaaattacaaaatatttcaaaatttacacaggttctaagccccccagcacacacacacaaaaaaaaaagttgtaatattaaggtaagatatgcgtatcagaaccaggccattacattcctgaaagaaaccagatgtggtgcctgaggaaattggttgcaaagtactgaagtggttccaacacaagcttcactgtacagttctcatggtgtctaaacatgaaatttagctaattttgcacactgaaataagaaattgacctttatttttccatatgaattcatgtttatctgattttatgtaacttctacaggagagctactcaagagcatgggttaaaccgagaggttattaatgtcctctgccagtttattgatgcaactccatcagaaattgaggttgtctaccattttaataagatttttaagttagtgaagtgacttgtataccataaacgttaactgtccccggctgtccttacatttgttcaacttataagatgcccaaaatttgatagcgactttgctttttccataaaatgacaggaaagatctgaagttctatttgagaaaaatgagaagcactctgcatcttcagacaagatagaaagccaactttctctggacaaaactatggatgctgttctggattcttttgataatctcttctgccgcagatgcttggtataattccacttctggcattctgttgcttttatttcctgttttcaaggctgtgttttgccgattggttcaactaaactttcaaggttgagatttacctaggacatttgttcactcaggtttttgattgccgcctccatggttgctcacagaatttggtattcccagtaagtaacagatcatttgcatttgaaatttctatttttttcccctgcaaagtaaatgaaaatacttttgtttgtcagtgtgagaagcaaccctacagctttgagcctgctgaaaacaagaagccatgtggtcatcagtgctaccttcgagtatgtctcctcatgaatgaagtttactaccatattggctgctcctcaagttatagatacttctttttagcctctttcacaatccttaaatacctcttttctacaactcctagatgatttcgacctattttttcagtggcgtcccccgccccccccttttttttacaaagtataaccgtgattatgagaaagcaaatctgtttacaatgtctgcaacttgctggggacaccagcttacaaacaaagcaggagaaaaccactaacaacagcaaactgctaagaaagattatagactcccaaaagcaaacatgacacacaggccaccggacaagattggaaaagagaagggcttgtcccctctcacgcaaaccttacagcagctcctccatatcttgaagcttcttgttcttcaggaagtactctgtccctgtccatctgttccacctttgatttctccgccagcctcagtagaatcttccatctctgcaagtagttggacattttgactaacactttttctcaaccatcactttatttcgagttgtccacaatgctcaagtaatcaccgaaaagagaaaaacttcaggttataatcttttcattcatctaggaaatattgcatatttgtaggtgtcctatcctatcgtagtgcgcctttgatgaccacccaacagaatttagctaaaacacaaaaggaaaacatgatctacaatatctgggcaattacagatgatgtaattagcacccccctttccattttcattgttccagaactttcagctttaggggcatcctattgctccacaatttcttccttcttttgcatagaaccgcctcagaaggtcttccacctatacatggattttttagagtaaatcccagatttctccatcatccataagactttaatcttcctcgccatccattaccacttcctgtattttttccatcaaaaagtcttgttctgtaacttcctctgcaccaaatttctcacagattcagaaggtggaatagtcattttagtccctcaactatctcctcccaaactttcaaaatgactgttaatcctcagttttcttttgggctaagtttcatcccataactatcaaagtgacagttttttttttaaaaaaacaagcgatctgtttttctctcctgggttgatttctatgtatagtgtttcttaatttttcttcttctagcctcgcttggtcttagctggagtgtttccttctgttttgtacagtggttgattttttgttttaataaaagctaacagtgggggcttcccttactgttttcctggttcaaaaaaatcatccatgaactatcaaagtgttttcagtcatacttttcttttcagctcaacttcgcccctcgtcctacgtggaacgctgcaccattgtgcctggtcagctccagtactgcccgtgattggagatagaaaaataatattcaaataaaaacatcattacctgtgtcagcattagataccaaataaatgagaacatggttagataacaatgatattgctggcactccccttcccaattgattgcctcctaattccggtgctagtgattgacagtgtgatattcatgtaactgatactaaaagaacaaattctgtcaaagcacaaatacttggctgccttatttctctctgaaaaagcagacacatcaaagtaacagaaggatttccctaacaaataatagtatacgtgcataagcttagttaaacatcatgaactctatgttatgtgctaggatgggagcatgcaaataattccactagaactctgaagcatatccattgacaaatagtaaaattctagactggaataactcagagaggtataaacccatttttgttgttgtggagcagacacataccagctgctatgaaaaaaaagagaagcccattttgatttatctgagcttcccgaatcaaatacatagatgactccatagtagaccttcgaaaaaatctttcctgctcaacctgtacagggtgtggtgtctgttggtggtattgcgagtatataactaaaacttattatggcataatgctactctcatggcacatggtttaccaggacaattggacccagaacccatggttgatgtagccagaaggcaggcacacatctccacctatatgttttttttctaaggaatagaaatgctttaaatcgcccaagttcctaatacattctcaactatttagagcatttatcctattgagcttgtatgtttccataaatattcgtggcaattacttcattgtgtgccagggctaacttaaattttagtttccccagtggagagaaggatttcaagagatgcatgatgatggtcttggtggctgtgcaacatatactatggaatcaggaaccgcctcacacaaagttgatgttaatattatgtctgaatcagaagattcaaaccgagagaaaggcaacattagatccatgacactatttggaaccagtggatcaaaaataatttcttctgttagcgctgaggaaagcactactccgccttcagcagatacctctgaaacagagaatgtaccctctgatttgcctcccagtagtttaaggaaacacaagatttcaaaacatggacctaggtacagggagcgttctcctggcaaaaggcagaaggtttttacttctgacatttcttttgcaagcaatatactgaataaactttccattccggagattcgtgacacaagaccagagtctagagaatccgggggtgataaactacgaattcttgacgagtccactaagaagacttcaagcaaagatatctatggagaaaacccaactactactactgaaaatgtgggaagagaaagtaataaagtatcttcaacaaataatttgtcggagcacactctttcttgttggagtgccttagagcgagatctatacttgaagggcatagagatatttggaaagaacaggtaattatatgttgtatgtaatgaaacattttattttattatatcttttagtttccctaggcttgttgaaaaaggagttccattattagtttaatttgataatttgattccctagttgtatgacctttgtgtgcatcggtcacagctgtctcattgccagaaatttactatctggtctgaagacctgcatggaagtggccaactacatgtacaacaatggtgcagcgatggcgaagagacctctcttgaataaatccatctcgggcgactttgcagaaactgaacaagactacatggtatgcactttcttgtcctgttagcttgtgtgctttacctcattggtattcactcagatcagaaaagttagaggtatgtaaattgttggtagcccacattggtctgaattcagcctcttactatgctgttgtgattatgtttgttatgattggccgcagattaggggacaaggtatcacatacaatgacttctattcattgcacggtattttatggtgggggggggggggtacaagattttttttaatccttttgggaatagcctttgtaatattgttgaggcaacaggagaaaaaccaaggaattgccattccagaaaacaggtaaaatatgctactacgggggtatgtaaaacagctttccttttgggatcagacctgttgccacccatgttaccagatctaaactgggggtcattagatcaatggttggaatgtgagttttgttttatatataatcaataaatagatgagaaaaaaacgaggtggcaataggcatgcatgcaggttcaaggccttataggctgctcttccctagtgaacacataacagcataagctcatgtgcttagttggctggtttcttcaactgtggacatgcttgttttgaaccccatctctggatgcttttgtgaagcaataatcagcaccatctgcttgggctggaccattcttctcagaacccaaatccagtttttttccagcaaagttggatgaagttccttatccactttcttatcccctgttcgctgatttgttgatatgaagtggctatatatggcctgactaccactccacagtcaaactgacaagtcaaaaataaatagataaccagctaggagtcttttattagattggcttgccacccttgttaatttttcctccctgtttcatatggtttccttttctttggttgttttcataagcatctgtacagtcctttttgtatttaaatatatttcttttgcctactattattgcagctcaaaaaccctttgtttttctgttggcattgttacgctagtaatactatgattaattgtccttgtcttctaggagcaagacatggttgccagaacaagaatctatcgtcggaggggccgcaatcggaagctgaaatatacttggaagtctgcagggcatccaactgttagaaaaagaattggtgatgggaagcaatggtacacacaatataacccatgtgtgtgccagcaaatgtgtggtaaagattgcccctgtgtggaaaatggaacttgctgcgaaaagtactgtgggtgcgtcccaagttatgctaactttccctttttactgagcagatagatttctgttgttcctttacccccatttttttagtgattaagtatgaactgacaattatttcgtatatttttactaataaaaatgcagagtaaaaaaatgatactgatttcatttctgaatactgatgtgtcatgattaatcaataggtgttcgaagagctgcaaaaacaagtttagaggctgtcattgtgcaaaaagtcaatgcagaagcagacagtgcccctgttttgcagccaatcgtgaatgtgatccagatgtttgtaggaattgctgggtgaggtaatcagcactggtctaattaacaattgacctttatgcattcatgaactagttaaaataatcatacaacagggcaagactcaagaaactgtaatttttgttaactgcctatcttgttctattgtcatattcatatttctgatttgtactattatattttatcacacataacacgatggatatattatcttcagctgtggggatggttcactaggtgagccacctgcaagaggtgatggctatcagtgtggaaatatgaagctccttttgaaacaacagcaaagggtgagactgagtatattcgcggtgctatttgtccctttgtatcattgtactctcctaacgctaactgcattaattgtttaccatggaccagattttgttaggaaggtctgatgttgcaggttggggtgcattcattaaggtcagataaccgaacaaaaacctctgagtgtgatactttctttcttgttctggctaattttctttttattttccttgcaatatgtagaatcctgtaaataaaaatgattatcttggagaatatactggtgaattgatctctcacaaggaagcagacaaacgcggcaaaatttatgaccgggcaaactcatcatttctatttgatttaaatgaccaggtgcttcttgtccctcctctctttcttcattgtattgaaatatttgtttaattcaatgcagtaagcttgaattcaatacttttacacagtatgtattggatgcttatcgcaagggggacaaattgaagttcgcaaatcactcatctaaccccaactgctatgcaaaggtaagaatttcaattactgaatagcatttagttctttattatgttgctcatcttaaattcatcctactttccaggtgatgttggtggctggcgaccatcgggttggtatctatgcgaaggagcatattgaggctagcgacgaactcttttatgattatcgttatgggcctgaccaggctccagcttgggctaggagacccgaaggatcaaagaaggacgaagcatccgtctctcatcatcgagcacacaaagttgctcgatagctgaagagtcgctccggatgatacaaatatgcagtaaattatatatatatttaatacatgatttagtcctagtcattatacgaggactttgttaatagatatattcattattagtaaacaaactctcagacatcaagttggagaataaatgcatataaacatttgtggaccttaggtcggaaggtgacaaccttgttaggttgagaaaagatagactgctaacaggttttcaaactggagtggctattgctagagtatcaactagctgagatggctacaactataaccttgtttgtatattttttggtaagatgaaatttatttgctaaatgtacacttttattcctgaaagtatttgatgattcattaggagtgtttctagaacttgataataggctatttgcatgtcacattattggttgcagagaggggtgcaggactgcagagacaagcatgattgactgattgtgcacttgcgccctcttttcaaatcaaattaacatttacagacaagactaaatatccccgccgacaaaaaaaatgagccggcaaataattcagccactagcttgttacatctttttcttgtggtgacagtagatggtagaataacagttcattccatgtatctgggactccaggaaggcaccaatggctgcaatcctgtacgctcgatgcggttaaatctactgtcttccggccatatacagatgggtgaccatctatcctgatcccagataaattagtgatgttcagaattgtcacaggagtcttcatttgcttcgtgacttgttccaagatcacgtttctttcaggtaccggcctagcatgggtgtcattaaggggca

SEQ ID NO: 3419 - DNA, 7098 bp, Sorghum bicolor
tagactaagttcaaaatatttatctcataaattacagacaaactgtataattagttattatttatttatatttaatgttctatgtatgtgccgtaagatttgatgtgacagaaaattttgaaattttttagattttagggtgaactaaacaagactttaacgataactgcatggtaaaaggtaaaattagatgtgacaaagaatcttgattttttttaaacgaggacgaaaataaatagcgtcccgcacggagaccggctgttgctgccgcgctgggcctgacctaacagtccgacctggaatccacacatagaacaggataagacagcttcgaaatgcttttgcatgtacagtatgcaaaatccttccgttctgatgccgacgcggatggggtggctgacacgacgccgacgcggacgcagctagggcgaccggtggccgccgcccgagcgtccgctcacagttacagcagccttcacgcgcgcgcgtcggggtcggggccggggctcgccgcagggcaacgccgacccgccacccgccaccgccaccacgtggttcaactgtcgctggtcagccagccgtggccccggctctccgctcctcgcccgccctggtcaacacgtacgacgacggatcgaatcgcggaccagccggttccgagttggcgcctgccaacgaccagctagctgaccgcgccctttgcgttcgctcgctggacgacgcgaatccagcctcctccgcattgggagggcctccttgacagcaccggttcggagaatacgagtaattaaaaataaacagacttggtttggactgcttcgttaagcgctgtgcacaggtcaattacttggatcaccttcagattacatcgacgtcttctgttgtattcagcgtcacaaagttggctcgccgcacctggctgacaacactaggtacgaaatccagcgacacacggcttgtcttgggttgaaaacgacaaaagcaaacactgaaacgattatatgcttctgtgaagaaaaccggaacggtgaaagtggcatttgcattgtagttacaggctacggatgtgaaaggaagcctttggattgcgaatagggacggagacgggatgcaaaataacagaaaatcgtcgcgatgttatccaaaagcaccaccaattcgacaagttggaatcgtaaactggccttataaaactgtggagtatcttgttgagaacgagaaatcaccaggggattctgaggtgaagacggattttcgataattcctgttgttatcgagaaaagtgaagaccgtggcggggggagttggatagagcagaggacgtggtaaggagtcactcctcacacgtcacagctgacgtcacacggccaaagcgacgtggcagttcctgtagacgacacgttttcctcgcagccaggcgcccacctctatagccattggaggaaaacatccaaaccaacccccccaggaacagaaaaaattgccaacagttctttaaagcggccccattgtgttgcccttcgaaccaccagccccccctggtttggacgatcacggctgttgatcatgccggcgcggcccgaactgctcgtatctgcaccgtccagtgggtgggccctacaggtgaaggtggggcgcgtgacgccagctggcatcggagggggcaagcgcaaccttatcctcttttcccgaggcaactggtccctaggcgcggtccaatgagcgctaacacaccgacagaccgatgggtccatatgtcagcgataggtggtccaggagaggctccgcgcgccgagaccaacacgcccgtggaatatacgggcgcgtccttgccttccccctccccgaacctctcgcctcgcgccggtcgcgtttcccattccgaattcgcgaacccaccacctcccctctctccctctaccgccgccgccatcagatcagatcaaagcggaacaccaactcctcctcctcctcctcctcctcctcctcttagggtttggtgaaaccatcggccccgctgatcccaagggctagggtttgttcacctctcgcttcgaagctttctctttgctctgctcggtgtttcagccatgatgtcgcggtcgtataccaacctgctcgacctcgcggagggcaacttcgcggcgctgggcccggccggcggcagcgggcggcagaggcagggatcgttcgggatgaggcggatgtcccgggtgatgacggtgccggggacgctgtcggagctcgacggcgaggacgagtcggagccggcggcgaccaacagcgttgcctccgacgcgccctcgtcgctggcagcggaccgcgtcatagtggtctcgaaccagttgcccatcgtcgcgcgtcgaaggcccgacggccgaggatggtccttctcatgggacgacgactcgcttctgctccagctccgcgacggcattcccgacgagatggaagtgctgttcgtcggttccctccgagccgatgtccccgtagcggagcaggacgaggtgtcgcaggcgctgctcgaccgattccgctgcgcaccggtgttcctacctgaccacctcaacgaccggttctaccacggcttctgcaagcgccaactctggcctctgtttcactacatgctccccttctcatcatccgcgtctgccgccaccacctcttcctccgtcgccccttcgtcaccaggcaacggtcgcttcgaccgcagcgcttgggaggcgtatgttctcgccaacaagttcttcttcgagaaggtcgtggaggtaatcaacccggaggaggactacgtctgggttcatgactaccatctcatggcgctgcctaccttcctccgccgccgcttcaaccgcctccgcatcggattcttcctccacagcccctttccctcgtccgagatctaccgcaccctccctgttcgcgaggagatattgaaggctctgctcaattgcgacctcattgggttccacactttcgattacgccaggcacttcctctcgtgctgcagtaggatgctgggaattgaataccagtccaagcgtgggtacattggattggattactttggccgcactgttgggatcaaaatcatgccagtgggaattcatatgggtcaattagagtcaggtctgcgcttgcctgatagagaatggagactttctgagcttcaacagcagttcgaggggagaactgtcttgcttggtgtggatgatatggatatctttaaggggatcaatttgaagcttcttgcctttgagaacatgttgaggacacatcccaagtggcaagggcgagcagtgttagtgcagattgctaacccggcccgtggaaggggtaaggatctggaagccatccaggctgagattgaggagagctgccgaaggatcaatggagactttggccagtcagggtatagcccggttgttttcatcgatcgtgatgtgtcaagtgttgagaagattgcctattatacgatagcggaatgtgtggtggtgactgctgtgagggatgggatgaacttgacaccatatgagtacattgtcagtaggcagggtgcaccaggatctgagtcagtatcagaggtgagtgggccaaagaagagcatgctggttgtgtcagagtttattggctgctcaccgtcactgagtggtgctattagggttaacccatggaatatagaggcaactgcagaggcgatgaatgaggccatttcaatgccagaacaggaaaaacagttgaggcatgagaagcattaccgttatgtcagcagccatgatgttgctttttggtcaaggagcttcatcctagacttgcaaagggcttgtcaggaccactttaagaggacttgttggggcatagggttgggttttggtttcagggtggtggccttggaccctcatttcacaaagctcaacatggatttgattgttaatgcttatgagatttcagagagcagggctatattgcttgattatgatggaactctggttcctcaaacttccatcaacaaggaacctagtccagaggttttgagcatcatcaataccctttgctctgatagtagaaacaccgtttttcttgtcagtggtcgagacaaagatacgttgggaaagtggttctcctcatgtccaaaattgggtattgcagctgaacatggttacttcttgaggtacgattttccatttctgcacaaatgatactttttttttttgtgaactagtggcagctggatccctttcctccctataattagcaagaacagtacagctgtcttgttttttcatagttattaataaactttgaacttactgtatactgttttaagtggcttggttagttctgcaacatgtcaaattgcattgcttacattctctgtgaaactgagtagaggtataatgcatcagaaaagagattaaaaaacaaaacccttaatagtgttttgtggaattgatgaattatgaaagcagtattgctacctttcatggttgatggttttaagtttatcaattagcagttcaatattgtttggagactgttaagttggttcttaatgtttccccttttcggattgtgtggagcattaacatcacttaacctagggattgtataagaacgtgaacatgatagatcaatcgtaggctatcttgtttgctagttagttttttagataatgtttgctagctagttaatggcagtaattggtttaattggctgctattgaattgtcttagctagaatggctctgcgaaataagatttcaaaattttggtaggtggtctagagaagaagagtggcaaacatgcactcaggccttggacttcggatggatgcaaatggcaaggcctgtgatgaatttgtatacagaagcaactgatggatcctacattgagacgaaggaaagtgccttggtgtggcaccatcaggatgctgacccaggctttggatcctcacaggcaaaggagatgcttgatcacctggaaagtgtattagcaaatgaaccagtctctgtcaagagtggccagttcattgtcgaagtcaaaccacaggttcgatcatcttttagccttccaaatcctttcttgaagatctgtggtttcaacttataagtttgttatttatgccttaaaaacatttcatatttattttcacgagtctaaaaggtagagttgaactgtagacgattgagttcagctaacaccttttgttttctcgcagttaatatgataattagcttcaaaagtttaaaaggacccagtacagttctttttcttgttgcaaatacattggcttcatttttgttcaatattaagctagtggctcccctcagttatagaagatctcatttggacctgttttagatttttatctggttgtggtgaaagcaactttctaaaaagcagcatggtgatgcttttctgcaggttttagaattttggcttagtagcctactagcttgtagaaaagcactattttgtttgccttattgcctactaggctgtagttagtttaccacctttcttaccttctgtaatttttttcctgcaagtggttagtactagtggtgaagtataagttgattgatatggttttttacctaagtttcttgtatttacttatgtaaattaaaattgattcctttgttgtgcactaatctgcagggagtaaccaagggaatagttgccgagaggatacttgcatcagtgaaggagagaggaaagcaggctgatttcgtattgtgcatcggcgatgataggtccgatgaggacatgtttgaaaatattgctgatatcattaataggaatgtggttgatccaagaacatcgctgtttgcgtgcactgtgggacaaaaaccaagcaaagccaaattctacctggacgatacattcgaagtggtcactatgctgagcgcacttgcagatgccacaggacctgaactggagactgattcggctgatgaattggccgcatctatctcttcacttgatattggtgacgaacaatcagaatccagtgatagaccaattggagggtcttagccagttttctcttgcattttcagaatatgatgattgtttcaatagtcaattctacacgattttctgatggatatgaagttcgactactaacaactggttctacggatgctccagagggaagcttcttaatctgctgtactccaagtttctccagttgggcaagatagtacagtctgttgctgcaaggcgtagatccatatgttcatagctgactcgccgactttcttggcacattctttcactttctcatttctggttgaagtaaaatgaaagcctcgcagaaggcaagggaactgtgtggctgaagtgattgtggggaggtataggagtggcaaatgtgaaaggagcacgtgcggagcttgtgatatgatcccgtattaacacgacgttacaaagtggtgtcactttttgaactatcagtagtagcaatctcaggggtgaggtttgaattgattaattgattcaaagccggatctgggctcctctctgatggttttgctcctacgttttcccctcatgtgcgtgttttttttaaaaaaataaattttctggggttacgttgagaaatacctttaggtggaagatagcatatttttaggcctacttgcgtgtcaattttgattaccattgccaatcagcgctggatgcttggcgattatgttgggcgttgtgtggcagctttgcttgtagtagtagcaaaggttttatgtggacttatcacgttcttgccctgtttagttccccatctaaaattttttcatccatcccatcgaatctttggacacatgcatggaacattaaatgtagataaaaaaataaactaattacacagtttagttgagaatcgcgagacgaatcttttaagcctagttactctatgattagccttaagtgttacagtaacccacatatgctaatgacagattagttatgcttaataaatttgtcttacagtttcctgacgagctatgtaatttgtttttttattagtttctaaaaacctctcccgacatccttccgacacatccgatgtgacacccaaaaaattttcgttcccaat

SEQ ID NO: 3420 - DNA, 9816 bp, Sorghum bicolor
taatatatagacgaaaacaaaaactaattacacagtttaactgtaatttgcgaaacgaatcttttaaacctagttagtttatgattaaacaatatttattaaatacaaacaaaagtgctatatccgaaacaaaaaatttgccaactcaacaaggcttaaataagaccataatactccgtacatgtgtttatgggtgaaaagattctgggtgggtggggaacagggcaacaagcggcaaacaggctgcagcacgtctttttttttgtttgaaatatatataaaaaaaggtgacacgattcgctacacaaatccccgcactcgaagcagttcctgcgcctgctgctgtagctggtacggtgctacagtacctcgtgactgacgatgcagccagccgcagcggtaacaacaagccgaacagtgactggtgtactcgagtactccaagcaagcaagggacccaagaagtagatggttagatggaacactacatatcacggtggttcggtgatcgaccccttcggcggcccccgtcagccccgtcgcttcgcccctcgtgcctagaagaaactgttgcccaggctacaacgccaagcaggcagccccggcaaccccgacacgtccgtatgcccaggcttgccagcgctatcccacgacgagccaacgacgtgaaaaaagccgccttggcctccctccctcccgccgcccgtgtgccgcggcgccgccgatcccaccgagatcgaggtggacagacaacacggacacgagcctgcgtcaaaaaaaggccacccggctcatgccggaacagtgaatcccggcggcgggcgcgcgcgcgcggctctcgtttaccacacgcgcgcgccagtgcctgctgtctgctgggctgcggccagtggagtactcgtactactactactgttccttatcaggaagggttcaaaacctcggccctggcccccctgggcttgcgcctccacgctacggggccccgcgtgtcagccgggagcgtgccgatatttccgagccataaacaacgaccggcggtcaagtgagtgtcctcggcttgatccatttactattgtttagttgctaaaaattttttgttttgaaaacggtagtatttttgtttgtatttagtcattattgtctaactacaaattaactagctaggtttaaagaataaaattcgtcacgcaagttatagttaatctgtgtaattaattttttttatctatatttaatactttatgcaaactatatgctgtaagattcgatatgataaagaatcttaaaaatttttaggcactaaaccggacgtatttataaaatatttatcgccttgtactactgtgcagctgtgctggggcgcctgccaataggaagggaggccttgtttagttcccaaacaattttgcaaaatttttcagattctccgttatatcgaatctttagacgcatgcatggagtattaaatatagataaaaataaaaactaattgtacagtttggtcgaaattgatgagacaaatcttttgagtctagttagtccatgattggacaatttttgtcaaatacaaacgaaagtgctacagtgttgattttgcaaaattttttggaactaaacaaggcctcgctttcaattcctgctgccttggatttccaaaccaaaaaaaaaagaaaaagaaaaatcctgttgccttggagtagtactgtgctaggggcatctgccaattggaaagaagaccgaccccgacgcatcacctcgcctcgctttcaattactgtcgcctccctagtcaagtccctccttcctcccttctcaccaattggtgggtcgctttcgtactccctgcctggcgtgcccatgagcctcgcgtttttgggggcccttttccttcctcgcgagatgcatccaccggccggttttctcctggaaagccattcgtaggacgagagggccggaggagcagtaggcggcgggcggcggcggcgagggagagagagagatggcgcgcgagaggcgggagatacggcggatagagaacgcggcagcgcggcaggtgacctactccaagcgccggcgcgggctgttcaagaaggcggaggagctcgcggtgctctgcgacgccgacgtcgcgctcgtcgtcttctccgccaccggcaagctctcgcagttcgcgagcaccaggcacgcactctcactagcttggctgcctaccgttgcgcgcgcagctccactccgccgcccatccgacctcgatcacatctgccgtttttcgaaacttctcgccatggcgttttctcgtttggaatgatcgatttgttgcagatctggctcttcttctaccaagtgccaacacggtgcctcttggtgtttcggatccttgcactagctagggtttcgtgctagcttggctagtggctacctacagatttctctctcgtagtcctttctttcatagggtttggcttaattatgagggaattcgttttctcgagtacgatcggtttctacgcgttgtgtggaattgaaatcaagcttccccttgaacacctagagccttcgttgtgtcgattctggtcctgcaaactccctgacgtcccatagaaatggggaattttctacagtatttcccccaaggacccgatcgcaaagctcgcagagtacttttagtcttttacggtgtgtacgtgctgaattgctgataaatatatatatatatatatatagcagattgctgtagctcgtagtacttatatactacatgttgattccgagagcactctagtgtccggataattctctggtccgccgcatgtcctgcggtaaaaacgctgccgatagagctgatcgaactccttggatcagcgcgtggcggttgttgataagctaaacggcgtgctccccgggtcgagagctcatggagcacggccgtacctgtgattttatgtgccggttttgcctcatgcacgagacttgatcattcccgggctgaagcatttcgtgattattcgtgctggtgggataaactattctggacaagtacactgctgcttgtggctggtgctacctccggttattaacccatcatcaggttgtaggtagtagctcttattaccatatattttgctattggtgcgcaagcgaaattttaacatgctattataatataaaaatatgtacggcttagcaatagcaatataaatatgtacggcttagctatagaatgtttgattatgagcgttcgccaatatatattttttgtgcttcagattagaagacgcattcgcctacatgtcacttgcttgattcaataatgttttgtttctatggaactcacattttacatagactaggagaaaattgaacaaaatattagagatactccgagagactctttatatcattcttaatttatagaaatagagaatttagtaaaaaaatgccctcctctttaattggatcaccaaatatagtcatcttctattttagatttttctctaaccagccctgctcacatgatatagaacagctattgttgtccaaaaaagaagatatagaacaactatttgagggtacaaagtaattttactcaaatgactgatgatttagagtaaattttttgaaagactctttgagatgctcttagttaacaagataagcttagtttgaaatttatctatttgtgttttatatgagatggaatgtgctacaaagcatgcagtatgtgctatcgggctctgaaacctagcatctgatcaaggtgcctcgatgtttgctactgtggctctggcataatcaggcatgttagtgagtacactgtgcacaaatctctatgaaaagggttcaatttcatggttgcccttggagcttgtggctctagattctagaaacactacaagaactgcacgttcaatggtggtggggcaccatgggtttaggttgttctgtgagagttgatcgatgaggctaatctctggcatctaacatacacgatggggctcagcccctcaatactctttggttgggatagatcacaatgcttgtttgaatttggtcatcgatctttttcagttctgttgcacattcgccttgctaacttacttctgggtgcaagtgtgtgggtgagatccacccccttacactgtagatatcttttgtgtttagagtgaaaaaaggtatatggtatgtgatttaatcttattttctagctgttctagcttatgtttacctttagtttgataattaatacaggcatgtcactagatccatacatttccatgtccaacactgtatgtgactataatactaaaagactagacagaggctactaatatatatgacaccacaagtgcctctagcttagtgctgaccttagacttggctgcaacatggaatgtttttctcaattcctactggaaccgaattgtttcctattaaacttctgcatttcaagctgactcctgaagatgcttacattgctatattgctctgttttcaaatttcatatcctccttacattctaagcttcctttatatgtcttcattatttacagtttgcttttgcttttgtgacagtatgaatcatatcattgacaagtacagtacacattctaagaatctggggaaatcacatcagcagtctcctattgatttgaatgtatgttatgttagcaatatttttctttcttttttaacttgatcttttcttactagtaggttaatgtgtaaagcattttgacaggaaggacagatgtaaaaaagctagaaatgtatgggaagtctgctagtaggtccgcatatacgacagctacatttttttattgcgcaaatgatttagtatgaactacatttttgtagttccttgtgattaaatcatgcatatgcgtctttggtcaattcttagctgatgcaaattttcatagatcttagtatagagtatcattgatcagattacatgagcattttttttgagtaagtgactacatgagcattgggcatactcaactaaggggagatacattgaatgaataaagattgcaaataaagtactcttttctgtttgatcaattaatcatgagcaatattagtgtctacacttacttttatctaaccatctgtagaaaaatcaatgtttatcttctgagaagggaactgagtgataaatttatcaagctatcattttttccttcaatgtgatatgtcaagggtgaactaaaagtgttttctccatagtaccatatagtactcagtattccttgcaatcttagtgttaatcagtctaggacttcttattctccaagtgtagtttgcatgcactactgtcacgagaattaacaggatgtatatgtataattaatgtttgattttactcatatagtaatcctattttcccttataaattttcagatagagcagagcaagtacactggtttgaacgagcaacttgcagaagcaactcatggacttaggttatgctttgttccatattgatcatgtgattcaaagaatatttgtttgagagaaaagggacccttgaagctaacaaatgactttactgttcgatactgtagacagatgagaggtgaaaaccttgagggattgagtgtcgaggaattgcaccaaatggaaaggaaacttgaagcaggattgcatagagtgcttagtactaaggtacggtgactaatcaaggagttctacatccttcagattcttgtttgagtttgtgtataactgtttttccatacaatgcatctctcttcaggaccagttattcacgcaacaaatcagcgaactacaacaaaaggtgagaaatgattatttaacctgattgcttttgtgaattttatatcagataatatgtactagcaaactattggctttcagtgtacaatatgacattttaattaagttgcttgtctgagatcttgccatttcatctatatgctatttttacatgaaatttgtatcaaaattgaagttgcaagaatcttggaaaattttcccaattcccaggcccgtgggatagaatgttgtttcaagaaataaacgatctcgcgtaattttcttttttttccccatattttatttggaaaatctcatcctgaattttacgagttcagaacttcagattttaaccaacatcctaaaatgatggcctagccagtataagggctagcctggatcaaagcctagatacctgccagctactctggtgatcagcttagattatcccatgttccaggatatctcaatcggacgaactctctctggtgatcagcttagattatcccatgtttccaagtgaccttagtcggacaagctgatcatttttagtggaaccacataaagaggattggtaactgaattagtagaaaaataggtagatcgaaaagagagatgcttgctacataggatatgcatatatagcagtgatatatgggcctatgaaaattgtaaaattaaattcagttgagacatgggtggtaggtcatgtgccaatctcttaagaatggatagtacagtttattaaaaaaacacacattgaccactatggagatgccttctgggcattgcctttagaagctgaccatgatttgaacacagacggacaagaggaggcctcctgagcgtttttttttatttttaacccttttttgaaacaaattctaaatttgacactgaaaatattttttttaaaattaaccccttttggccgcgccatcatgcacggcgcggcattataacactgcggcagaggtggccaccctggcctgctgacgtgtcggccctgccgcgctaccatgtatggcgcggcagggccgaataagaggccgcactcgggcgcgcgagcggcactctatttcggccgcccgagccaccctctccttcccctcctcttcccacccctccccctctctcagcacctttcgcctagcctccttcccttctctccctcctcttctttcagcttcctcgtttttttcgcatcgttgtggagatattcatcttgtctttaattttgaaacaactgctttcttagtatgtagtatttattgtaccttgtgtttgctgaaacaattatttagatgaacgacatgtatcgtgaaaattattgaaacaagcggggtcgttctagagaattaattatacccagacgagtgggccacgtggccacccctgccatgccaccatgcacggcgcggcagtgttgtaatgccgcgccgtgcatgatggcgcggccgttagtttttttaatatatatatatatatatatatatatatatatatattcagagtcaaatttggaatttgtttcaaaaaaggggttacaaataaaaaaatcctacacatctctatataaccgatataactcccaagaagctggtgatggcatagtctatcgacgcacacataaaaagcgagcaaatgtatgccaacttttttctaaagttgttatgatgcttgcctaagtagtattatcatttaaaatatttttgaactatgacgaatgttagctggtttggctggcaaagctttggccttgtatgtccatcttagtaggccatccatatatggtgggtactaattctgtaagccttacctaatgctagtctcaatgaggagaaattgactattataggactctaatcgtgtagtttcttcaaaataggatttctgacgttggtttctctgaaataggactccaaatattggtaataagctgtaatgacattttgtgtctttttaatctctttttttatctaaatacatgtatttattcctagagtgacccttttacggtcattagactgtgatggtgggctccattattaggggaaaaaacatcgtagctttctggcccatggcttccgtgttgccttgtccagcttttttttctataaaccgatgccttgctgcttggccatgccgccattattagataaaattggtattgcaactcacggtaatggctctcacagtcccagcaaaccgtacgtatgataaagttgcctatacaaggatatacaatattgctcttctatgataattaatctattcttccatgcaatccatcttccttcacataactatctatatattcttttgggccaaaaatcgtttctatttggaactgatacttcatatttcattgaaatggaggagcatctgcaattcaacaggtttttgtggggatgtttggaagtagagtgtgactttttccctgagtttttcaaatggaattaactgaaacaagtgaatccttcactgtgtatgcgtaaatggaaccaaatacatttaaaatgagtggacgatttaatgatgcaattctgttgtccgtttcttgcagggaacacagctggaagatgagaacaggcgtctaaaagaacaagtaacaaatcatatttctctatatagtgcgcagacttctagtgtatcccctggcagcaaagagcatgtttataattcctttcttatttttataattaagcagatgcctcaggtgttaacagctggcacaatggtggttggtgctggtgcagaaaatatcctcactgaagatggacagtcgtctgaatctgtaatgactgcattgcattcaggaagctcgctcgacaatgatgatggttctgatatatgcttgaagttatcgtgagtgtactccaaagcatttatactttgcataagcaattacgaaacacttgtttgttacctccctgaaggtatttgaagttttgataccttgctacatattttaagttggttacatacttgatcggagtcattatatatactgaagttgtcgctagaaacagtatgcatatcgggtttactcgataaaaaacagcatgctcaataccctctcagccaatactggttataggatgggagtagttacatttggaagtagaaaggagttttcatgaaaagttaaacagtacatgcatggttttctttgtacccattgaattcttaaattcaaagggtacgcactacaactatgaactctttgaccatgcaggttgccttgaattaaaggaaggaccatcagatattatctgcttgagtgggcggacatcagtgctcctacgaagagaaagactgggatagtctcatagtccccatacgggagattggtttaaccaaatctgctatccttgtgcatgtctgtagttcaaagtaattatcgctgaagttgtaatggtgtatatgcgttatcttcgttctaaatatctgtattgtttcgttgccggggctacattgttcgtgtattatgcacttcaccgttatatgaaacctagagcttattaaggaagcttcagcaaatcttttgtgtacctaaaaactagcagcatttatgaaatttaggtgcagtaccaccagattttgtcggaggcatcatttctcaacgacgccgacgcaaagtttgctagagctccgccggcgcccgctccggccccgacgtccaccttcccgttggcggccactccggccccgacgtccacccaccccgtcggtggccactccggccccgacgtccaccagcaccgtcggcggccattccggccccgacgtccacccattccgccgtcctggagatggaccccaggtcgccaactcgccgccacgaagctctggcggctggggatgaggatttcgcccgccccactgccggatccaccctgttcggactccctccgctagcagcggccgcccacccgcgctccgtccttcaggcaagctccctcgacccactcgcggtgccttttgatgcggacagggtgcagctcacggattcagatgggtcgctggctgattcg

SEQ ID NO: 3421 - DNA, 6756 bp, Sorghum bicolor
atttctcaccaatggttaccgtgtttgttccgctgataattaacgaaaggtgtttaattagatggaggtgactagtcatgtgagctataaactgatcgagagctacagcctagctaggagtggttagccgtacagatgctgctgttccgatccttgctgttttgtactatggacaatgggagttcttcggtttttagtcggttggaaggtcgatcaataattccatatgcatcttgcttcagacttgagagaacgtgtagctaagctagtgctacttcttgtttgtccctcgcctcacatgttcataaatggaatagaaacatgctttatttgtagaagatgagttatttttaaggtataagctagcagagtattactagtattagtcaacagtcaatttggtggtgttagggctaggaagagaatgtgcctcaagtttttgatagtccatctagctagcgtggacgtacaaccaaaggcttagtcgcctcaagtcctatcagattttgcttttggaaaaaaaaaagtggtgctagaatgtggatttagagaaactgattctaaagtatagcttggaaagctgatcttggagagtgtggctttatttaggaaaaactgattctctgttatagcttttgaaaagtcaattctagattggcttgtgacatgtaatagcccaaagtgggggacctcaaaatatgatctcttgaaaacaactccaaactacctcagattcttcttcttctttaaaaaaacaatgttgtggaatcttagtttcttctaaggcacactctagaaccatcttttccaaagcaatgaatcaggggatttatgaactcaaactgtgtgttcagtatgtctaaagttgttttatttttgaagagactggaggagcttgggagcccctataaagaaaattatttacgtctaaagttgtaactatagctgcgcgcggctgcaacaactttaagtaaagcgacttaataatgaagtctaaattcatttgtaatgcatgtaagctgtggtccagaccttgtttggaacaaagttaaataaaaatacatgcatgaaacatgtacaatctaatttcgtttaattagattccattataaaatatacccactacattacttgacaacaacaattattcatatatatttcttctacaaacttaagaggcaatataaatgatgacccaataatatatggtgttgtgtagagtggacggggccagtgacgtgacgatgtaggtataaacaaataagagagctagctagctagcaggctactacggtgcatgctttgctttcagtccagtgcaaattaaaggggtgcatgcatgcatcagtgtggaggccaacaagatcgagaagaagcagtgcccaagaagaggatccggaagccaaaaccgtgctaaccgttgtgccaaaagccgccacggcagaccgaccgaccgaccacgaccagaccgatcgtcgacggatgcatggcacggcacggtggtggattgcaacgcacgcgcccagagcgagccggccgcgtcagatcacggggcagggggctgggcgcggccggcagtcgcaggcagcgacggccggggcgggcgggcagtgcacggcaccacacggcacggtgccccacgcctttcacggatccggtagctgtctccgtccacgccgcgcaccgcacctcgtcctctccaccccgaattgcacacgcacacaccttgtccttccatcccttgccgcaccaccgcccaccccctcctgcttattaccaccaccggctctctcttgtgctgtgctcagctcatctgcctctccatttcgtcgtcgtcttcttcttcctcctccttcgatctccacccatccaccgccggcgcggccgggatccgcagctcgagaccgacggtggagcgcggcggcgagcatcagcagccgacgacggcggaggaggaggatccgcgccgccgccgtcccgagacgccgccgccacccacgatggggcgcggcaagatcgagatcaagcggatcgagaacgccaccaaccggcaggtgacctactccaagcgccgcacggggatcatgaagaaggcgcgcgagctcaccgtgctctgcgacgcccaggtcgccatcatcatgttctcctccaccggcaagtaccacgagttctgcagccccgggaccgagtcagtactgcagcaattgcttgcttccttgctttgcttccttcctcatcttcgtatagtgtccatctcctacttattgcttggttatattttgcttctgatgatggtgtcggtggctgatttccatgttcttgggcgccggtgattgcccgcagcatcaagaccatctttgaccgataccagcaggccatcgggaccagcctatggaacgagcagtatgaggtcagtcatactcactcgtctcctttttcgtctttgttgcttgcctgctgcatatctcatctcttttgtttcactcaagcaaaccactcactcatcactcgctgctttactcttcacatgcatgacatgtccgtctatgagatgattgatgagatctaaatttctaagaaatttccatgcttttttggtttatataaatttcactatatgcatgtctctgtgcagaatatgcagcgcacgctgagccatctcaaggacatcaatcgcaacctgcgcacagagattaggtcatcagcacggccgatagaaccactttcctcttcctttcttcggttttatttattcgatttctgagcgagggattaattcgcgatcgagtctgaggcttgatttctgtgtccatcaaatcaggcaaaggatgggcgaggatctggacactctggagttcgacgagctgcgcggtcttgagcaaaatgttgatgcggctctcaaggaggttcgccataggaaggcacgtacaaaccctaatctcttgcttcagcacctagctacttaggcagctagctggcttagatctatctcttctgcagactgatgcgctcttcagatctactcatatttcatgcaccttgtttgtagatctttgtgcatgtttcctgatttggttttgaatcttatttttttcactattacatagatctctctggcgtgtttgctaatttgttcgcggttgttttcttgtgctttatgaagttaattttttttttgaagatttaggatactttactgggagagatagatcgatgcatctcttgtacactaattcagtttcagtgtcgatgcatctaagctatcaggtttcttttttttttacctcaaacaaacaacatttaattttgcttcgatatttcatttagtctacaagaggctcttgtcctaaaaagaaaaattgggatcggatagagaaatgttgcttctaatttttaagatatttcatctcatgtccttgttttcatcttccctacctcttttgctgatgcttttatcattcgattttcagtaccatgtgatcgccacacagactgaaacttacaagaaaaaggtaagaaaaaccaagcattatctctttagtattacactgcacaaagattatctcatatgttgtcaattgggcaattttgagggctagctgcccccaatttgtcaagaaatatatttatctgcaactatacctagatcttccacctcctttagttctttgccgtcacttgtgactggtttcttaatttggtctagtggacatgctaatgtttccaaaatcaggtctatctggtggccatacttttataatcaccaatttatcccttatcagggtatccagatttctttttatcttatttaagtatgtcttatttaaaataaattatttacagcttcaataagatataaataactaatgaattccttattatcaaatctctccctgtcaacaccttaaatctaccaataaaaccgagcagacatggagccacatccatcctcaaatctttgtacttgcaaatttgactcttcaagcaaccacatccaccttcaaaactttgtacttgcacatttgactcttcaagtagtgatgaacgcaaatatctgacagacaccaccaagcctcaaactgaaatctgcaagctattgtccagtgtacaatagcatacatatgtttgtgcatttccacactcaactccttctccatgtcaatctgaggctctactgaaagtagctccacgttgtagaactgctagatcttggtccatctcatgtgctcgcatgcacgcactcatacacattgtatgcaatgctgtattcaatcagtaggcgcattggtctctgtcttttagaagctagaatgaattgagcacgagcaaggacactagctggtgttggatcggagcatgcatccattgatccatacgcatgcgtctgcatgcatgtctctctcgttaagccggcctgctagctaggtaagattgccgcctacagatcttgcttattatttggtccccctgctatctgggagtagcatgttaagcactgatttttatgatattgcaccatggcatgatacacccacaaataaggaccaaagtgtaggctttatgatttgcagaagtatggaaatggaactcattagtatggaagtacttgggctttgatgattactgaatgtgtagtctttcaatacgtacacagccatgtatgtactgtgtattgactgaaacatatgcatccagctcatctccaaatcacccaaatatttatctctctctggcacctcacgtcctcgcccccaccatgtgaaggatatatatgttgtcgatcggatacagatagttcacctttttgttttggacagaaagcacatctttctttatttgagccatgagatatgtgtgttctttcacgtcataaatataattaatacaaacaattgatttttttcagagttttcttcaaggaaaggaagcatttctgtttcttttgtacagaaactctccaatggggaatcaaactaattgtcaaacaaagcacctaattatttttttatgcatcggagcaggcctcactttgttagatcagctagcccattacagttcaagttgaattgtgttttccctacagcatgtccatatggtgtcatatggtgacatgaaggctattatatacagcatttgttatcttctcctcttctgtttgtagtgtgtaatgcatttgacttttcttgaccgagtagtcaccactcaccacttcaccagcaggcaaatatgaccaccaaggcaccaacacatatacacgaccatgtatataatagtaccacactagctagaaatgctgagcgaaaacatatatggctggtgtttagtagcatagtcaagggagaatgcatccaaatatatatcatcatcgagcaaacaaagatgatcttgtttaagctagctattcctcatgaactgagctgcttcatatatcccagcaaatgacatttgctagatggtggttgcttcttcttcttcctagaaactgcaaagaagagaggcagtatatatttttcactttctctattcattactctcttggtccctaattagccaaaaaaaaaagtttgatcgaattgtatagaaaaatactaatgtttgtgacatgaaattagtacagttagatataagatgaaatatattcccataccttacttttttttgggtctagatgtagtgataatcttttacttaaaattggttaaaatttaaaaagtttgacttagactcagacagctctaaaaattggacggaggaagtattatacacataacatggcctagctagcttaatgattttccattttgttagtactatatatatacattgattctgcagaccttgcattgttgctaaattaattacactgctcgtatgttgtcctgtgtgtgcatatacatatacatgcaggtgaagcactcgtacgaggcgtacaagaacctgcagcaggagctggtgcgtgatcatgcattattacactacactaaataaatctcagctagcgctggtagatgtgtctattaatttacttacctactgatcatgcatctgaattaatccattactgcacacgtgcgtgcagggcatgcgcgaggacccggcgttcgggttcgtggacaacactggcgccggcggttgggacggcgccgcggcggcgctgggcggcggcgccccggacatgtacgccttccgcgtggtgcccagtcagcccaacctgcacggcatggcctatggctcccacgacctccgtcttggctagcatcgtcatccacagccagcgctgcctgctgctagctagctgcattgcgcgccgccatgggtgctgctcctccacggcgagcacgtactgcatgcacgccaatgcaagttactagctagctagttcatgcaccaccaacgcaagcaagcagcaatataatgcatgcaactaccgaggtattgtaataacaaataagaattactgcgagcccaatgctgcagatgatgaacagcttaattaccgcgcgcttgtttcgtgataccatgcgtagtcgtcattatattcctgtggcatgtatgtcgtttatgatgtgtgttgtgtgtgtgttcgaggaaaatggttgtattctattatgatcgtgtggcattatatctatattgttgactctattcctatatgtgagacttcattatcaatgttcatcaaacaatacatgctgatggttcgattttctttgtttgatgatcagcaatcaacagtctgcctagtaataataatag

SEQ ID NO: 3422 - DNA, 9957 bp, Sorghum bicolor
cacccaatccgatagcaaaccctaatcatcaccaaccaatccggtgagaccagtccaaccgccagctggttagttagaccaccagggccagcaacatcttgctattagttgacaagtgcaattaatatataaaaagggtgaaatggaaattaatttgtaataaatgaaaacaattaattgtcttttacttttctttatatgactttggatatccttctttagtctatcaaagttgtcatttagttttaataaaaataaattcacttttctaatgtcatgttacctccattataattttgttcctcctagattgtacttgatatgggttacctttaatttgatttttataatatctaaggaccatattgtggaatatggctatagcacacattaccaatttactaagttacattccaaaagttattaccgagatttagattcctttcaaaacaaatgttccccttatcatgtttttagatttttaaattgtcttatatgttcatatgctatttcaattgaaaacattgctctgagaaagaaatcattggtttccatggaaggttttacaagtacaaatatataaagcaaatatgtattaaaacctaatttaggccatttctagtgcttgcatgaaataaacttatagtcctatttgaactttgatgaattaaatcgtgttgctagagtaggtgaatctttggaggagactaggagagagatgaaattgaaccttatttaagagtttgtggcgattaagcaaatgatcggagcaatatttggtgagtgagacttaatcttttttatttatatcctaggggatctagtcatatatgttagaaggagttctttctccttatttatttacatttggccccttcttttaacattcaatggctaaaacttgtaggaagaggcttaggagaggctccatacttaggtggtgatagaaggggctcaagtctcaagcaacccagtgctaggtccaccactgttcatataggtgggaccctacaatagttttgcacaatatatagtaataaggcgatacaaagaatttatacgtagacaactttgcttttatgagtcgactcgccactagtagtgctcacagaagtagttgttttaactaaagtaactaccacgtgttgtcttcatctccctgtaactgccacgtgttgtctccgcctcacgtcttactactgcagtcttactctctcacaaggttctatttggctatgatttgcttgttttcttctactaaaaatagcgccgcgtcagcaagtagttccgatcaagccaaatttgtcgatcttatgataccaccatcttttggttctacctcaaagtctccctatttgggtcaccccttccataggggcggaggctagtggcagccaaactagactcccgctctccatgccatctgaaactttctatcgatttactcttgtttgtgtgctactttaccgatgaatgtgcatgttatcatgtacgcaggcacacatttcccacttcacaagaagcagagtgctcctctccccctgtctcaaaacagagtgcctcccggtaccatttgctttagcacacggaatgagaggagcacgtcagcctagccaaatcgcaggacggggaaagcaaaagcaaagccggtcggactcggacacgtccctgagatcagtcttcttaccacaccggccccgcctcgatctcacgtggcgtcttttcttacaccgaaacaaaccaatgcagagttttaccctttccagctccgcggctggcgttcggacggatctcgcgtcgcccaacaaactccacgcccaattcaagcgagcggccctcgtcgagcccatccatccatgacggcatgacgcgggcgctgcgcgcacgcggacgggacggggacctcctccgccgaacccaaaaccgggcccctgcttcctctcacacctcgcccgccccccactataaaccaccacccttctccccacaaagctccctcttccattccctctcgtcgtctcgccactcgctacacccccaaaaacctcacgcgctctcgacgccgtcccgcgctcgcctcgtcgccacgccgggcgagagggaggggcgcgcccaccccgggagccctatataacgacgccggccggagctgaggtacccttacccgtcccttatccgctcgcgcccagatctgcctctgttccacgcctccgtcttccgccgcgtcgggcgcgatccattcccgccgagaggccaggttacctcctgccccttgatccgacgcgcacgtttcgtctcgtggcggcctgggcgcgttagctcgcagatctgggcgtttaggatcgcgtctcacccccgatctatgcgttgcggacggtgtcccgcggttgattcgacgctgtgcagcctgctctcgtcggggcccgctcgccgaggtcggaattcgacgagatcgcgcgtgtttgtgttgtgccagtgccagatctgcgcatgcgtgtacggtcgcagctctgcatggctgttcctgttgctcggcgcagacgggtggactttggattagatttagcacttttggatttggatttggatttacgacatctgtgcgcattgctgagctgctctgcccgcccttttgcgctgtcgtagaaaggtgtctgggtttgcgtcacgccgtggcccctggggcgggaacttggactcttgcgcctagttcggggctaggtgtgggccaaatctttcgtgtgcaatttttttccatgtttccctttggagaaacctgctcgtgctgaataattcctgtgtagggtaaaagcatgatgtcatgggctgtctacctgtgcactttacattcatgccgcgacgcttactgatgatatttcagtttccatttcgatatgcgaaacagctcctgccgtgttggttttaattgtttgacaagcggagtgactggtgttgtctgaccataaatacggttagcggaattgtttttttttgtttgtattcaaagggaagcattttatgtgaaaattgagattgttccacttaagtgtcatatattttccattttcgtcattttagctacatatggaaggtaaaaatgcaaatatcggaaaatgcgagttgccaaaaatgataggaaataaaagttaggctgcacttttcgagaacatgcttagcacgtgtttcattaagaggaagtaaggaagcatacacgccctacatcacatcacgtgtttcattaagaggaagtaagaaagcatacacgccctacatcacatcatagtgagttgccattagcgatgtggttgaacacaaacaaaaggcactgcagcgcggtggaacgcacacaggtttgattaactaagaaacaaattgtgcgaccaaagagctgggtcagcattgtttgctaggcctgctcaatccgacacgggcagtaccctgcccttgcgcttagttaggctgcactatctaacaataaatgacaacaataaatgaccatttctccttttgattgcagggtataagctggtatcatggcgtccaacacaggagcgtcaggatggttcaggggtaaggtgaaggctgtgacatctggggattgtctactaatcatggggagctcaaaggctgagatcccacctgagaagtccatcaccctgtcctaccttatggccccaaggctggtaagatcaatctgcacttgatgaatttccttgtcggtaatatacaatattcgttgccttttcacttactctcagttttcatttgttcatgaatctggtagaagtcagtgggttgctctagacaaactaggttactaggttttgaggttatgcttgaggactaatgaatgtgggcaattctcaaattgatttttggttgcattttgttactaaatttggcacttcgaactatttactcagtatcaattgttgcttcttgatattctattcatttctctagttttcattttttgtttgtttattcatggtgttctaggctcgccgaggtggagttgatgagccttttgcatgggaaagcaaagagtttctgaggaagctttgtatagggaaggtgctacatttgaacttcatatcctctctgaactctcatatcattcattgtattcttccttttttagacaatgcaaaattataatctgctgttacaggaggtcacgttcagagtggattatacagctcctaatattggacgagaatttggaactgtttatctaggcgacaagaatgttgcatactcagtagtttctgctggatgggcaagggtaagaaccatttaactttcatatttgagtatctctatgatattaattgtacgatgaacagatgcactactgtattgtactccttctgttccaaattataagtcgctttgacttttttagtacatcatacatagtaaaatggatgttccaaaaaagtcaaagcgacttataatttggaactgaggaagtactaaaatagttgctttactgatttattcttctatttgcttaatcaggtaaaggagcaaggccccaaggggggcgaacaaaacccttaccttgctgagctgttgaggttggaggaagtcgccaagcaacagggtgttggtcgttggagcaaggttagtaatttttcatctcttgtgatcagctcattttgtattgcatgagatatgcttttcttgattttgctgttgtatgcttcttatctacattcaggaacctggtgctgctgaagagtcaataagagatcttccaccatctgcaattggtgaagcaagtggttttgatgcaaagggttttgcggttgcaaataaaggcaagagtctggaggcaatagttgaacaagtccgcgatggcagtactgttcgtgtgtatttactccctagtttccagtttgtgcagatatatgttgctggagtacaggtaggctactcataatttggtgttgttttctttatgttaatacaaagtaaatattaattataaataaatctaggctccatcaatggggagacgcccatcggtacctactgtaattgctgaaactgatgatactgctaatggcgtgaacggtgaagattctgagggaacacctgcgcaactgactacagcacaaagacttgttgcttctgcagcttctgctgaagttccaccagataggtatggaagagaagccaagcacttcacagagactagagtcctcaacagagatgtaagctatctcttattctgatcttcctctattcccttggcatgaataatttgtttttgttacttggcctaactttctcttgtaaaaaaatcccaggtgcgtattgtggtggaaggcacagatagctttagtaatataattggttctgtgtattaccctgatggagagactgcaaaagacttggcccttgagcttgttgaaaatgtatggccaatatctatccatatagtttcttttgactatgcatgctatcaggcatcatgaagtaactaaattaaactgttaaatataaatatgattgctttcacattcttaaattgttaaatcttattgcatttaaaatttacatgccaacctttgtgttacaggggcttgcaaagtatgttgagtggagtgctaatatgcttgatgttgaagtaaaaataaagctgaagaacgcagaacttcaggctaaaaaggatcaattgagaatctggacagggtttaagccaccggtgacaaactcgaagcccattcatgaccagaaatttactggaaaagtgtgtcttatgttctcagatgatagtgtgtattcatcataattcacataattgtttgatagtaactatttttttttcatgtgtatctcttcacaggtggtagaggttgtaagtggggattgtattattgtggctgatgatgctgctccatatggcagtccttcagctgaacgtcgggttaatctgtcaagcattagggctcctaagttgggcaatgctcgtacagatgtgaagcctgaaccttttggtcgtgaatctaaggaattcttgcgcacgaggttgattggcaagcaagtatgtagatggggcttgtgacaatctggctgaagtttttaattcatcataaacagtattcttagtagaaattagattgagtttctcctcaatttttcattttcaggtggctgttgaaatggaatactctcgaaggatcagcactgtggatggacagagtgctgctccaacagcaaacatggctgatacgagagttctagattatggttcagtatttctgggttcaccatcacagactgatggagatgacatatcttctgctccgagctctgccagccagcctggagttaatgttgctgagcttttgctctcacgaggctttgctaaaacatctaaacacagggattatgaggaaagatcacactattatgatgctttattagcagctgaatcacgggctgagaaagcaaagaaaggagtccattctctaaaagaatctcctgtgatgcatataacagatttgacaactgtaagtgatgttcttttattccatcagtttgtttttgatattttctgcatcatcattaacctattagtatggtccttgtatggataggtatctgcaaagaaggccaaagatttccttcccttcttgcagcggaacagaaggcattcggccatcgtcgaatatgtttttagtggccatcggttcaaactaacaattcctaaggagacttgcagtattgccttctcattatctggtgttcggtgtcctggtaaaggcgaaccatactcagatgaagctattgctttgatgaggagaaggatactgcaacgtgatgtggaggtacaacttttgctgtctcttttggttcttccatttccccattttcagtttctgaaggatgcaattggtacacacagatagaggttgaagcagttgacaggacaggaacattcataggttctttgtgggagtccaagaccaacatgggctctgtacttctggaagctgggctcgccaaactgagttcatttggcttggataggatctcagatgcttatgtcctacaaagagctgaacagtctgcaaagcaacaaaagattaaggtgacctttcatttttctccctgagctgtaaaaaagggtaaaacaattactgacacttaaacttttcaagatatgggagaactatgtcgagggtgaaaatgcttccaacggatccacacctgaatctaaacaaaaggaaattctcaaggtttgttcatgaaggatatttttgaagcacactacatttatttgggtggaattaacttcttgactgactctatttaggttgtcgtcacggaagttcttggtggtgggaagttttatgttcagacagtgggtgaccagagggtggcttcaattcaacagcagcttgcatctttgaaacttaaagatgcgccagtaattggtgcttttaatcctgtgaagggagagatagtcctcgcacaatttagccttgacaactcctggaacagagctatggtatgtgtacacttaccaaacgtgtatgatgaaatcaactaatctttatggaccaaattcaatagttgaattctgtcttgctagcttataccctagggatctatactgaaatttctttggccactgtaagtttgatgattctaaaataacccataccagttattttggttgttagcaccctgatgagggcgttcgatctcatcctttcaagtttttatggaaattacatcaaaactttacacattaggactaggcaagccttctcatggtatctaataaatatgggaccaataataaacctctctgttggttcccataatttcctgtttcataaagaactccttgtggcactgcacaccgaattcgtctaacaacaggtgtttgcctatgtggttgttgatgaattacaacattattcgtttttctaaacagaatgcaagtgaacatagagatgaatagtgtcagtatttatttgtttcagtgtgccatataaattagttaatatattgtcaattgtattagaaatcgtttactcttgcacatttgcaggatgtccagaccaaagtcatctttatgtctgaattttcttatgacaactagttttatactttatgctctgaattgccattattagctcctggtcattgtagaaactttgttattaagtcttcacgtggtttgtgcagattgttaatggacctcgttctgtagaatctccgaacgacaagtttgaagtattctatattgactatggcaaccaagaggtggttacctacagtcgtctacgacctgtggacccatctgtttcctcgtctcctgctcttgctcagctatgcagccttgctttcataaaagtgcccagtcttgaggatgacttcggtcaggaagcagcagagtatctaagcgaatgtttgctcagtagctcaaaacaataccgggcaatgatcgaagaacgtgatgcttctgggggaaaatcaaaaggacaaggaaccggaaatgttctcattgttactcttgttgatgcggagacagaaagtagcataaatgctaccatgcttgaggtttgtgctactgactaccttgatgacacactgcttgttagtacattacttctgctcatgttttgtagaatacaactgcttgctagtacataacctttgctcatgttttgaagaacatccctactgctcatggttcaaagacaatgcttactaactagtcagcgaagatacatatatgccacacaaaatgcccataaacatattacacacattactttctacagtactaagtaaagaaacatatgttcatttattaacagatgtgatcgtttttttttttttcggaaaacctgtgtgaagctgtattatggttatttggcgaggaacatatgttatttctaacatcacctactctccctgcatttacaggaagggcttgcccggcttgaaagaagcaagagatgggacactagggagaggaagacagctctccagaacctggaacagttccaggagaaggcaaagaaggaaaggctgcggatctggcagtacggagatgttgaatcggacgaggaggagcaggccccagctgcaaggaagcctggaggtcgtcggtagaggcataaaaggctgcagtctggcatgctatggaagttttggacaaccccaaatgtgggactctgccgtgagttatagatgaaaacttagactgaggggtaccttatttattcggttagaaaagagaacttagtgaggcgaaactttctcggtttgagcacttttgatattccgtttttacaccgtaagcttataaggttaaagatacattgttttttctctgaacttaataaggtcgtgtctatgcgctgcggttctttgtagtcagaatataatattgagaagtgcagtgaatgaaagtttaaggattgcatttaattattccagtgtccgtgcagtgacgatttctgcagtgacgatttctctcgtacgcatttttactgattgcttttgcttaatgatagcattcttctctggcgaaatggttattattggtactgttctggtattttgccctccatttggttgaacgctaaattttggttgcttagaaacttttggccttccaagtacaggaccaagccaaaatagcttggcagcgtattgaggtggtgacccggtgggtcttgactggatgatttagggcagtttggtaaagcactcgtatctgattcttgagtttcacttctttattctttgattttttgattctttgatggagtagttttacttcttgatttttttggagtggttatggacctatggtaggagagcagggtgggaaataggcgagaatcaatgttgaagtgatactagtggcaattttgagcggtggagagctgattttttttatcctctttaggccttgtttagttc

SEQ ID NO: 3423 - DNA, 9128 bp, Sorghum bicolor
gttcacaaaggtgaatcctttctcctattatttgttggcctcaagcccaaatagacttgaaataacgttttgtcatatacatctcgcacttgacaggaatctagcggttctcatcgcagcagtggcaaggcaagagcagaccgctcttacaattctttcggcaggccaatgtcaaagagctctgatcaccacaagcctacctcaggaaccagcaacaagcgacgagtatacaaatctgatcatgacaaaatcaaccagaacctgttttcagttcaccatcatcatgaacttgccaccgaaggcagcctccagcttgctgctctgtgaaatatttataagcatgtggacttttatggtccactgatagtggtttgagacagtgaaataacaatgctcaggatctgtcagtgaatgcaacctttggtttgtgcttttttatgttatgttcttgcttgcccagctatttggaatgctagtttggctctgctatgtcatggttagatgagtgtgtaaattccattccttttcaaaattgtccacaaagatatttggatcagggcctatgtcgtagctgcatatggaccatatggcaatgtgatatagtgtatgcatggtgtgccatttgcaatggaatgttcagcttgttacgatgcaggtagcatgtgatttctcaagtgcactttggttctggtttgcgaaattatggaaactggtgtaataaaccttgtcttttttctgtcgtgttgatgtttcgtctatggagactcaattttagaaatactttaacacatttcctattcttgaaacggctgaaacatccgagacttttatgcgacgcgatttcagcccgcactcgcatcgcctgtgccccgcttcggcgaggtcctccccgcgccacggctacgccccaccctccctgagctcctgcccccactccgacgagcagatctggcgacctcctcaactccagcgatcagatctggcggtggcatgacagatctggcgaggtaggcccccctcctcttcctaggtcacagagttagggtttcggcgagtctcctctctctctcccagctttgacaagctttccctctttcttttctgtaacttatgggctatagaatgcccgaccaagggaggtaggtaggtcaagcggtgggcatggtcgatggtggtttatagaagctagcagcggtcgggccaggtcggggcagaggagctccgcccatagtggcggcgactggggaggggaggggggcgggaagaaggtggcgccacgggtgcgccgcggagctccgaccgagccctagcgcgcaagggccggcggcgggggaggcgggcacggggttggatcgaggtgcaagacgatgaggggaagaagatggacaatacaaggtcagctgggtcgttggatcttggtccaacggctcaaatccgtcgcctgaattttttttgaaaatttaggtgcttgtatattttctatttgggcgtttgtctatgggattcaaccattcaagacacgtttgtttctttttactcggtactgtttcgctttgccaagcgactctgcttgtatcattcttgtctgagctccttcagacttgtgcgaccgagatttggcttctcccacgagattgccgaattggcttgatgcaaaaaaaaaagtgaggcaaagagaggtgagtgatgagaaaccagacgtacttagttgtctatcgtctgctcttctttttgccataaacgtcttacagaacagacctgtatatgtgcatatatacctgtgatttctgtattgcgttccctcttttttttttgtttttttgggtgaaatagaagaccttcgtagcatgaactcttctctggaagaggtatgccgctaccgaaacgttagagccgtcggatgaaacgatgggccgcctggatatgaaaccaccaaatacacagctcgagtctactgccaacgtggacgagtggacccgagtccacctctgaggctttgacctcctcctcctctctctctcgatggtcgtcttctccacgacacctcaaccccaatcggaacccggacccagatctccgaaaaatccccaataacaatctgcggtccgccgttgtgattacaccttccaatccgatcccaagtctgttcgatgcgaatagcagcggcgatttagcgaaccgcgcgttcgctagggttagggtttcgagggtttgcgctagggtttgggcgcaggatggggcggtcgagaggggtgccgaattccggtgacgatgacaccggacacaggtttgctcatgttcccacccgccccgctttaccatttcgttctgctaccccgcgcgctgggagcggtgagctgacgttgctggttgttggttgcaggtcgaagcggaggagggtctcggggtcgggcggggacgcgacggactccatttcagccgccatcgggggagctggagagggagggggcaagaaggcgctctaccactgcaactactgcaacaaggacatctccgggaagatacggatcaaatgctccaagtgccctgacttcgacctctgcgtggagtgcttctctgttggcgctgaagttaccccacaccgcagcaaccatccatacagagtcatggttagtgcactagatcgtttgttgtctttgcttgacttgacttatgttttgagtagcactccactagttttcagttgttgtattaatgtttggtctctagggtcccaagtcagttgtaattcatagccacttagttatgagggcacacactagctgcatctgtagtggtcgattgcttactggaacattttgagctggtgaactgagtgctgagaccatttaaaatcaaagttagtctgatccctataagtcaatgaaataaaacagagaaaaggtagcacccaaggattaatttcttaataatctacacaaatacttagccttttgtccatgctctgctaaagtgcactggtgcttattattccttaacccatgtaaactcagccttctaacattgcttactgaaagtgtcttattctttgatcattgcttagccaaagtatattaatacttgaataatattttgcaacaggacaacctgtctttcccacttatttgcccagactggaatgcagatgaagaaattctcctccttgaggtaacattgtgtttgtttggtatatttacttcctggagattgtgtttaattgtttacctgtcatgatcaaagggaattgaaatgtatggtctgggaaactggcttgaagtggcagaacatgttggtaccaagtctaagttacagtgtattgatcattacacaacagcatacatgaactcaccttgttatcccctcccggtaactattttctgtacctgtttataaatgcaataaatgagttggcacttcttaattcaatactacctcgtggttgtaggatatgtctcatgttaatggcaagaacaggaaggagcttctagctatggctaaagtgcagggtgagagtaaaaaaggtgagtcatgagtgttttttttttaggcgatggaaacagttgatacattttgttgatcatttgaagacttgagagattttgcttactgtctagttcttggtttttgttcatgcatgcttacctattttagtatgctttagcgccttagtggtcatagcctcataggtcatgtgattcaggccctgtttggatactcccagctaatagttagctgcattaggtgggtagagacaaccaataggtttttattagctgggtggttggatagttcaatctacactattagctaggttgtttgggtcagctagagctttttttagcagatttctattagctctagctgatccaaacaggtcttagtgtttaaggtggaattgtatgtagatatctggtctttggtgtcaatttaacatgtgtttggtcatttactgtctgaaatgttcacatcttcaaattatgagtttgtgtatgccattgtggtggctttgcaaaagcacttgacttctactttggatatagcgatggtgccagggtggaatttgtgaagatctcataactaactagattctttagtgtacttggtcttatcctcatagtcatatagaacgtttgttagtggagtatctatccatctagtggcagcttgttactttcgagtggacgtattttttaaaagagaaaaaacatcttgtgttgatctcatatccacaaacacttattctttgggttttgggtttaatgggaaaaatgacatgcacagatatcagtgtgctccttactcgcagccccttcaattgcagcatcattgtctatatggacaagcataaaacttgattaaacaagatggaactaggtttcattataaataagaagaaataggcacccaaattctagttggttgaggtctacaactctacatccacactgtgcagagatgaacaccagatgcatgaccttgtagtcagataaaaaaaattcaaatagtactgctataagtttttttggtgtcagtagcttggttatgactccgattcagttatcataatgggttgttttgatatctcgtatttcttctttgttcttacatatagggacttcactgttatctggagaactgactcctaaggctgaatctccattttctccctccagggtcaagtatgccattatttatctgaatacctatgaatatgcccctaagattcaaagagtctttttaccagctatttatcttgcatagggtggaagatgcacttggagaaggtccagcaggtcgatcaccttcacacatagctgttggtatgtattgggaatgaaataattagctagaccaacccaattttaaaacagtgcatctttggtctatgtcaagagatggtgttactgttatgtattcatattgtcctaattcttgttgacctgctgcaggtgcaaataaaaaggcttcaaatgtgggacagattaaagatggtgctaatgtgtcaaaaatcgaaggtataatcattgatgaaagcatcactgttattttcaagtttatatatcatcatatgttcactcagcaaccaggctctggcaaattcttagaatgttttcttattttttttaacttcagagatgctttatcaagaacgtcacattcttaagaatggaatgctaaaaaatattggtagtgctatatatttttctgtaattagagttctttctattcgaaatgatagtctctcattatggcatggtatgaaatggagcaatatgtatatatcccttttgtttattttaaagtcacattactgcataaatcaaatcatggaccttagcatatttaatttgcatgtgccagatggtcatgtcgatagaagcgttggtgtgaagaagcccagatattctgcagatgaaggcccttcgttgactgaactgagtggatacaatgcaaagagacatgagtttgacccagagtatgataatgatgccgaacaagcgcttgctgagatggaatttaaagaaactgattcggaaaccgatcgtgaactgaaactccgtgttcttcgtatttatctgtccaggtttgttaggagtgaagcatatttttttgttttgtagcaacttttagttgatagatcctactcttctgtcctatgttcatttcatttgtctgctatagttcgtattatggtgatgtttctgttaaatatgaattatgttaacaatgctttagttgtgagttaaagtgtaagtaagcctgtttatatgttgatttcgtttattagtataataaataatgtttaatagtgcaaaacaactgttttctttgtaggcttgaagaaagaaaaaggagaaaggagttcatattggaaagaaatttattgttccctaatcccttggagaaagatcttacaaatgaagacagggaagtttaccatcgctataaggtcttcatgcgttttctttccaaggaggaacatgaagccctcattaggagtgtcattgaggagcgaaaaattcggaggagaattcaagaactccaggtattgtttgttcatttgctcttactaaatcaactatattgatgcgttcttactagcaaacatacccgtgcattgcaatggaatgttcagctagttacgtagttgcctggacattttgtggctcggagatttattcaccgatcatgtcatgcattttaattcatctgagaatcaaactccataccttgccttccgtatatctcctggacgcttgctgccctaactctatgatcacattatgcatttgaaattttgaatttgttttgagattggacttgctctaacttgtacggtcacggtagggagtgacagactatgaaagcatttcgtattccaattcatttcagaattggactctacaatgtgcttggatacactactcttaacttgtacggatcgggagaaagttaggtctgtcagatctccatcggacgattgtgagcaacaaaggacgaaggaatcttctgctcattaatattaattaggaaaatgattatagaatgattacatctggagctcttcgtttaaaatctgcttgtactatttattccatggatcaacacttttatatgtctttgttctacatgtagctgagaaagtgattgtagataaaacttacaaggaacaaatgtattgcatataactgaacttgtggctgaactaatcctttacaaattcattgtcttttatttacgttcttatatagggagtaaggttacctgtggcaaaaatgtgcagtgaaccgaacactgcctcaaacaagagaatattaaactagcagtgcagtttttttctattagaaaaaggaacaatacaaatattaaatttaaacattttgaaccatttgttattcttgatcgttggaggatgatagattagcacatgccacaacattcagactcttaatttcatttgtccttctcttgtattcccagttgctccaccaccctggtaacccacccagccattggccaaccaattatctgtttgtttttcattcttatatatacaataccccctctgccccacaaagtgtcattctcacttactgagaagtcaaacattttttttaacttttgatcagttatagattaaaaatattaatatttataatgcatagttagtaccattagaagaattattgaatatattttcttaataaatttatttagtgatacaaatgttgctaatattttcaataaatctagtcaaacttgagattcgagaatgttcgaccagcacacatcccatagcgtcggttctttttgggacggaacgagtatgacctatatatccttcaattttacatggtcttcgcatagaaacctgatggcattttagagtcaacattacttgttagatacctcgtcttggatgttccgcttgagtactcttatagtcttgcatgcattttgtttgtactaggcagcgcatatgaaagaaatgaactggcctgtcttcccataaggtcctagaagcatcaatatattctggtgggcaaatggaaatgccattatttacttatattttgttgaatctcaggaatgtcgctctgctgggtgccgcacactggctgaagcaaagatacacatagaacaaaagaggaaaaaagaatacgagctgaatgcccaaaaagctaaggagagcagccttattgcaaataataaatcggtacagaagatgaatcgatctatgaaaattgagtctgatgggaatttggatccaaagaaaggtggtgctggcttggattctcctaaaactacaggacttacaagtgttaagcagtgggatgactgggatatagttggtcttcctggggcagagctattaagtgctagcgtaagtgcatttcatatcccagtaccctgttcggtgactgttgatctcatttgggcgtattagtattgtgaccttgttcataccttttgtgtttgttaaagtaaggatgaacatcctttttttttatttcaggaaaagcttctatgttgtcagaacagattgctacctagtcattaccttagaatgcaggaggtgttgatgcaggagatattcaagggtagtgtcttaaagaaggaagatgcccatgtcttatttaaggttgatcctaccaaagtagatagtgtttatgatatggtaacgaaaaagctgggcaaccatgaggaggctccaactgtctagcttatgcttttgagcttgcctgctgtgacatgccgaagaaaacaaatcttggtttcgccccctttgcagcgcatctgaaccatagctgaaggtggaactgtactaaatcgaattggccatagtttacagaaattcatatcagttgtcagaagcacaataaggcattccagccaagttgtaaaattattcccgcccgaccagaatgtgtagcatgagttattcatttctgttctgccattgtcgtgtactgttgcagttgtggtagtgccttgttgtagtaggtataggtgcctgagtttatatgtatcatcgtgtatgtaccattggtcgctctattttatgccattgtaccaaccccagacattgattattacaattcatcttgcagccaaattcttgtctctaatggaaagcttggccttcgtctttgttttcgtctgtaatggaatgcttaacctccatctttgttttcagtttgttggttttggttgaagagcagaaccctgctctcggtgtaccccctccggctccacacacaaaaaaaaaaacatcatgaggtcatgatagctgggattcaatatcgtcatgaggttggtgtactcctccttccgtctcggataaaatatcatcatgaggtggggttcaaatatcgttatgaggttcgagaagtactatcacttgttctgacttcaggccttcaccaacgcaggctaaaaaaaacattagcctcagtaaggtcttgtttagttagcactttcatttttatttggcaattattgtccattgtaaattaattaggctcaaaagattcgtatcataagttatagataaaatgtataattaattatttttatatatatttaatattgtatatatatatatatattctaggatttgatttgac

SEQ ID NO: 3424 - DNA, 13687 bp, Sorghum bicolor
  misc_feature (8351)..(8798): n is a, c, g, or t
accacatccggtgttggaccaaagaacacctatgagatttgtacacgacaaactagtctatttttttaccaagttcatagtatttcttattaacaattatgtctccaactaggtttactttaaacatattattaataactaatttatacaatcttgtatataaatgttattaatttgtatataactttggtcaaacctagactctttgaaaagtgagaattgaatccttttataaacaacatgatacatatcgagcatccatggtaccctaccagattgtaacattgccatggatggttcttgctttgttgacaaatattgacaatagggtgggggatgaactgctgttgtagcaagagaaggtgtgcacgaagggtttgttttggggctattgctgcccgtgaacgaatgcagtacagtaccgacttgctacttctgacatcagtcgcgactgttggtctgttgccacttgaagaaggctgtgcgcttttgtaccgtcgtacttggaacaaaatcacaaacattcaaaataaaagatattcatgtcttgtttagttcccaatttttttttggttcgagcactgtaatattttcgtttttatttgacaaatattattcaatcatagactaactagactcaaaagatttatctcacgatttacagttaagttgtgcaattagtttttgtttttatctatatttaatgctccatgcatgtaccgtaagattcgatatgacgagaaatcttaaaaaaaatttagtttttgggatgaactaaacaaggccttcaattatgattcgaaatccagtgccatttacgtatgccccatgcctcagctgctgaaagcgttatgttgtactttgttcatcctgccaaaagacatcgctggtgtttttattatggatggatgatgaaagcatgctaaggccttgtttagttgactcaaaaatccaaaacttttaaagatttccatcacatcgaatcttacggtacatacatgaagcattaaatatagatgaaaataaaaactaattacacagtttgtctgtaaattgcgagacgaatctttaaaaaatagttacttcataattggtctatgaagtaactagacttaaaagattggtctcgcgattttcaaccaaactgtttaattaggccagtcttagtggaggttttactagaatgtcatgcacatttattagagcgccatgtcagcaaaactgcactttttgcatgaaacgaagaaaagagagaaggaagtagtttcaccatggtgaaactccactgactttgtttcccacgcggtgaaacaggatgaaatccccattgagggccaaatcgtttcaccatcttgcatgtgatccaatcattttgtagcaattaaatgctttgcttagccttggaaacaacaaagtgaaatactccattgctggggttatttcatagatagtttcatttcaatctcaatgacgtgttggtatgtgaaatcgtgcaatgacactctctattgagactgaccttagttttatttttttatctatatttaatgttccatgtatgtgtctaaagattcgataggatggatgaaattttttttttttaaactaaaaaggcctacgccatgctaacgagctcctgcaccaatgctaatgatgttattttgtcacatcagatgggaaaataagcagaagctgacagcacagttacagtcgctggggaataggtcccacatgtaagcggtcccacatgacagcaggtaggctttgcacaagagcagtagctgaccgtttccccgtcagggtggaactgagaatcacatcctatcaggggctgagatgcaattcctacaggaaaaaaggaagcgagcccttgcgaaacgtttcatctaccccctcgacgtgattcaaaatccgcgccctggtcccccatcccgtccctccctccggcctcttctaaaaatcctggtggctctcgctgtcctcaagctccgctgcccccccccccgtccccccacccccaccccgcctcgctcccagcctccccaaaaaccctaaccctagccagcacccgcaccggggagatggacggcggcggcacgcaccgcacgccggaagacgtgttccgggacttccgcgcgcggcgggctggcatgatcaaagcgctcaccaccggtacgtacgcgcctgcttgttcctcacccatttctccccttccctcgcggaatttgaggattcatgaggccgcggacgcttcgaccgattggtttcctggcggctaattggtttgatttggttggttttcttgcagacgtggagaagttctaccagcagtgtgacccaggtgagctcgcgcacgcgctccgccgattctccgcacccgtgcccctcgaattcgcacgattcggtggcgttcgcgctgtttcttgccggaaacttgcggtcttcgaggagcttgacttcgaggttttgtgcgattttttgtgttcgtcgctgagaggaggaagcgttttgtggatttggcactggttttggggtggtttcgcttctcgcttcgatccaatccctggattttacgggaatttgtactctgctggttttgggaattttggccttgaagttgaaggcaaagcttctctgctttttaccccaagcagaaaagtttggtcgggattattctctgctggtttggtgcttcgatccagtagcggattagttttgtgcgaaaaaaaaaggatatgggacgaatgaggtataggagggtgctggcttttttctcccctaggattgagctactttctaattgggtgacgtttacctgtactgtcttgagtttgggagagcaggggagtacgtatatatataatataactgaaaaagtagtggctggtgacctcgttgccagcccacctcacgcggggtgtttttgggctttcgtttgggccagccagaacattgggtagctttcagcgacaacgtcaaaaggaatacttaataggaaagtcactggagcataggtagcactgacagtctggcacaaggtttctttggcgtcctagtggaactgtcctctcttttttttctgtttccgttataacaaaacaattttaccattttaacttttaggttccttgctgctatgtagtccatggctactgttctacattcacttaattaggttatagtaatagtaataccttgctggacactagtaggcagtagcatcttatccctgatggatatagctctgtacaaagttgtggattagtatcctggttttcctgtttgggttgtggcgatgttagaagggtataaattacaattcacccattcctgcttctttcttttggtcttttgtgtcacttgcagtccttatcaaactttattggttctggattctcttaattagatagcatggaagaaagaatcttgtcaaggacctggaatcttaaggtttaacattttgtttgcagagaaagagaatctgtgtttgtatggtcttcccaatgaaacatgggaagtgaacttgcctgcagaggaggttcctcctgaacttccagagccagctctgggaattaattttgctcgtgacgggatggatgagaaagattggctgtcactagtagcggtgcacagtgatgcttggttgctggctgtggccttttactttggtgcaagatttggatttgacaaagaatccaggtattgtatttgcagcttgtccatttctatagctttcctatgttgtggacttgtggtaaccaatcttgttaccatatgttgctttgcttgtatgctattgaataggggcctctatctagtcttattggtgttctcttgcagttaatccttaccattgtttgcattgattgtcttgaaaaatagagttacttttgtcatcaaagtcgttgtggagcatatactgttatcatgtcaattccaatctgcctccttcttttgattgtttttatttcagttgttctgtaccattctttgtaaccaatttttcatcaaaatttaaaggtgaattgggcatcagtgcatacaaatgacttgctaaggatcactttttgtttatacactgaaatttattgtttacattatgtgtgaacttgcctaggtgaattacaagaatagtatattcttcacaatctgcaataacctgtggtgtttggacattgacatggcttatatctgcaacattgtctgcacctttttatacgaacgttgtaataaaacttgtaaaatcattgtgttttgaaagtatttttcacaacgaatcaatttttactatttccatatgctcaattcaaggtttcacagaaatcaatggtcatagttagagaagtttggttcatgcatttactaaccgaggtagtatcttctttatgttttaccaaaacaatctaaaatgctcgtcatttaccattttaattaatgaacttaggcctggtttagatccaaatttttttggggttttggtactgtagcacttttgtttatatttgacaaacattgtccaatcatggactaactaggcttaaaagattcgtttcgcgatttacaggtaaactgtgcaattagttattttttaatttatatttaatgctccatgcatgtgccgcaagattcgatgtgatggggaatcttgtaaacttttggatttttgattgcatttaaacagggccttagcaatcataattatttctgtatgtgcagtcaatgaacataatttttgaactagatggagcactattaatagcctttactatgcttatgggaatcaaatatgtgttgtatcaaagaggaatatggttggggaagtgtttttttttgaaaaacaaggtggcaggagctctgccttgcattgaagtaggagaaagaaaatagcacgtttcgactcagtgggctgcatgacgtcccctagagagagggacaaacaggatacaaagcaaacaaatctagatccttcctttacatggtttgaaaagaccgttgccgttgttccatgtcttcttttatgtgtaacactaccgatagaggcgttgagctcttattttggaatatcctccggttccattctttccacaaattccacgtgacataaatgcataggccattgcttttttttgtattttctcttttggcactgtcttaacagcagcttcccaccaatcagcaatggaggtgcagtgttccaaaaggtggtataggcgtcgctaggcgcacacaagtgctgggcggagggcaccgcctcacctcacctatgggggtaggtggagggataggtgatgagcccacaaatccagggtcgccctgcttgagggagggagctgcgctgtcacttgttgtcctccctcctacatcttcggtccagaaacattgatgcccatttgtttgaagggggggagaagggagcagaactgcagaaggggaaggccttagggtcgttggcggtgtggggattgtacgtcgtggcgccgcggttcgtggtgctgtgcggctggcctgctgcagccgccctgagagggatgctgggtacagcgtacaagataaggataagatggagcaattttgtgatttgcccctttttttctaagaacttctggaaacttccttgctatgattctctttactggtttcttacattctgctccctagaagttatattttctcacaaaatactattagatatagttttatttgttatttctcctctcataaactcctctctggtactgtagcaacaagaattacacacacatgttagtgtttaattcacagttggtcaattaagtatacatagtgcagactgatataaacgcctaggaaaagcctagcctcgcctaggcacgcctaagctctatgcgatggtcaccgcctagggagcacctagtgccttttgtaaccgcctagagagtgcctagcgccttttgtaaccttgtggaggtgtaactagcatcctggaaatgtgaaggtagagagaatttctcccatgctagcaattgcctccaaatgtcagcctcaaaagggcaaagcagacataaataaagacctgtgtcccctgttgaccatgagatagtgcacaagatgtttgatgtgtctatcctctttttgccagattatcaaccgttagaattttatcttggattaaggtacaagtgaagagcttgcttattttctgcttctgctttccaaatcaagttgttgcagaaggtcttgaagttgaaggacccagcgaattgaatctgacacgccgacttatggtgggtgataaattgctcaagcctagtagtgtcatttattctaccctgcagcatacattgttagtagctcttggctgacatatttgttcttatgcttaactaagttatagagatttggagccaaggttctcggagcaacttcatgagccaactgctgttctagaatttggccttttttccatttactatggtggatgagttgaaaagcaagtggtctgtggtgtcacaaggggtgtgacaaggggtgtccatgtggacccatggtttacagtcactgacccattctagccagagccatcacagcctcaatgctgcccgtccaaatttttgcaagtctgggacacctaatccgccaaacttctttggatgttttactcttccccagttgactagtagtggccttcattggccttttcttttttctttccaaaggaaggacctatggatccagtctattgctttctatgcccatgccagtgcagggaaggtagtgaggaagtaagtgggtgtggaggacaaaacaaaacttccaagccttccagccttgttgagtgaccttgctatcctggcaatcttttattgatctctttgattagtagctgcacatgcattcaagttcatgagtgtgtagatatttgcatggaaaagctttcctctcgccttgaaagtccgcaggatgttgttgaggtcaaggtcttcagagtactttcaaagtttggtttgggaagtgcttgcttcataaattttggcttcgttgcgcatggtaactgttgttacaattgtgtggatatgtaataggataacgttaactttggcctgttgggtcttgcgttgtatgcatatatcccctcagatttctaggttagcgtaacatggtattggagcatccttagcgaaggatgggatcctcacatgctgtcattggcattcaagctgtgctatgtgttgtgtcatcattcctggctctcattgggtcagttgttacctacgcatgatgcttgttgtgcttccttttttctctacttatctttgggatgtttgggctcagatcatcagaatcttaattggtgccaacttctatagagataatgtttgcagcgctgtttgctaagatttgtgacgtcttcggtcagagttcgaaaaacctcatacaacttaatagctcagtcatagcattcgaaacacctttcactggatggttgatgttctttccaagctattacttattggaaacattcttgctccttttgttagttttcattggtgactccatctccaacagttctggctgctcagtgaccccctggctgatatttgactgcacctgtccaatgtctacactcagaacttgaacatcagaactcagaagatcctggatggttatgttgtaggcttgatcatgaagatcccagctgcaagcattttcagcatggctatatgagattctatgtgttagaatggttagaaaggtcatgcattttccctctccaaaaagatttaaaggatttgttcctgtgctacatgctggtggaggttgacaatctccactctgagtttttttattatcttctgctactatctcctttatcactaattctttagctccaggagaacagcaactcaaacttgtgtcatgttatttgttaaatctgtatcttagatgaatctttcttctgtgtcaagaccatgggcatattcagaatttcagaccatctcaaacttcctaccatgcattgctaacctattggacattcgatgcttctgctcgttatgcttgaggccttgtttagttcccaaaaattttcaagattccccatcacatcgaatcttgcggcacatgcatggtgcattaaatatacatgaaaacaaaaactaattgcacagcttatctgtaaatcgcgagacgaattttttaagcctagttactccatgattggacaatgtttgtcaaataaaaacaaaagtgctacagtgtcgaaatccaaaattttttgcgaactgaacaaggccacacaagatgccaatttgctttggttatgctttatactacacgaaagtatcttgtattcagacagctgaatagctggnnnnnnnnnnnnnnnnnnnnnnnnnnnnnnnnnnnnnnnnnnnnnnnnnnnnnnnnnnnnnnnnnnnnnnnnnnnnnnnnnnnnnnnnnnnnnnnnnnnnnnnnnnnnnnnnnnnnnnnnnnnnnnnnnnnnnnnnnnnnnnnnnnnnnnnnnnnnnnnnnnnnnnnnnnnnnnnnnnnnnnnnnnnnnnnnnnnnnnnnnnnnnnnnnnnnnnnnnnnnnnnnnnnnnnnnnnnnnnnnnnnnnnnnnnnnnnnnnnnnnnnnnnnnnnnnnnnnnnnnnnnnnnnnnnnnnnnnnnnnnnnnnnnnnnnnnnnnnnnnnnnnnnnnnnnnnnnnnnnnnnnnnnnnnnnnnnnnnnnnnnnnnnnnnnnnnnnnnnnnnnnnnnnnnnnnnnnnnnnnnnnnnnnnnnnnnnnnnnnnnnnnnnnnnnnnnnnnnnnnnnnnnnnncataggattctgtttagctccttatgttccccacatttgggggaggaagtggggtccatttttgtttgccatccaatcttcaggttttttctttccccaaggttgatgtgtaggggaatatccgtttttcccctcccccagtaggatcattttggattttttggcggccccggttatttttttttttttcaggggcatttcaaaattgttttttcagccgatgaagtgttttgttttcctggttacaagccctagggctattaggctactatctttctaaccattatctttgttctatcatatctacgatttttttttttttcaggagcaaagcaagtttttttttaagtttagggaagtattttttttcctttggtcaggcctttgcccaagggatacaatgttatgatttttttagctagggttatcagattaatcgtcctgctgggttttttagtcagtatccgggattaaattgggttttacaattttataagtcagatgggtttccgggtcatccgattccttgcggactaattgggatttttcgcccccttggggggggggggggggggggaggatgaccgcaaacagaatggaataattgctgggctgcatctgggatggcttagaccacttaggctcatgttcagaccagtttacatactgacatgcagcttgcagccaccatcagagatcaccaatgctttccaacccaggagctgatcagcaatgcggtcaataatgggctggacatgttccttggttagtttctttaaggagagggggcaatcctaaatatttgcatgggaagtctttaagtgcacaaggcagcaagttttgtacagctgctgttggggtaattgttgaatacctccacctttgggacttatcagatttttatttgcaaccagctgttgaggatagacatatatggtggcgacagtatttggccaagacaccatatgagggcttatttctggggtctacactttttgggctgtgggaaagagtttggaagacatgggcacgccccaaatgctgcttctttgtatggttggttgctcacaaccgatgttgggcagaggatcgctgtgggctccctcatcccgagtgttgccctctgtgtgaccaggctgctgagaccatttatcacctcttagtcctttgtgttttcgcaagaggattttggttccgtttcatttcacaaatcagactcaagccttctccccgcagcccacagaaacctctttccataatttgtgggaaaaagtgagcagtgctgctagcggcatgataaggcaagtaatcaactatctcatatccttggagcatggactttatggacacaccacaacaggagcaacttttatggtgcagctccaagtattgcaggcgcacttgtaggtgaagatgaacgaaagttgtggtgtttggcaggggcttgaggtatattcctcttgactgcccccgctccaggaggttagagtcctgtttttggtcaaatttagtatcattcacaggcacgaatgtaatcaaagaacagtggaattgccgagtgggtttgagtttagggttgtgttgtttgtgttgtgttgtataggtttttgtcccattttatcttaatatactgatgtgcagctctcctatgttttcaagaaaaaaaaagaaaagaaaaaaagagttatcttatgcttgatttgtactctagaacatataggatataagtatatctttggtatattagtcctggtatataggacgattaggactgaccagggtggtcaacgactaatcacattattcacctggttggtcccatggcgactaggttggactagacgacttgataacattgtttcttattgtgatctttctacccaatgtattggcgtctcctattgtttcatttgttttaaagtgtcatttgatacatctactcatcaatcattgtcttcaccatattctgtcggttcgccttagatatgaatacacatggttttgtatggttgtttctctttacttttccaattgtttctgtttaagagcttaatctatcatgatatgttaggatcaagcttgctgtcatgaattcatgatagatttgggagctgtcctgctgaccgcatgcaaacgttgtcttcattatgggcttgatcttctattgtatgaatgtagacttggtgcaaaactacattaccatcgaaatcagaaggcactgggaatcagttaatgacaatgtggcatgtgcttttctcacagtttgttaggataattctttaagatgtgggctatagttttcttctttatacaaaaatgaaaaagataacaccttttcttcttttgcttgagctactggggtgtaattctagtttgtactgtgttgctgaagttaactgagaagtggtcaaagtaactttagtagcattgtttttttccacaccggtaaaccgaatttcattaccaaggcaacgaaattacaaagtcaacgtttgaaccaaacaaaaacagctaactagagaatcagtttggtaatcatgtgcagtcctatattcctgtgcttcagcattagtttgttttagtgttgattagttatagtgttctatggaagctacagaaaccaatggttggaggctgtcctccactgttatcttgactgaaaagtgttgggtatattgaatttgagtctacattcgaactacaaaattccaaatttggaattttatcagtcgaactcaaagatgtaagttaaaccactatatggatgtcaaatctttaaataattaaatttatttatcttggttgaaatgaatttgagttttgcaattacaagtttagatgcatcattgaacatttaattatatgcttttgcatacgcttttgtgaatgacctggatattttcatattcatgttaaggatgctggccttttaataatactagtttgttaaagaattgccttgaggtttgtgaaggtcttctttaaacatggccccagttctcatgttcatctgtctgacaccctttccctcaagcagtcatgcagaaaggaagtgttctatttccatccagtggaatctctcttaccactgaaatagagaattctcttcccagattagaaaatcctagcaacagataatcaaatcctggttgttttgaaataataagctgtactgcacttaaattatcactggtaacagggtgtagaaactcattgaggaattcaattatatgtccctgagctttgaaactaatgctttcatacatgtgttgatcttttccgttaaattttggttatacgtgatgcttcatgtgtgcatcagatgctgatgcaaatcatactgtaaaatccttctggtgtaccttaaatttcatcatgtgaatgataagattgaaaatgtttgttgttttattcagctagaatattttccttacaagtattctaggtgttctagtattctatggtctaaagcaatttgatggattctttaacattcgcagtcagctagaatgtaatcgctttttgtgaaattgttgcaggaagcggctttttgtcatgattaataacctccctaccatatatgaagttgtcacgggaactgccaagaagcaaaccaaggagaaaactcccaaaagcagcagcaagagcaataaatctggctcaaaagtatgattgactgcatacttctttcaacttttttctttggccataattaacctcctaaattcattccattattctttttgtcactaaacacatgcagccaccacgccagccagaacccaactcaaggggttccaagatgccacctccaaaggatgaggatgatagcggaggcgaggaagaggaggaagaggaagatcatgaaaacacattgtgtggtgcttgtggtgacaactacggacaggatgagttctggatatgctgtgatgcctgtgagacttggttccatggcaagtgtgtcaagatcactcctgccaaggccgagcacatcaagcactacaagtgtccgaactgcagtggtagtagcaagagagcgcgggtgtgatcctgctggatatatccatctctcatgcctgaagaaccaagaatttgacttgctgtaaaacgggtcgaatgcccgatggttatgcatttagttgttgctttcagtttaggaccagctgtagggtcttgatgtgctgtttgttgtatgtcagagacattctagatctattgttagtaactaggaactaactgtagtagcctgtatttcttcaagcttctcccagtgcgcctgtactggactgagaaactgttttagatctaagttgtgcattatgtacgaccgtctactcatgttagtttgttaaaaagttgtgtgctggcattctctgcgtgcatactcatatgaaactctacatctccattaaccatgtttacaagctaattgacatctcgattaaccatgtttacaagctaattgacttcaagtctattttgctcgcacgtcgcacctgccgcctgatggtttgtgtctgcccagttagagtttcccaagtgtatatgccctattctgtgttagattttgagatgtattgctgcgtcatctttccatccggcagcatgcatatctttgcatactttctgaggcagcttatgtatggtgtatgtgggggtttgactttggcagtgctgcagcttgtcaatggaacatagcatacagattggcaggagagaggactgcatcggatcggatgccctgtgtagtttacaggcatatatgcatcgatcacggtctgctttcccgggctctgctttttggttttctgctgtgttcatgtccctgtccagtttgcagcctatcaaagctttatcttccactctgccaacctcgcctttttgacttg

SEQ ID NO: 3425 - DNA, 7090 bp, Sorghum bicolor
accgactagaatcctgcttgatctccacgtcttgtttccttgcgcgaaaccccgagcagtcggatcaagcatcgaacttgtctcgtaatgggccaagcctcctggcccaagtctagccgtgagggtataggggtttatacccccacagctctatcttaacttaattcaatttctcaaagaccaattcagtttcttcttagattaagtagaagaagttaattacctaatttccaaacactaattttgatcaataatcagtttaatcttttctcccacattcaaaagaatgaagtatggatagacttgtatccttctttcgaattttctaaaaggtaaatattttagttttgtttcttttataaccccttaatgtagtcaactatgggttgagtggcatttcaccccctaatcacaattcatccatggattcttgaacatcatttggtttagatctctatttagtttcattcaagctttatcctggtcatggactaggttccggtccataagcggtgacaatttccctacgaagactggcttttgctatgactttgatgggtttcattctcttagacaagccactgcctacgagtcatcgactcattcttccaaagacccatggttagatatcacttttccgtccaatgacttgagagcccaacataatttcacattctatttcactacgtgttgttgttttttcacctttctcgacctcacaatacttgtgatacttctatatgaaaatcgtcactaacatatctatgactgaaaggtcctgtaaacactcgaggggtggatacggtgtctaatcgaaacttaaaatcctagggcgcagctcaaattaagagcctgcttgcttcgcaaccaaattttgccatgccaaagatttggcaaccaaaatttgggtaaaaaagttgccaaagatttggcaatctaaatgtgagaagttggcaagttttgggagccaaccaaatactagccaaaatcatggcttgccaaaatcttggcttagtatattttggaaatgaaccaagtaggccctaaactacctctatagaaagaacataaattactttcgcaagacgtgcacttctggttatttaccctcaacacacaaagaattttgcagtctagagctaatcctatcaactaacctatagctaatctaggaagataaatgtcacacaaggaaaatgcatgctgaagcaataaacgtagtttcccactaaagaatatgaaagatgtaagtcgtgttgttttatctattctgataaagtttcacattttttgtttgactaattagtccgtagtaaaaaaaatgtgaagcggagttgttgctatttattgtttgtggttgctctcttgaggaaagtgatggcataggccataagctgtttatgtgtcatttatgaatgtttaactgagtttattttcataaggtgatgatgtttgaacatgtggtgtacctttggattgttcttagctcatgcttttacatcgctgtttcgaggcaagtaaacgtagcggtggtttgctacagcttgacatgttatttaacctacctacactttatcataacattaactaaatcaaaataatatattctataaataaattcacttatcctttaaagtaacttatatatgatccttttttcaaaaaaaaaacttatatatgatcttcatgttaaatcttttatcatttgtttatcatcatgacgtaagtgatacattttattattgtggagttatataacatgtgtgggaaagaacattagtgatatcttggttttgttttagaaaaaaaaatatttactgatggtaaataaatttgagctgaggaataaaaacccacactagctttccatgggccgcggggtcagtgccgtgccaaaaaggcccacaaattatcggacgcattggaaggcccgcgactgcgccccgcggctgcgcctgcgcgcgtgtgaacaaaacgcaggacaggactgcaggagggctcttttttctttctccgagacgagacgagaccgagagaagtcttctctatctcagcgccgacgcttcccaatttccttccaatcgactccgctcgccgtccccagctctcccctgcgcctccctcccaaaaccctacgccccgcgccctgaccaagctccggcggggacgaatggacggaggagccgccttcccgggcacgccgccggtgccgcgctcgccggaggacgtcttccgggactaccgcgcgcgccaggccggcctgatcagggcgctcaccaccggtaatgctatctcctgcgttcctctctcatctggctccgacctctgtgctgacgacgactgctttcgctgctgcagatgtggagaagttctacgtcatgtgcgacccaggtgagcctgcctgctctgctctgctatgctccccgccgatccggcttgggattcctagggttttggtttttggagggtgcggattcagatgttttatttactagacggatttggagcgtgttcgctttgcagttacggatagcgctctctctctctctctctctctctccaaaaagccgatctgggggtgggggctgcggttactccgctgattttcgagttttttttcccacttgttattaatttacatacggcgttgttcctccgcccattcatcggttctggtgcgccatgggaaggctatttggccgctgccggaattccttgctggtgacagccgctgagctttgctttcggtttcgcgacgttcttgtgctgttcatcttggggtgggaaagcggaaaggcggacgggggaagagggaagagggaatccttatcttctgatgagctggtcgaccgcacggccggccagtcatcgtgaaaagtcgtgcgcctgtcgatttactgttatgctcccggacaacgacctctcccgcaactgtacgaggggcattttcgggatgtttcgtcactgatgatgtctggtagtgggagtgtcaggatagcatttcttttttcctgatccaagtcaacactttggtttcctttcgggaccttgtttacttccaaaaaaaattttacaaaattttttaaattccctgtcacatcgaatctttagacacatacattaagtattaaatatagacagaaataaaaactaattacacagtttggtcgaaattgacgagacgaatcttttgagcctagttagtcggacaatatttatcaaatacaaacgaaaaagctactgtatcgattttgcaaaatattttggaactaaactcggttttgggcaattgcgaacacttcctttccacctgattcaacactcccttatttcccactttgtcaatgcccacctaaatcgatggtgacagaagttggcaaacaaattcatgtaccctggtcgcttataattgtggataaagacctgaaagctttgtctagataagtatacttagctacactctgatttgttttggggcggagggagtatgttggttattaattaatgtcacatttatgattttgtttccggcagatgcgtgggttcaaaatctgtatctgtaccacattaaattgccaacattattagatgcttagcacaggaagttggtgcaaagaggtgtcactggaaatgcaagattagttgctcagtactgatcaaaagttgtgggtgggaaaggcaatcagtgtccatgggcaatagtctttttattggtggttgatatggaactgatttattcatatctagtcatagtccctctttttcatgcttttggtaaaaaaaagtctgcccttttgtgtccctttccctttttcatggaatgttcgatctatatttttttttaagaacgcataggagagatggaatgcttaatgtcatatggtcaatttagtttctcctgttcatcctgtttttattgtgtttacagagtctagctttatgtctcttgattcatttttgtttaaagtgaactattttaggttatagagcctgaaacaacgcaagtacctttattttgagatattattttcttttgtttgcgcagagaaggagaacctatgtttatatggacttcccaatgagacttgggaagtgaacttgcctgctgaggaggtccctcctgaactcccagagccagctctgggaattaattttgctcgtgatggaatgaatgaaaaagattggctatcacttgttgcagtgcatagtgattcttggctaatgtctgttgcattttattttggagcaaggtttggatttgacaaggaagccaggtattccatttgttttattctaatataagattttttctgtttcactgtctataaatgtttcttgccaatagatctccctcaagtatctcatagtttaagaaccagttattgtttcccaggagtattcatttacattttctttttgtgaaacgtttcatagcctagcgtttgtgattctgagtaagcacctccagtgcctggaattgactcccgtgggagcaaatttcagggttggtttaaaaacatccctcgctggcgctgacctatggtaactgtggcagccgtcagcctaggttacggtgtggtgctatagggtctatactgtcaggtttcgggggtttcttggtcagttgaatactaagtttcttcttccaagcaatactgtgggcgtggtctttccctactggccaagtttcttttttttttcaattttcaaaaccaaaatgcaatcactatattattcttatcaaaatccaaagtgagttttgattgagaagcgagtagaaagtgatgggtatagtgataagagagaacgaagaagatggaaaatggtatttgatttcataacccccttcctcccaaactggtatttttttccaacaatatgactgggaaatatgccccattgtccactgggtgggagattactagttgcacatctttttcatggaacaattgcacattccatctgctgctaatgttgttgagcagtcaacttacaactacagaatccttattctagttgatgtcatatagtggcagctgtcagatattttggtgtagtgtcgcttttgaggtcttacttttttctttctgttgttgaagcttagaatatgagcatttcatgtgtccagttacttctgcgttatctctatactagtgttgtgctacattcttcatcttctgggtgctactacgcctctattgttattgattaagtaaagtatgtgtcagctggagcattcaatgcatgattgaagatcagatgttttgtaaacaaagcagtttgcatattcatcattaggaatagtagcattggctgctacattgttttggattaaatctattagatgcaatagtggtttaaataatgctggttattttctcttgtttgacccttgttccataaaaagtttaggaccaattagttggcatcaagtttgcctaagccttttaagaatggccttaaaataccatactgaagtgttttcatgtgtttgacagtaacatgctgtattccattgttactttagcactgtcttaccttttgcatcatattttatatatgtttaatgtcaaattcttgttcctgatgtctcctgaattccatattatagattattagattttggtcaaagccttgtgggactaaattttctttgtataattaaagcagtctgatggagtcaccttctggtggttgccttgcaggaaacgtctcttcaccatgatcaataaccttcccagcatatatgaggttgtcacaggaactgctaagaaagagcccaaagaaaaaactcataaaagcaacaataagactaacaaatctggctcaaaggtatatagttttttttatcacgtagctatattgtttgacatgacaaccagccgcctaactccatgattctcctttgatggctgacgccgaacatttgatgaatacacagccctcgcgccaggcggaacccaacaactcaagggtcccaaagatgccacctccaaaggacgaggaggagagtgaaggggaggaaggggaaccacaggaagaccatgagactgcgctgtgcggcgcatgtggcctaggttatgacgacttctggatctgctgtgacttatgtgagacatggttccacggcaagtgtgtcaagatcaccccggctaaagcggagcacatcaagcagtataagtgcccttcctgcacaggaagcaagagggccaaggcttgattatatctatggtagatctggattgccgacgatgctccaagaactaaggagcctttgacgagagttgtaagctgaatctttcgggtagggcagctaatagatttgagtactttgtttggatactttggtgcttgagatgcctctaaatctagtgtcagtaattacgagtactgaccaactgtaaactgttgtagtttgtgtggccctcaagcatctatgttctgtagtctactgagttgtgtggtttagattccaacttgccatttgtgatgaagcagtcgttttaaagttagatcccaatcatttcctgactacattcgtcgtcatgtaatcgtttttacgcagaatctagcagtaaaggtccggttccaattgtttagggatttgaaaatgctggttaaatttctaactcgttgatgacaaatctttctttcttttgtttctaggagtccatggcgtttgtcatcttaaaatttgctagatacgagaccgagcttcggctcggatggcacaggctcactgtgtgcatcctgcccaccatggtttgaaccgggtgcttgacatgtctatcgtctatggagccatgttggtgctagggagcggtgatctctagaagggcgtgatatttgatcaagggtgtaattttttgatccgtgtgtagttgtaggtctagtaatgcacatgtagtgtgtgtggggtgtgcgtagtgtgagcatgtgtttgtgcataaatagatgctagaggcttcaaaaaaaatgctagatactattatgaaattatgatcatttgttgtaagatagtataacatttattttattgatttcttatgttgagatttaggaagatgttctttttgccctttattcatcc

SEQ ID NO: 3426 - DNA, 6385 bp, Sorghum bicolor
  misc_feature (3844)..(4866): n is a, c, g, or t
ttgaaggggaatcgggttagccatcgaggaagacatgatccggcaaccaaaagatgatgttgttgacgttgtcggaggtaaaagaagcttgaaccgaaattccagatggaggcatcatcgtcgatccaacaccgaagaagtagctgtctaattggaacaaaggtaacaaggaccacacacactatgcatgcactaataagaaggggactagagagccgagagtctctattcgaatgaagacctatagccatgcaagtgagatacgaaagtaataaataaagaaaaataaaaacataaactaggaaggagaaaagatggagatgcacacataaggatgtggtctgagttgggaaccatatcgcgtagcaagcagaccgcatcactagcggggtctcatctcacaggcagtgggtcccacttgtaaggacgcgggccccatagctagttgaggacggcggacgagatctagatctcgagatggagaccagcgcgatggaaacgagtgtgcaggcttcgacggtggagacgggttgtctgaaggcggagacggagcgggtgtcttcacttgggagtaaggggagggcgcggaggagctcgtcggggtggaggacgacggcgctggcggggacgcagcggtggtcgcgggagacggggtcgacgatgggggcgacgatgcggggggtggtggggatggcgtggacggcgtaggcgtgggcgggatgagctccttcggcggcggcgcggacggggtcacggacggcggtgaagtctcgttggccggcttcttctccatctttctccaaggctttatttggctagaggatcttacaaggagaaggaagagaggagtaggagatgaagggagggggccggcccacctatcctgccgccggcgaggacgccgaggaggacaggggaccgacggcggcggagggaggaagaggctgctgggagaggataaggtgaaacacgcactcgacgttatccgcagaaacgcgaataatttataacacatgggttttgagaactaaggcctttacttccaccccaatacaaaaaatttcaagattctccgccacatcaaatctttatacgcatgcatggagtattaaatatagacgaaaataaaaactaattgcacagtttagtcggaattgacgagacgaatcttttgagcctagttagtccatagttgaacaataattagcataaacaaacgaaaatgctaccgtgtttttaattcacaccgcctaaagggcctaaagaggtcgatgaaggcggttagggtcaagccacgcatcgccggagccgacgaccgctcgggttgagtgcgaaggaaacttttcttttgatagatataaatatttgtgcactaaaatgaaaccctttgccttaaaatattgcattcgtccgtgaaaagtcgaggtaggagcatgccatgttcttatttgtttaattaaaaataattgtaaaggtgacgaatgataccctgtactttagagttgttgggttcctttgctttgctttgctttgcttgcggtgtgcttatctttgctggagtgtgctagacaaggcggcatgcatggcgccatggcgggaggaggaaaccgtgcggaggatgcatattcatccattccatgcgatgcgagagtggagaacctgttcgtcggcgtacaatgcggctctgaccgatcgatcacgggtgcgtcagtggaaaatgaccatgcaatgcatgtgcgatgggcgattcctgattccgatcgagggagggagggagggaaagggagggcacgagggtgcggtcgggcactcgggcatggcatcgcatcgcatcgcatcgcgtgcttttcctgccgcagcggctaacgcgtggccacgccatccctcattaaattgggggagtgggactgatagctgcagcacccagcgcccatccatccatccatccatcagcgacaagtccagcccccttgccgccgcctcgccaaatccaccacaccatgagcgccgccgcctccaagaagctcttccaggccgccaggtccctcatcctctccgcttctcagcgctcctccgccgccgccgtcctcgccgccggtatgtatactacactaactcttcagcgggacgggagatgtggtgattggttttattaaaaaaaaaaatccgtctttctttgatgtgatgtgcagagggccgcaccgccgcgctcgccacgctcaccaacttcggcaggaaggccctccccaccgcctactactcctaccacaggcagggatcccaccacgctgcgtcgggatggggagccatcgccgccgcagtcccggctgcaggttcgtatcgtacatactatacccgtcgcgtcgatcctgccgatattccgattcgaccccacccgatcccatcactctgatctagcagtaatcgctcttatctaacacccatcgctctgatcccatagagaatgcttgcctgttgaaatgaatgaattaaaccctgttgccattcgcacactgatttcctgtctgtcctctcccgatgcagtttacatgctccaggaccaggaggctcatgctgcagaggtaccctaccctgattctctcctcttctcgtctcttctttttttttccccatcgcattctggcggatccgtgtggtccaataataccggagcaatggccacccccttttctctctaaaatcaccgcttcaccaatcaccatgctgcctcccctatatgtcaggcaggagggtaggccaactcaaactgattgagtgggctcccatgtgatttgtcatctaattacagaatgccccaccgtttccatctccagttgacatgaccgtggatgagtgatgtcatgtgatctatttaagttttttcccccttttctcaagctcactaacactcatctgctgtgattccagatggagcgcaccttcattgccatcaagcccgacggcgtccaaagaggcctggtcagtactagcaactctcataacaccatagattcttttattcagatgcagttctggatcctaataaccagtatgcatgtatgttgccacaattggtaggtacacactttctttctttacaacttttgaggccttgtgctctgtcctggtcctgtcctgtccttggccatataataataataatgattattattattatttgtagtttcttgagatgcaattcaggatcctagtaacctaatccctatgtttaacacagtgagtgcatagcaaaagctatgcatctagaaaagccaaaacgacctataatttggaatggagggagtagtagcttcatactgcttttcatatactttttttcgaaaacgtgccgaaggctcgtattgctttaaggagaaaaagttcaagaacactcctggggtaaccgtgagcgagatgcaccgggttacaacaggtcacacaaacacaaatcaccggcttgaacggtgcagctgtaggaaaaaactaagcacaaactaaatggcgctacagaagaagaacgcgaggtgtccgctacgcgagcaccgcgaaaagcggcgcgagcttgctgtagccggccaagatgcaggcctcggcctcgttccgaattcgaagcagcacctgggaggtcgattcgtgaattccgtcgaaggttctgcggtttcgttccttccaaagttcccaagacaccagcaaaaccatgccgtcaaagccacgccgaagagccgtgggcaggggcgaagccacctcaaaactaaccctggtgcacactctacaaacataaaggaatgtataaaattgaaagaaatacatggaaatttaaggcaggtataacaactatatttannnnnnnnnnnnnnnnnnnnnnnnnnnnnnnnnnnnnnnnnnnnnnnnnnnnnnnnnnnnnnnnnnnnnnnnnnnnnnnnnnnnnnnnnnnnnnnnnnnnnnnnnnnnnnnnnnnnnnnnnnnnnnnnnnnnnnnnnnnnnnnnnnnnnnnnnnnnnnnnnnnnnnnnnnnnnnnnnnnnnnnnnnnnnnnnnnnnnnnnnnnnnnnnnnnnnnnnnnnnnnnnnnnnnnnnnnnnnnnnnnnnnnnnnnnnnnnnnnnnnnnnnnnnnnnnnnnnnnnnnnnnnnnnnnnnnnnnnnnnnnnnnnnnnnnnnnnnnnnnnnnnnnnnnnnnnnnnnnnnnnnnnnnnnnnnnnnnnnnnnnnnnnnnnnnnnnnnnnnnnnnnnnnnnnnnnnnnnnnnnnnnnnnnnnnnnnnnnnnnnnnnnnnnnnnnnnnnnnnnnnnnnnnnnnnnnnnnnnnnnnnnnnnnnnnnnnnnnnnnnnnnnnnnnnnnnnnnnnnnnnnnnnnnnnnnnnnnnnnnnnnnnnnnnnnnnnnnnnnnnnnnnnnnnnnnnnnnnnnnnnnnnnnnnnnnnnnnnnnnnnnnnnnnnnnnnnnnnnnnnnnnnnnnnnnnnnnnnnnnnnnnnnnnnnnnnnnnnnnnnnnnnnnnnnnnnnnnnnnnnnnnnnnnnnnnnnnnnnnnnnnnnnnnnnnnnnnnnnnnnnnnnnnnnnnnnnnnnnnnnnnnnnnnnnnnnnnnnnnnnnnnnnnnnnnnnnnnnnnnnnnnnnnnnnnnnnnnnnnnnnnnnnnnnnnnnnnnnnnnnnnnnnnnnnnnnnnnnnnnnnnnnnnnnnnnnnnnnnnnnnnnnnnnnnnnnnnnnnnnnnnnnnnnnnnnnnnnnnnnnnnnnnnnnnnnnnnnnnnnnnnnnnnnnnnnnnnnnnnnnnnnnnnnnnnnnnnnnnnnnnnnnnnnnnnnnnnnnnnnnnnnnnnnnnnnnnnnnnnnnnnnnnnnnnnnnnnnnnnnnnnnnnnnnnnnnnnnnnnnnnngttgccatcaagctgattgttccatccaaagaattcgctcagaagcactaccatgatctcaaggaaaggcctttcttcaacgggttgtgtgactttctcagctctggccctgtacttgcaatggtaacatccgtcatttccctacagaaattgtgcttacattgacaaaaggtgaattgtgcataagttggtggtacaatgtctgtaggtttgggaaggagagggtgtcatcaagtatgggagaaaactaattggtgccacagacccacagaaatctgaaccaggaaccatcaggggtgatcttgccgttgttgttggaaggtatgctttcattttcttttaaatgtactctttagttttgcatttctttgatagcatcatgcaagcacaagtttggattcctttgtattcacatgctaccacgtgttgtgaacactagaaacatcattcatggaagtgatggcccggagacagcaaaggatgagatcgctttatggtttgaacccaaggagctggtctcttataccagcaatgaggagaagtggatctatggggtgaattaaccggcgagtctttttttttttgctcttttttgctcaattttcacataattgcctgacagaccaaggcaggatgtaataaagtcgctaccgtcactttttggttggattgtgattgtgaccttctggtgcagtaaggcacaaggaaggtgaggaaaggaatataccgtgaaatatagagcgtgcactgagtagtcgtgatgttcaaatcaaactatatatcaccttcactggagtcatgtaatccaagatggcgatgtagatgtttctttggaattatttctacatatccctaccatgatgatggcccaccgtctgtttttgctcttgtttttgggtgggagggtagatattattctggagttatgggattttttgacaacagagttatgggattagacattatttgtgaatctattatacaaatcccagccaccatgatggctcacttctatttttgctcttgtttttgggtgaaagggtagatattattatggagctatgggattagacatgtggtgagactttggatctattctacaaatcactaccatcatggtagcttacgggctttctgctcttgttttggggtgagggtacataatattattattctggagctatgggattagacattatttctggtgagactttgatggacagaataccatcatgagcatcgaaaccatattcatttgtcgtacccaagtcggttttccctttccttggtggttggaatctccgttcctttcaccacccctgggtatgcgagcaatattcagtgtcttctagcctggatgttcatggctagctcgaggagtgcaatgctaagagccagattcagatgagatatataataacatgccaagcaagaggggagctgagttttattgccatgcctttgtacaggggctagactaccactttcagctcttcactcccttgcaccaaaggaccgg

SEQ ID NO: 3427 - DNA, 4153 bp, Sorghum bicolor
actcacctgcaatgcctcaatgtttcctatgtcgtgtacaatttggtatgattggtatgtctgataatgctttgagaagaagtgatcaacatagcacccataagttccatgatctggacatgttggaattcctcgaaccaaaatggtgtattgatcatgtcttttgtagtgatgcttcaagtgctcaattcttctcatagtaatttctctgtattcctgcttcaaatcaaactgaagatttcaatgacaccatccggattatccttgcttcaacaatgtagtaactaatgaataatgatgaaccaacacttctctaaccaaatcgcctagtgacctttctagttaatgtggaggctacacttctcagcgatggacagcaatttctgctttgagattccaattgctggtataatattaaatagataccaaccctaatcccatgctaccaaattacttttttcttaattttaaaacggaaacttcagggtttttcagttctccgtatgaaggatagaatagctatacatactaacaacaaggagattggttaagcatttgttgggccttaagcatgatactgacaatacctttcaagaaacagaaaaaagaacaagtggattgattgagaagtttccaaaatcacttaccttatgaagcaaatatatcacataaaaggatataaaacaaaggcatgaaaaatgcacccaaagcctgtcaaccacaacataaattatttctgttacaagatcaacaccattttcacctggtaggcaatagctttcaaactctgattttttccaacttattaacatgattgtagctacattagcataaactaaaacaccattttcatataatcggagagcaaattacagtgacctgcttttcttggtttagcattgctcaatatatgaactgaaaacatactcaaactgaatagttcaaggaacatcgcaagagtgaaagtgaaaatattcagactagatccaacctgttagatccccgtgtcacattggtaaccgtgaatagttccatggaattcgatcttctgatgtcagctcgaccttcactagtataatttgttggagcaaggatcagtaatccaacaatcgagcaaacactgaaacacttgatcctacacatcgaaggatgagacatcaaccagatttattattatacagtcataacgagagaacatcagttgttggtgaaaatgcgtgtcaccaactcttctatcacgcggtcgtcacgtacccaaacttgaagaggcggacgacgacgagcgcgtcgaggccatggcgccgcagcacgtcttcttcggagagccggaaggccgcgcagatccaccgaaacgacggcgttagtcgcccgtggccgagcggcagcaagccaccaccagcaccaagatcgccggtcgccatccggcggggacggtaaacgggcgcgttccccggctgcttcttgagcagggagaagagcgaaagcgccaccagcgccagccccaggttgatcgcagccgacgccagcaacccctccgcgtccattcttctccgttctcacagcctcacaggctcacaggcacagctgatcctacgctgcacggcaccagactgagcgagggcactgcgctagtagcagcggaggatcagcctcccgccggtggagtctggttggtgcgttggtcgattgcgggcggcgacgtggtggccggaggagcctcgatcgacacgtggcatagccggagcacgacgcgttcggttggcgccgccgcaaccccattcctgcaatcgcatgggtattgccacaacttagcccacctgtcaaggcccacggggtatgctttaatgggccctccccttgtgctctgggctacccggcccggatcggcccgtttcatcttgtgatgaggcggggaaggcgacacgccgagctcgaggcgacaaacaccagcatcacaagacaggaggagaaaggagaggttggtggcggctggtggggcgatggcagcgcctgcggcggagggggcggccgtgtcggccgcggcggcgctgcgagccgtgctggcgcgggcggggatggcggcggagcggtcggggcgcgccgcggaggcggtccgggtggtggcggtggggaagaccaagcccgtttcgatgctgcagcagctctacgacgcgggccaccgctgcttcggcgagaactacgtgcaggagttcgtcaccaaggctccccaggtcctgatctttgtctccagctcgattgcgtcgtttgctctgtaacttcgcacttgcagagcacccatcgcgtggaaatggagtgaaatgacttgcttgatcttaccgtgtttgcagcttccggaagatgtccggtggcactttatcgggcacctgcagagcaacaaagtgaaaccgctgttaggtatgcttatatgtttcaattgtatgcacgattaaagaataagttagccagcatcaacaaagttatagacgtccttcaagaagaaaaagctggtttgttcacaagtagttagaaactgaagttctcaatgttatgatgattattatttagtgcttgccacttgcgtcacctttttttctcagctgctgttccaaatcttgatatggttgagggtgtagataatgaaaaggtaagcagtcgatcaggttcttgtacctgttacctgcgattgtggatttctttattaacacacagaatccacatttttcagattgctaaccacctagatcgagctgtcaacagtttgggaagagagcctttgaaagttctggttcaagtgaacactagtggagaagaatgtaagtgcagaatcaatattgataaatcagaactcttattttttgattaatttacccagataaagcacttgtgctatttgtttcctcatttgccttgatctgattcattttgcaattaattttgctatatcagaagtcagtttattacttcagaagcataccttaacgtacaagtgaacttatgaccaatttcaaatcattatcattctgcaatgttcacattcatctttcatataattagcttacctcgcaacagcgtattcatggactgaacattttattttgtttagctaaatccggaattgatccctccaaatgtgtcgaccttgctaagcatgtgaaactagcatgcccacacctaatattttcaggtctgatgacaataggaatgaaagactactcttcaacaccagaaaattttaaggtgcttatccagtcttactccatcacaaacaactacgaccattttgtcttggctttcataagctgttgttttgagtgctttgaatacaggcattggtaaattgtaagcttgaagtttgcaaggcccttgacataccaacagaacagtttgaactctccatgggaatgtctggtgactttgagcaagcggtttgtaatataaccattcattgtttgcataggaacattaaagcaataccacagaattttggtttttttttagagttcacagaatttcggtttttagactctataggactctttggacatccattaactactgttaactctatgcagatagagatgggcagcacgaatgtgaggattggatcaaccatctttggaccaagggagtatccaaacaaaaagcagaattagtgagattcaacgcataagcatcatctgaatacccaatcctctgattaaccatttgaatttgtacgcatgatgccatgtaaatgcagatgtgaataggtagcatatacaactgacaactccatacaacgttgtaaaggaaaatttgagacatgataatactttccatctctgcatgactgctgctcacctgctgatttcagtcacgcctccctcacctcatttgtcgaatctcccctagtatttttttccctatctttccagtcatgtttccttgttgatttgtactgcttaccaaacgcggtagagcacttgacacctttttcagatataaaggaaaaataatctgatctctgcattcacatgtgaaatgtacattaaaaaacacaaactgttattcttgtggtttgtaaagaacgaggaggcaaggattttatgctagagacagacaattggcatttggcaaccgtcgcgtggccacctcgaggtccaggaacgccatg

SEQ ID NO: 3428 - DNA, 8206 bp, Sorghum bicolor
ttgtccaacgaaaatggcacatataagtagagcagtacgaaaataggcagtcgatcatgtagcgctagatctagttatttctctctccttcgaataaatccagatctagatcttgacaaaaaaagcaccaaatcataaaaaagagaggattgagggcttgagagtgaaaatcaacctcttgtgttgcccccttcaacaaaggcaatggcaaaacctctctccctagaaaatggcattttagggtttgaggtcgaaaacctaaaaaatggaggagcagccatgaaaaagaagggtgatgcggctacatttatagcgcagacttaactgaggctggtattgtagagaaaccaccatggttaatcgtctgttagccgaggcggttgccctaacacaattgtctcggttaataattattaaccgcggtggttaatggttttcttagggtaaccgtctcggttattctattaaccgtggtgattttttaaagcgcccacctgagttaaagattaactaatcgaggcgggcaaccaggtcacccgcctaggagtccaaatgccaaacgttgtgtgaatgattttgtgtagtgaggttaaagctagaaaaaaaatcctataacgtaattggagttgtgtctgattaaagcagaagcttaccagacatgtcctaagttggtttgccctcctcgcaatttctgatgtagggtaattatactccaacaactacacaatacatgctatgatttctttcgttttcatgacagagccggcaagccacgtgtcgatgatccaacacaacacagcacacagcacaggctcgtatggccttctggaactagaagacggcgtgctttgatcattattttcagtattatgttatagtattgaaatagtacttttctttcgtaacaaataaatcaggtatgagtatcacagtaacttttttcagtcatccgacacaattttttctcaggtagttcttgcctctaggatatttggtatgatttctctagctcctttgccaaaaactgttgtcagagctagagccatgcttaacgtacccttaaaaccgttgtgtcggttcctaaaatgatcttcgttgacgtcacatgtcaggtgacacggacacagatatatagcagagcgttcgacgggccccgagggacgaggagacgacgatacatggccggcgttgtgccgccggcgaaaaactaataatacccataataattaataaggaaaaaaaagctggataaagggggcatattcgaggcatatatatgagaggtgcccgtggaaacgtgtgccaatgccatgcacgcagctttgcatcgcgttgccctcgcgacgccgccgtccgcgagccacttgtggcgccgcaattgatcgatcgcctcaccgtcgccggtcatccgcaccaccacatcggcattgccgctgaaaatccctttcgctttattcctctcctcccatcgccgacggtatatatataaatttcagtatcgttcagtatccgtgtttcagtattgttcagtatttcgtggtcctgagtgtagtgttggatgataacgaacgatgttcagtattgctcagtattttttctgctcaattttggcttacggtgtagaataatattctacacctagggtgtagaatagcgttgccgtatatatatatatatatatataaatgcccaagaatcctacggccaccgcaaaaaaaaaacagaggaaatattccatgtcactatgaaaataaagatttatacatcactttttcaaattttaattggatatggatttatctctttaaaaaaaattcggcgaaaacaacatgctctctgctccacgctataatagcacagatgccctgctttccctcctcgacgccagcaaagagggaggagctgcaccgtgagtgttgagcacttcagctgagtccggcaccgccaccgccgcggtcgccgccgcggcgaggaggaggagcaggggaggcgcggcgatcatggcggcggcggggaacgagtggatcaacgggtacctggaggcgatcctggacgcgggctcgaggctgcgcgggcagcggcagggctatggcggcggcgccggcgcggcgccgccgccgctgacgacggccgcgctgccgaggctgctggcggaggccggcggccatcaggctgccgcggcgtacagccccacgcgctacttcgtggaggaggtggtgagccgcttcgacgaccgggacctccacaagacgtggaccaaggtgcgtgtgcgttgcgtacgccggcgctggcgctggcggcgagccgatcgtccgccgccggtcgaccggtgtccccgatcatcgtcccatgagtctcatgatgagcagctagcggtgatggattcttggctgctccttaattcaggttgtggcgacgcgcaacagccaggagcggagcaaccggctggagaacctgtgctggaggatctggcacgtcgcaaggaagacgaagcaggtgcgtactactacgtatattgtctttctcgttcggagattggcacgtctctctggacatggcgcctgctctgttttcttaagacttcttcgctgcgagttcttcttcgtctgcgtttctcctccatccaatccaaaacacacaaagatgatcgtcgtcatcggtttcgcagctaacctggaccatagggcacctggcgcctgcctccgattatcaactgtttcctttttcttttttttttcatgattgattgacacggcacatctcgttatcaggagaggagttccaagccatgccctgcactgcacatataccctttcctcattcaaattggctgaaaagccataatgctgaatggcaagcggaacagggttactactactgtactagtctgttaccaccggccaccggccagagacatcgaagtccggatttgcgtaaataagcatcactttcctacgtactcccttcattctaatttaagtcaatttaagaattttgcagaatcaaagtccggaacaaagtttaattaaaattatagaaaaaaaaatacatttgtaacataaaatgagtatattataaaaaaagtatttaagggaaaatctaatgatacttactccctccgtccacgaaagagtcaatttctagagtcgtcctaagtcaaactttttatactttgaccaaattttttagaaaaaataatgctaagatttatagtattaaattggtattattagattcatcataaaatattttttcatatgatgcgcatttttatgtcattgatgttgttacttttttctataaagttagttaaacttaaaaaagtttaactgatataaattctaaaaattaattcttttgtgaacagagggagtagttgatattatcataattattgttgtattatataaatttgattaaaattaaaatagtttgattttccaaaattcttaaaatgagttctaatttgagatggagggagtgccgtagatacactagtaagtcgctcgaacacagtgacggaagctcaattttctggtgcagttgttaccgcgactgcaaaactgttcaccgccgtagcgattatgttcgccggatataccattgatttctgcagcagttgattttggcccgttcatcaaggaaatggacggtccacgttgcgtcgtgtggtccatcccgtagccgtgtccgaatctgaggattccttgcgactctagtagtagattcgtaaaaaatgcgctgaactgaaaacacggtggtaggatttcacctttttttttttttgtgtgtgtaactgcacgatcgatcgagcaggtggagtgggagtactcgcggcagctggcgcggcggcgcctggagcaggagcaaggcagccgggaggtcgccgaggagctctcggagggcgagaccaccaaggccgacgccggccagcagcaaccgcaagcaggcctgtcggtggcgaggatcggctccgaggcccggatcgtgtcggacgacgaggacgacgacggcaaggacggcgacaggaacctctacatcgtgctcatcaggtacattaatactaataccccggctggccatgtgacgcgttcctgtcacacgacacgaatttttttttgttcactctaagataagatttgggtgggctgcttttgttgcagcattcacgggctggtacgtggcgagaacatggagctcggccgtgactctgacaccgggggccaggtcagtctcaaacattcctttccccttgtgattttcccctgcacccagtttgtaaatagaatgagtgaattttcgaatggccgctacacgtacctgtgcgtctggtcccgtccagaatcttatcccgggattccatccgggaattgtcaagtccggtccagatgttgacacgtctggtgctgctggacggtagtgttagtgaccttacctgaactgagctgatctgtaccaagttttaccctttattaaagtttaaccatccttttttcgtgcgtttcactgacgtccaggtgaagtacgtggtggagctggcgcgggcgctggcggccaccgccggcgtgcaccgcgtggacctgctgacgcgccagatctcctgcccggacgtcgactggacctacggcgagcccgtcgagatgatcacccatcaccacgccgacgacggcgacctcggcagcggcgggggagcctacatcgtgcggctgccgtgcgggccccgcgacaagtacctccccaaggagtccctgtggccgcacatcccggagttcgtggaccgcgcgctggcgcacgtcaccaacgtcgcccgcgcgctcggcgaccagctgcaccccgacgccgtcgccggcgcgggctccccgccgccggtgtggccgtacgtgatccacgggcactacgcggacgcggcggaggtggcggcgcacctggcgagcgcgctgaacgtgcccatggtgatgacgggccactccctggggcggaacaagctggagcagctgctgaagctgggccgcatgccgcgcgccgagatccagggcacgtaccggatcgcgcgccgcgtcgaggccgaggagaccggcctcgacgccgccgaagtggtggtcaccagcaccaagcaggagatcgaggagcagtggggcctctacgacggcttcgacctcatggtggagcgcaagctccgggtgcgccggcgccgcggcgtcagctgcctcggacgctacatgccgcggatggtcgtcatcccgccaggcatggacttcagctacgtcgacacgcaggacctcgccgccgacggcggcggcgacgccgaccttcagatgatcatcagcagcagctccaagaagccattgcctcccatctggtcggaggtgctgaggttcttcgccaacccgcacaagcccatgatcctggcgctgtcgaggccggacccgaagaagaacgtcaccacgctgctcaaggcctacggcgagagccgccacctccgcgagcttgcaaaccttgtaagaactaagaacccagcttgccgattggtaatggttctgtcgttctgaccaagctctgcttgctgaaattgcgatgctgcagacgctgatactggggaacagggatgacatcgaggagatgtccggcggcgccgccactgttctgacggcagtgctcaagctcatcgaccgctacgacctctacggctgcgtcgcctaccctaagcaccacaagcagaccgacgtgccgcacatttaccgcctcgccgccaagaccaagggagtgttcattaatcctgcactcgtggagccattcggcctcaccctgatcgaggtaagagtctcctgacaccgtcaatgcaagcttcagtttcagaaaaaaattgattgattgatctgatcattttcttcttcagtgagtttttttggtttgttgttcaatggaattcattcacatcttgtgcaggctgctgcgtatggtctgcccgtggtggccaccaagaacggcgggccggtggacatcatcaaggcgctgcacaacgggctgctggtggacccgcacgacgcggcggcgatcacggaggcgctgctgagcctgctggccgacaaggcgcggtggggcgagtgccggcggaacggcctccgcaacatccaccgcttctcgtggccgcaccactgccgcctctacctctcccacgtggcggccaactgcgaccacccggcgccgcaccagctgctccgcgtgcccgccagcccgcgcgccgccgcggcggcggccgagcggagcaccgacggctcgctctcggactcgctccgcggcctgtccatctccatcgatgcctcgcacgacctcaaggccgcctgggccgggaccggggccggccgggactcacgtcgcggccgccatcatggacgcgctcagtcgccgggcctgctccccacgtatacgactcggccgccgactacgagggcagcgatcgggaacgctccggggcggcggcagagcctcctcgtcctcgccgtcgactgctataacggagacggcacaccggacgccgaccggatgaagaaggccgtcgacctcgcgctgtcggcggcggcggcggcaggtgggcggctcgggtgcgtgctgtcgaccgggatgaccatcgcggaggccgcggaagcgctcggcgcgtgcggcgccgacccggccgccttcgacgcgctcatctgcagcagcggcgcggagctctgctacccgtggagggacgtcgccgccgcggacgaagagtacgcggggcacgtggcgttccggtggcccggcgaccacgtgcgcgccgccgtgccgaggctcgggaaggccgagggcgcgaaggaggccgacctcgccgtcgatgaggccgcctgctccgtgcactgccacgcctacgccgtcgcgggcgcgtccaaggtgacgggacggccgttttcttgggcatctcgatcgtctatgtctcccgtcttccatatattcttccatggcaacgacggcggatttacgagctccgtcgtctccggatgatcccgcaggtgaagaaggtggactcgatccggcagtcgctgcgcatgcgcgggttccggtgcaacctcgtgtacacgcgcgcgtgcacgcgcctcaacgtgatcccgctctcggcgtcgcggccgcgcgcgctcaggtgacagacaatggctggcatctcccactcatctcatcgtcaggccacggacgcgccatggctggctcagtgcgggcatggccatgcatggccatggccatttctgagcgtctctgtatgttgctgtgtgtgcaggtacctgtcgatacagtggggcatcgacctggacaaggtggccgtgctggtgggcgacaagggcgacacggaccgggagcgggtgctcccgggcctgcacaggacgctggtcctgccggagctagttagccacggcagcgaggagctgcgccgcgacgaagacgggtttctggcggaggacgtcgtcgccatggactccccgaacatcctcaccctcgccgagtaccaggcggcggccgacatcctcaaggctatctgagagtccgagatatttgtctgtatcatacatgcatgctctgctctgctccgaccttccagctgttggtttcgttggttctacccacaccacactctgctggggttatttttggacggccagttaaattttcacagaaagtgactgcaaactttttgcatactaaatttccttcccctcttcttttcattttttgtgccggtgtataatcggtagcgacagaaaacagggctgcatctttcatcttatctcctacttcttgccactattaattttagaatagaatggtaaaaaaaagggacacaaaataaaatcaagttagctgatgaaacaaaactctgcaactctggctaaacataataatctccttactacaattcttgcaacaaaagaggcccacccggcatggccacatcaccaatatttctcggtcttcgaatatggctcacgaatggtctaaatcatgctctccttggtctttttacaaaaaggccctcaatctttagtgcaatcaacccgcaatccatatctcctctcagttcttttaaacaaaacctcaaattttatcaaaatcaatccgcaatctacgccttataaatagccggcctgactcccgcttaggccgtatatcgcggacctaggccttactaggccaa

SEQ ID NO: 3429 - DNA, 5279 bp, Sorghum bicolor
acgacgaggacagcgtgcgaagacggaagcgtcggcgtcttctcacgtcgcagcggcgcctgtcgtgagctcgagcgcgcgcactagggggctagggcctggttgcttggctgagcaagcgtttcccctcaatccctcattgctgcgcgttgcgcacctccaacgcgcactgcgactggaataagggcacgagggacgccggctccgccaccggagccgacagcgccgggtgccgccaccccgcgccgaccgcgggcgacggcggcctgggggacatgtcgtgcgcctggcgctccccgctgccgccgtgccgggcggcgccacgctgctgctgctcggcaccgctcctgccctcggccagctggtcccctcccccctccttcctggcggcggcccccgcctggtccgcctcccagaccggcaccgtgggcgacacgacgagcggcgacaggagcgggatcggcgccctcccgtcgccccacactgcgggcgccgcccccgtccccgtccccgcaccggcggcggcggcctgctccagctgcagcgacgccggcgcatgcttctggagacggctcggcggccgtttcttgcatccggagcccgagccggacatcttcatctccatcgactgatgctgagcaggtggattattgattcgctttccgcgcgatcccctttctcgcggcgactcgctgatctctcgtacgtctgcccggctggcttccgcagggaactgccgtagggtagtctctcctacatgcgtgcatgcggcgctcgtgggatggctctcctatatgcctataaagggcggagcggtggcgagtgggtggccgggtttggaggagacgggggcggcgtggacggtggggagggatcggtgcgggcgtgcggcagttcccttgtaacgctcgcttgcttcctgcaaccgtctcccagcgagatgcctgcggtcagtttctgacttcaggctctgatcggattgggatcggcgaccgtcttgggatatgtggtcgtagactcgatttgatcccctcgttttctttaaaaaatccttcacctgtcacgtcacttggggttggggttgggttcggtgcttcgccgacggcgtttattgaagttttggcacgtcaaaactcggccgcattacaaatagttgggatcgtacgactgatgagtgataaacgttattagttcattgaacggacagtacagcagaagaggtcacagtaaaaaattctgggattggacggcaaggttgattatgttaataacaagtgcttatgtttattttaacaattcttcaccgatacttttacacgtttttttccttgcaaaaataggtacactagacacacacacacacaacaaaaaaccccaactccatagacgaacttggagaatgcgtctgggcgtcgtcaatgtcgtcgcgatgaacaagagagatacatgcattgttgtctccgttgcttttcgcgtatatacgctacctgttccctcttgctcggaaatgcatcgtgattaatcaaagcacggaatggtccatatctcaaagcttcttatggtgtaacactaacataaacgtttatttgtgcaactggatgccttgcgaaaggtgtcttcataaataataaagctgggactaaatccctaacaaacagtggcctgaaaacgcgcaattgcacgttctcggggataaaaaaaaaaacagtggcccttttcggcccggcccacttcgtggccggcggctgggtagccgtggaggtggccgcttccttttccgcacgattccgtcccccaccctctcttatccgctttcctcctcccgcttctctcctttcccgcagcctcaccgcggtcctgctcctccacgcgttcactttcaacgcgacgccgcagagcagggagtcccaaactcctgagctaggaaagtaggaatgcgtcatttggccgcgacctctgcgacgcgcattcgttgagaaaccgccgacgaactaccgtcgatggcgttcctcgcgcctccgcagttcaagtggctcccttccgcccgcgcggccgtgttcagggagccctccggcggcgcaggatcccgccccagtcggataaactgctctttctcctccacggcagtcgccgatgcagagctatccgtcgagccgccgccttctcctcaccgaacccttccggtaacgtctgcctccatctcgtcggtctgactcagctgttaagcctgtaactgcaagtttcaattcgggctgcactggcaaatttctaaattgttcgtctcagggatgtttcggtgaggcgcttctcaacaaggaggccatggtggcggctgcggccgcggaagccgtcgctctggctcgagcagcggccgaagtcgccggagaagtcgcccggatggcgcaaaaggaccacccggcggacttaccgcggcgtgatgacacgggggacagcttcttgtcaagagaggtcctccgcaccgaggtggggttgttggaggcgaggcgcgccgggctcgaattgctggagggcgaagagttcagcagcatcttcagcgacgaatccgaggatgatgatgatgatgacagcgggcatagcatagccgtggcggtgaagtcggcgcggcggaccgagagaaaggctcggagagtgagggcagcgatgaaggcggctaagtgtttcagcagcaggaatgctgttggagcgtcctccacgaggaagaagcggttgaagggttgccagactcctctcgggtgcttctataagatgaccggcccgaggcttctgacggcggaacaagaagtcgagttctcagaaggcattcaggtacgacgactaacaaatttaagcttatttgtgattttgtggtgctatgcggattgcggagacatattagtagtagattattgagtaaattaaaatgcaccgtgcctccctaaacttttcccacattctcaaaatgatgctccttcaacttctaaaatgagccattctacttacttcgatggaatgcagggttcctgtcactttctttttttaaaaaagagatccatttcaagtttactttagttccagtcacagtcatggacttgaattctaacttcaaacgaaccacttataaaaagttgaaggaccagatgatcactttgagtttatggaccagatgagaatgtgggaaaagtttgcggacacatgatgcatttcagtcttagattattgagaggttgcaatagtatctgcgtgtcctgtgctaagtaacgaagatagtgaaatgcacaatgttggcatgttgcagcgcagctctgttcaacttaaatcataaccaaactgcacattgcacacatgatagcttgtgttcttgtgttttatgcgaatttatatagccaaaatttagtgtgctcttcttcctcttggtggcatcaaccatcaccattcgtcaaccaattcaccatttcgtcaggtgtttctgctaggtaccacttaccattgtcctattggtaccatcacgttgaacttatcatgcatgccacaatgaatgtatgcaggacctcctgaaactggaagccatccaaaaggaggttgcacaatataatggcggtgagccaacattttcccagtgggcggcagcagctggaacagatgagaacactctgcggagacgcctgaatcatggggtttactgcaagaacaggatggtgaaatctaacgtgcgacttgtaatctcaattgcaaaagaacatgaaggccctggaatggagttttctgatcttattcaggtgctgtacatgtgctcttcctgaaataagattattgctttaattgtattattacaattctcatttcgttgtcttcatggcaggaagggatgcaagggctgataagaggcgcagaaaagtttgatgcttcaaagggttttaggttctccacttactctcattggtggatcaaacaagcaatacgcaagtccgttttagaacaaacccagataattcgcctgccggtatgtcctcttcctccctgtactttcaccatttgaatttcttgatattcggtgaaggcagcggtgacgatgatggtaccaacatgctaatgctgcattctgttacctggcattatgcgagaccaaatttatgtcgcaatattgtacccaaaaattaatttctttctctgttatgtaggcacatatggccgaagcaagttcccgagtgaaggaatgctgccggcgactccgtcgtgagttgaaacggctacccagcaacgaagagattgcggtggacactggcatgacgatccggcgggtggaggcagccatgagcctcccaaaatacagcgtgtccttcacgagcaaggtcgggtgcacggacgtcacataccaggtttgttcgtcccttcatgcatgtagacgctacacggtggagcatcccaataatggcgactgaatctaaactaatgaacggcctccgcttcgcttcgtcgacctggcaggagatcatgccggacacgagcgccgagacggccgaggaggtgctgcaccggtggctgatgaagaaggacgtgaacacggcgctggagagcctgagcccgcgcgagaagctggtgatgcggtaccggttcggcatcgagggcgggcggcccaggaccctgcacgacatcgggcagatcatgggggtgagccgggagcggatccggcagatcgagctgggcgcgttccggaagctgcggagcaagaagagggtgcagtcgctgcagcactacctgcagccggcggagagctggtagctagcctagccatgtcgatcagcactacccgcatcgttgcacacggctggctttccgtgacgattcgtatatactcgtatgtatgtacaccgttctttttgtaggatttaacgtatacacgttcgatccatttcgttgtccatgttctagtactaagtgtataaagaagctgaaacatttttttaacgcaaaaatacaagaattgtgtttcagtaaataacaacgtgtggtgtgaagccagccgtttctgtactgtgctgtgcaccacacgtatgcccaacccggatgcacacactgaaattctcttccaagtcacggaatcagcaacgagcaggttttgcagctggttctggtaataataataatcaaataaaggcaccaaaaacagcatcagaaaagaaagaaaaagggaaaggaagaaaaaaagcccatcaagtgagcgttcaaaccgcagcgctttccgcaagccgcatcacgggccgccgtgtgaggtatccacg

SEQ ID NO: 3430 - DNA, 3322 bp, Sorghum bicolor
ccagcttggttgattaaagcgcggttgatggcactatcaaccatctcttgaagtttaccaggattagcttcaaaagtaacctgccgaggcgttggcagtgcatccttttagatcacttcgccgctcctgtttatgctgaaggatctcaggcactgctgcttgtaatcctccatggctttagcaatagcttgcttctgctcatccttgagattggcttccgtcacggggatgacgttctcttgatcaaactcagaagtcgacatgttgatcttgatcttgaatctgtcccaccgagcgtgccaaaagatgtgttgatgcaaaagcggatctgcaaacacaaagggctaatacccgattcaaacgttaaggtgtgccagccgatttgaccttactatcggcaaaggtagtaactcgaatactttggtcctgacaacagcgatgcgcccggatgtcacggccaagaggtactcacgcggaactcgagaatacgccgaacttaagtcgacgaattcctaagaactcgtagtaaaaaggaaaatatgacgaagtcgtccaaaaaagtagatgctggaatatgagtaaaaacttgtgtttgattagattctctgattacaagaccctagggtctacatttataccctgctcaaagagctacaaccagacacgactagaattcgaattccaaatttaaacagaatccgtgtacaaaacgacttaaataactaaggaaaacataaaactatcctgccgcgacaaactaggacacttctaccgatcaatcggcaaccttcatgctctccttccacatcatcggcagacctccttatcgtagccatcgggacaagttaataatggccatcggcacaaacacaccgccacctatgaacttagccatattcggctatcccttcatcagcaaccatcctcatcggcaactcatcctgtagaccaaacactgctgtcttgtcttgccgacctgcattctaccgatcatggacacgtgcccaaaaacggtgtcaacaaaaacagtccaacttgacaacttcaggcccaagcatccgacgcccatgggctcttcatgactttgctttgcctcaaggtttgccatgaccccactgcctcctcctattcctaccagaactccaaccatgttttgaggcctaaacccaaaaactaccgagccgatggtttttaggcccaaaccactaaaccacctagtagagaagtgtatctgctatgtctcctccatgatcttgacatgtgttaactatcgtccttagctgcccaatcaccaaataagccctcttgcacctccgcttgactcgatcaacactgtctattcctggtcatgtgttcttgcctgttgatgtcctcaagtgtcagtccaccacggtcattttttcggccattttgatccctcggctgaagcctcatgtccgttcttcaccgctcctagtctattgacacgacacgtcactacttgagcttctccatgttcatcgaccgtgttcgtgctccacaccaacacaactaaaagacatgttgtgcacgcagtcacgcaatgattagtccctaaactcttgacaatcactcattacaaactcaacagacaagagcacatattaagcttgtgtttagagctaatagcaaggttagttttaaaatacaatatttttaagatatactatagtattaatgatatgactgcgggatccatacctggttatctatgtgtgggagcctgtgagcggagctaagtttgggcttgctagatctagaggaatgcttgaatgccgcgtttccactccgcatgagtgaagaggtatttgctcgccggagttatatatttatgccaaaggtgaataaatatatgttgcctccaacctacttggttgggtaatacacaaacatccaacatacacagctagttgattcctatttaataacaaccccaccttacaagcacagagaagacctacacctccacacacaacctagccatgaatcctcaaagccctaaaaccagtgctccttgcaccttgccagtggagccggctgctgctgttgttcccaacgaagcagtggcgaccgataaagctccgccgccgccaacggccaacacggtgataatccgggagcaggaccggctgatgcccgtggccaacgtgtcccgcatcatgcgccaagtgctgcctccctacgccaagatctccgacgacgccaaggaggtgatccaggagtgcgtgtccgagttcatcagcttcgtcaccggcgaggccaacgagcggtgccacaccgagcgccgcaagaccgtcgcctccgaggacatcgtgtgggccttgaaccgcctcggcttcgacgactacgtcgcgcccgtcggcaccttcctccagcgcatgcgcgagagcgaggccggcggcgaagagcgcggcccagggcgtggcggcggctcgcgccgcggctcgtccgtggtcacgctcacgctgccggtcaacggcggtgcgcagctgacgatgcaccaccctgccgccgtcagccggcatccgcaccaaggtgtgtcgcctgctgcaggttacgccgtccggcccgttccccgcccggcggcggttccatctgccaatggggcggtggcggcgccgcacttcggcggccggtcgtaccagatgtacggcggcaaccaccgccctgtggttccctgctaccacggaggaggaggagcggcgttcgtcgacgccggtggaagccaacacgttggattccacgacgacgaggctagctcttcgactgaaaatccaccggcggggcgtcctggctcgcactagccaagagctagctagtttccgcgcgtgtataataagaggagaggcggccagaggcagatgcatgcacgatcgagatctctcgtgctgcaggctggccggtgcacgcgccgccttgccgaactccgtcgcccgtcgtcgtcgccggcgtggactagacctgtttgttagttctccagtaccgttttcgttttctcccatcatttaccatgtttcttcgagacactttttgctaatcttctgatgcttgagttttcgattctcttgaggcgatatcgtatccatcccttgcttgattttttcgtccatcaaactgaatctcagctttacatgcccatttaccaacggtgaagatcgtagccctgctcgaaacgaattccttcttctagctattgttcatgattacgtgcgtttcatcacgacaggtcaattgcatgcatacatatgcatgctcctgtgctggatttactggaagttaattaattaatctctctctgctcgtc

SEQ ID NO: 3431 - DNA, 2824 bp, Sorghum bicolor
atagtatgaaccacattagtcaaaaagactctagactagggccttgtttagatcaaaaacttttagaatttaactactgtagcactttcgtttgtatttagcaattagtattcaatcatagcttaactaaatttaaaagattcgtcttacgatttacaagcaaactgtataattaattatttatatttatatttaatgttttatgcatgtctctaaagatttaatgtgaaatttttttttaatggcatctaaacaaggcctagacttagggatgaaaacggtacggatattttccgaccgtattcgagaccgaattcgtttaaagaggtttagatctatccgtattcgagtccgaatgtttaacatccgagataccgtatccgtatccgaatacttaaatcgtatatttatgatgtcgacatccaatcatatcttatccgacatgattaaaattaaccgtattcgaatccgaatccgaccagaaatatgaaaataaatatgatatcagtgatatacgttcgtatccgatccgtttttatccctacctagactagacgtgtggtaatttgaaggagaaggagacactaaggccttgtttacttccaaaaaattttgcaaaatgtgaatagtagcactttcgtttgtatttgataaatattgtccaattatggactaactaggcttaaaagatttgtctcgtcaattccgaccaaactgtgcaattagtttttattttcatctatatttaatactccatgcatacgtctaaagattcgatgtgacggggaatctgaaaaattttgcaaaatttttgggtaactaaacaaggcctaattgcaattagacagagaggttgcccaaaactcaaacccgtcaggtcgctgccaattgccgaatggagaaaggcagcggggcccaccggcacccagcacggggcagcagtcggcaactccaacccaacatcacttggtttttggctgcctgggttgccttgcctgcccaagttggtccttgttggattggatgcaatgtatccggctcccccttcctccgacctccgagatttgaatcccggcgctcccaatggaaggaaatcaaatgagatcccccactcataaaattgaccacccgtcgtcctccctgtccgtcatcatgctcactcaatctctcccccccgttcccatctccatctccatccatccccccgggagcaggagcaggaggagcggcagcagtagtcgagtcgagtcgagtcgagtcggcgtcgtcacgggagataccagcttcgctatcaccggatcccctcctctgcttccctctgttttcttctgcgtgtcccgtccggcggccggagttgccggtggctcaatccgagccttcgcggagttcttctcagctgctgctgttggtgttgttcttgagatctctttcttgatcttgtgtgggattaaagagggattcttgccttcctacgggagaaagagaaaaggggaagaacgtgcttgttccggtggttcaacagtgcggagacccggagaacaatgcgaggttcaggattaaaggtaccttctcctgctctgtgatgatttcgatacgtttgggtgaattcttcatctctcttttcattgggttcttcggattcttcaaagtaaagtttctgggaggaaaggtttgaactttgttcgccgttctagaaattctaggcgattacgacggcgtccttgctaaatatcatgttcatgtaacgacagctcaaaaagaccatttgataaaaacacatgatgtactcaatactcatcatcatctaacacttgtgttctatctcttgacggacaggtgttctggcttcaggtgcagttcttccaaagcaggtgacaggcgattcgatcaccggagctcagatctgacgaaaacaaaacacagtcctcctcccaccgcctttcagttcttgcttacttctgcaaccactcactgcgaccgtacaccaaagaacactgcacatggcaagccgatctagcgcgctggaaggagggggggcagcaatacagcggaggaataatgccgtgaagcggcacctgcagcagcggcagcaggaggcggatttccacgacaagaaggtcatcgcgtccacctacttcagcatcggcgcgttcctggtgctcgcctgcctcaccttctcgctgctcatcctgccgctggtgctgccgccgctgccgccgccgccgtcgctgctgctgtggctgccggtctgcctgctcgtcctgctggttgtgctggccttcatgccgacagatgtgcgcagcgtggcggcctcttacttgtaaatagccagataaataggccaccacctttggccagttttctgtgttttcgggggtgattcgtcctaagatgagtcatgatcgagtgtaatgtgaagcatcttttccaggggtagtagatttcaatgaagtttggtagctatacgaagttaattggttggaatttggaaattatgggcattgtgcgaacatatatagttgtgcagaattttctgtaattgcagcaatcagttgaacagattgactgatccacttgtagtggagagtgagctgagatcaggagtaagttatttgactctttgaggcaagtcactgaatctcagtccacacggtcatacgtgaagtgagtatgcagcttaatttgggttcagagattactgatctcactttcttatgcacggataaaaatttataacattgctagtttgaggaagtcttcgacgagaatgcatctccattgttgataaattcagtttaacacatttgtttgtacttaactaata

SEQ ID NO: 3432 - DNA, 7601 bp, Sorghum bicolor
acttggtgctgagcactcacagcggctggagtcatacttccagtcaatccctggccttcaaatggttgcttgctccactccttacaacgccaagggcctgatgaaggcagccataaggagcgagaacccagtggtgctgtttgagcacgtcctcctatacaacctgaaggagaaaatccccgatgaggaatacatctgttgccttgaggaggcagagatggtgcgcccaggtgagcacgtgaccatcctcacgtactcccgcatgaggtaccatgtgatgcaggccgccaagacgctggtgaacaaagggtacgaccccgaggtcatcgacatcaggtcgctcaagccgttcgacctgcacaccatcgggaactcgatcaagaagacccaccgtgtgctgattgtggaggagtgcatgcggacgggtggcattggcgccagcctcaggtcggccatcatcgacaacttctgggactacctggatgcccccatcatgtgcctgtcgtcgcaggacgtgccgaccccgtacgccgcaacgctggaggacgcgactgtcgtgcagcctgcgcagatcgtggccgctgttgagcagatctgccaataatcgtgatatgacggcttttgttgagttacctgatttgtggattcatgtatccgtgttttgttcgttgtcacatagtgactgccattgtgccgtagacattctattttgcaacgcagaagccatattcatacgaatgccttttgtggcctggcccgtttgttcactgtgcagagttcgatgccctttgtttgttcttgtgtatcactattattagcattggtttgtagcagcgcctgtgttggttctatttatttatatatgataatctgttgggtattggagtgacattctatcagcatgatgatgagttgctgatgcagagagtcagtcccattaggtttcactcctgcacctgaatttgttggttgcatcttcgatgttttatttgttcgtctagctcgtaggcaccatgtcatgttttgaaactaaaccaaacatgatagctcgagctgtttaaacatgatgaagcggggcgactgtgcgagctagcagtggctgcagcagcaaggcaatcttttttgtaactccgatcagaataagattttggttctttgaaaaatgtattctagtgcattctgcgggcagaagcactatcatcagatttactgcgcaaatcatctgcctttgttcttgtgaaccaaagtgtttcgatatgcatgctttgtacgtggcgttgaatgcagcagagaccaaaacctgtttgatctgaagaatatatctggtatcagagtataatatgaaaggactcggcggctattatgccatcacgttcggtatcgaactgtcacaaaccgattggaagaggcctaaataaattattattcttatctttatatttttctcacggaaatgtcaaatggcaataaaggctgtctccaacagcccaaacctaaaatggttctccaacacaatacctatagcttccaacagaataaccatacagaagacacattttgggtattaggagaggcataactcaaatttggtatcttctctcctcgagacagagagtgttgtcctttaggtcttgttgttggagaagactaaaaatagatttgaaaccttttacctgtagcgctaccaaagaacaaataaatcttatattttaggtcactattgttgaagatagtctaaagaaggtattgtcgtgcattgtgagtatctgtattatactgtgtaatttttttaaaaaaaattaaaaataaattaaaaaagaaatacaaaatgaataaagcaccactgggcgggcccagcgggtagtccggtaggcccagaaccaccctacaatctagcccaaaagttttttactactctgcagcccaagacaaatttggcccatgagtttttttttcatctcgcccaacgcccaggcagagtcaggacatcgaccgcgacccccgaccccgccggccgcccgccgccgggatcctccgcgccggctgcccccccaccaccgctgccaccgctggccagaggccgctgcaagtccaccccacccctgcgtggacgtgcgctccgcggctccgccggcaggtccgcccggcgtccggctccgggcgcgccgaagccgcgaagccgcttgccgggccagccggaggccgtccaagcgcccagtccctgtgcgccgcctggtacctgccccctggtggtctgttgacttgactagtgagtgcttctgacttctcagcttatggtttggagattggagattgtactgtaaatcgggcttagggattgtagatttgtgagcctagaattgaatgaaactagttgaactccccgcgtgttgccacgggaattagtagtgatttctcagctgaataatggccggcgaagctgaatatcaatgatgtagcttgttggagagcatgcttaacaagttaacatgttggagtagaccattgaaaacactctagtcaattggtattgttgtgacataactgtatttttataccattgaatttagatatagatgtagatagggtaagaaaatggttaatttatgctataagtgactatttgtgtaagtttcagacctatttatgtaagttttgaaccttttaaatgttttatcgcaattcggttaatttatagtcatgtatactgaacttttttttgggtttattgtattgcatatgaattatatttttactaggactacccttgttttaaatcctgggtccgatagtattacaacatgtcgatattgtaatcagtaatgcatatagtaaagatatggttatacaacaccatatattggaatgataagccacttcctcaaacatatactttacttttttctttgaactaataaacatactttactacctatacaagctcacacgtatatagtatatttaaaaccgctattttccaattgcacaagacatatgctgggtggggtggccgctcctggcccgtgctgaggctgactgctgtgagcctgtgactgggaggccggtagccgggtgccatctgctgtctgccgattcgagtagaggactaactggcaaccattaattcaaattgtaagttaatttggtcaactggcttaccatttcagtgcattattgattgcagtttaccaatatttattagaaattggaactgagacagtggctaaggtagtgcaatttgcttagagtactttgcggtattattatacaactactactatgtggtattataacacgctgataatgtgttatatccttgtacaactactactatgcggtattataacatgccaaatagggctttcaggtacaaaaagttttgaatacccaacctcagaatcctgggcctgccactgtatatgttctcctattgttgtcacatgtttcacttgttattatagctgtctaatctagcttctagatccaatgtttcatgtgctacattacttttcaatctaattcagaccaactatcaccctagctgtatttgtgtctttagtatgttttttgctaagttgtgtattgcagactttctgcgattttgtgcaacctgctatttccatcgtgtttatttgcatctttttcatgtgtgtataggtctctcttaaatttcagtgtcacttagggactcctttccctgagaagaggcggaggctgggatatacaatgactgttggatcacgtgtggtggtgatagacaatgggggtggtcttctcaaggctggatttggtggagacaatgatccaattgctgttgtccccaactgtatggccaaaccccctggtggcaatgccaattccaaaaaatggctggttgctgatcagctgcaggcagaagatgtcgacgtgactggcatgacactgaagcgtcctattgatcgtggctatctcatcaataccgaggtgcagaaggaggtgtgggaacgggttttacgcaatcttctccaggttgatcctaccaactcatccctattactggtggagccattgtttaaccctccagcgctacaacatgcaactgatgagctggtgttcgaggagtttggcttcaactctctttgtgttgcagatagtccttcccttgtccacctttatgaggctagccgtcaaccaatgctcttccgtgctcagtgcagccttgttgttgactgtggcttctctttcactcatgcatcccctgtgcttcagaactttactctgaattatggcgttcgacgtatggaccttggtggcaaggcccttacaaattatctcaaggagcttgtctcatatcgttcccttaatgtcatggatgaaactctcctcattgatgatgcaaaggaaaagctatgctttgtgtcgcttgatgtccctggtgatcttcaccttgccaggtctgctgccttcataatctgtcaccctatacatcatagtttcaattcttctttccgtttgtttaagaataatgtataatggtattttcaattaaattgggtcaaacagcaaccttaattttgaaatgtcattttgtagcatttgacctttgaatgacttgcctgtgtaaccaattgactgcatctattgatagcctgttatttttcaaacttgattttataacttcctgaacagagtgcatgtgtatatgtgtgtatagaaggtagtgggcaaggttttgtaagtgaaacttcactaggcattgcagggcatgaaagatcttagcatttgaatttcaagaatgcaaaacttatctccggcaaacaaacaaacaaacaaacaaatgaaccaagcataatggatcatgtttctggaatcatcctatacttgggttatgttttctccatgttatttaaaatgtcttcttcaaacacactggatttacagtgccaagagacgattttctctctggatgctatggaatgcccacccatgataggtgaatgttactagggacaaattttctttccttaaaaggttgtttagaagtatcatcctaaagcatattgtgctgcattagatcaaaaaacatgttaaatgatgtaaaatcacattccttcaaagttggaatgctactaattagttgagtgttcttcttaatgaaatgacatgcagctctcttgccttgttcgagaaaaactaattagttgaataaaccaagggattttatgctactcaaatcacttagcagtttgctgtgcaattgcttggcaggttatcatttaaggacaacccttttaggtgttcttacattctccccgatggtataacatacaagaaagggtttgtcaaggacatgaatgaagcacatagatatcgctctctgcctcttgatgaagaagcaaagagaaaagaacatagcatggatataaataagtccgaggaccggaaaaagccagaattaagtcaaaatgtaagatcgttgcctctttgctcagttgccttttgttcttgtggtattattaatgaagttataactctgtaggaatttgtattgacaaatgaaaggttccttgtcccagagatgctttttcatccaatcgatcttggtcagtgtcaatgtgaaatgtcatgtatacttttgctcataagattttaaatatattctctcatttatgatctcaattctcaaattgttttgggaagcataccagtctcatgtttcttttttttttctttttttgtaaaaacattgcaaaacacaataatgatttgttccatttgcaatgaattcagatcaaccattaggtctttttttctgatggggaggatttgcacggtaaacattgagatgcaaaactagtaacatataattcttgccatgagactcaggagttgctattcacttgacctgctgcttctcatgctcattagtctggatctacttactgcatttcacatctatcattcttcttttccttaaactttagctaacaatagaacacaagacattgacgttttgttcatttttcttctgcattggagtattgttagggctggcacattgttttagctgctcatttttgccatactaatctccactgtgcatatttataggcataaatcaagctggacttgctgagtgtatagttcgtgctgtacaagcttgccatccatatcttcaacctgtgcttttcgagaggtatcgtttacatctgcaccagtcttgatctttgaatatgctatgcatgtgagtttacattgttgtgctgtttccagcatcatcttgacaggtggaagcacactgttccccagattcgctgatagactgtaagttgtttcgttaacattattattatacagtatatgctgtcctgttcgttgcaaaggggccatcagatacactagttatttggtgtatttcgaggtggtcactgagattgcacaaactgtattgacagggagagggaacttcggcctcttgtccctgacaactacaaggttaaaataactcatcaagaagagtatgtctatctctccctctcactatacatatcacactgtatctgtctcatacatacatgcccaaatttatcagaggcaaatactgaaaattgaaacatcccatgtaattgaatgatattaattaacactcggctacttcttgtagcccaattcttggtgtctggagaggcggatctattctggcatcaactcctgatttcgaatcaatgtgcactacaaagtctgagtacgaggagatgggatcagcaaggtgccgacgaaggtttttccactgaagagtagagcttgacaatttagttgcatgtgaaattagaagttcggtttacagtagtaactcctctgcgcctgggatttcttttctttttagtaaaaaatgctttcttgtagttcactttttcagtagatagctcatgtacccgctgatctgatctgacaactgtagcaagtcatgagattgaaatggcaaactgccaagctggttcatccttgctatgatccttacggccttagcgcataagtttttttcccccatttctattggaaagatgcaatgtaacgtacactgtcgtgaatcgcttcaagtttttttttttggcaacaaccaagcaagactgaagatgggctttagtgttcaaagttaagaactttgctggcaatatggcttttccatcgtacatgagatttgaaggcgattaaggttgtaagaattgaatttgtaaggaagatggagaagagatttgcgtttatcctgatggtttggcttaagaaactcaaaagcagatgattagaaaatgcagccgccggcttccatttcttgcctgatgaatcatttcagcgagatcaggcagtgacatgcatgccatggtggggatagcgcagacatgcatgggcatgcatgcacgagaggaggcggcactgtccggctgtccctgtccctgcccctcgatcgcccatttatgggaatggcctttgttgccataagtgtgcatagtccaatgatgaggcgctgcttgtcagtgctcagtgctgctagctgcttgtcagtagtactatatatatatatatatggtgagttttttttacacgtacgtgtatctactcgt

SEQ ID NO: 3433 - DNA, 10100 bp, Sorghum bicolor
agatatttgtgccctgcggagtggtgggaaaacacggttgccgctttgccgcttcagggacgaggctaggcaaacaacaaaaaaaaccacgcagatgatagtgtgccacgaaagcctcacgagatcctgctccatcggtctccgcaccaccaagcatatacaccctccgtctcaaaataagtgtcgtttgcgcttctcaaaaaataaatttaactaaatatatagtaaaaaatattaatatttatagtacataattagtatcattggaaagaactttaagtctaattttttaacaaatttatttaaagacacaaatattccacgtattttctacaaatcaagttaaacttgtggcacgaaaacctaaaacgatattgttttagggacggagggagtactcgtagacccagccctacacgtagatactgtagcacacataccagcagcaccaacagaggactcatcaggacgatggctcgcgcgcgctcgtgggcagaatctattccgcgcacagttttccacatgacgccttgtttagtttgggaaaatttttgaatttcttatcactttcgtttgtttgtggcaaatattatccgatcatagactaactaggatcaaaagattcgtctcgtgatttacaggtaaactgcgtaattagtttttgttttcgtctatatttaatgcttcatgcttgtgccgcaagattcgatgtgacggagaatcttaaaaaattttgggaactaggccttgtttagatgcatccaaaaacccaaaactttacaagattcctcgtcacatcgaatcttgcggcatttgcatgaaacattaaatatagataaaaaaataactaactgcacagtttatctgtaaatcatgatacgaatcttttaagcctagttacttcatgattagacaatatttgtcaaataaaaacgaaagtgctacagtgtcaaaatccaaaaagtttttggatctaaacaaggccttagttcgcaaaaaattttcaagattccccgtcacatcgaatctttggtcgcatgcatagagcattaaatataggtgaaaataaaaactaattgcacagtttacctataatttgtgagatgaatcttttgagcctacttactccctgattggacaatgtttgtcaaattaaaacgaaatgctacagtacctaacaaaccaaaaattttgcaagctatacaatgcctaaataaaatgaaaaaaaagcaaagcaaagcagcagctaatggcgccccctgctgaaacccacgcgaatagattacgttatctcgaaacgctaaacccgacggtttttgaaccttggtgcagaatctacagagggcaaaactggacaaacacgtcgcaggagccagcccgaggcgagggcaaacctatggttcgggatggcgccgggcactgccactggcggcaacagagttggcccacacggtcgccagtgaccagtcaatccatccatccgtccatccggacgtccgtccatggatggtgctggtgcgtggcgctcctctccccacggctgcccgtggtccgtccgtgcctgacagcagtggaccggacccgggtcgggtcgcttgcgcccccgacagccgcttacatgagcccataaaatacggcttttttaatgctactcccacggctcgctttccagctttcttttctattattattaattattgctgctactgcgttgcacgcactctctctctctctctctctctctctctctctcccctcgtcctacgctacgctttttattcaaaactgggcttgcctgggcagagtctccagccacccagtccactccgcgcggcactgtggcgaccaactcgcagtccgtcgcctcgccggacgcacacgggcacacgctgtgacgcttcttcgccccccgcccgctcgcttaaatgcccctgacctaatcattcccacacccccctcctcctcctaccagtccccccaccccctccctccctccacccatctctctctccgcgcccccctcttcccagccccaccgcacctctctctctcccccacacgcaccatggcgatctccgagctcgggtgagctgacgaggtaggcgtcccgtcccgtccccgtacttagcaccgttgcctgcccctgctgaatgaccgtcggttcggaacggtgcagaatgcggccgatttgagtaaggtggagggcgcgatggatgcgggttcaggaggatttgcgaggaggctgtagaggttaggtttcggtgtcccccagtccggcccggccaggccggtcgtgggagatgagctcctcgtccggggcaagcatcgggcagccgccgccgccgccgcccgcgccgccgccggaggaaggtgcgtcatgttgttgcctgccttcctatggctaggtttcgcttccctgtgctgtgctgttggtttcggaatcgattcggttttgctttatcacgttgcccgcgctgtgtgtgtgatgtgcagagaagaagtgcctcaactcggagctgtggcacgcgtgcgccggcccgctcgtctgcctccccaccgtcggcacccgcgtcgtctacttcccgcagggccacagtgagcaggtgagtcgaaactcctcgtgccgtctcgctcgctcggccggcctcgctgctggtgctggtgctcgtgctggtgatgggctaccaaagccctaccacgcaccacctgcagtcctgcatacgctgggagttgccttgcgttgcgtgcgaggtgttgtttgctttgcctcacctcgtcgggtgcggttgctttgatcgctctcgcttgcgtttctggcctaagctaatgcgtgtgcacgcgtgtgaaggtggcagcgtcgacgaacaaggaggtcgacgggcacatccccaactaccccaacctgccgccgcagctgatctgccagctccatgatgtcacaatgcatgtgcgcgatttaatttctccctcaaaaattccttagatgcggcgattcgtcgtccgctccgttcctctacctcacctcatgcgggcgctaagctgagctcaaatataagtgcaggcggatgtggagacggacgaagtgtacgcgcagatgacgctgcagccgctcaacccagtaaggcaccgggggtttgatgcttctccgtcgctgtgctgtgctgtgcctctcatgtctattggtttgttgagttcttattatgatgctgtgtgtcggctgtgttcgtctgtgcagcaagagcagaacgacgcgtacctgcccgcggagatgggaatcatgagcaagcagccgacgaattacttctgcaagacgctgactgcgagcgacaccagcacgcatggcggcttctccgtgccccgtcgtgctgccgagcgcgtcttcccccctctggtgtgatgagtgtgtattttgggtggtgttccttttgttcgcctgcatggattgtttagtttgctgttgccaataacaggtggtatagtgtggtttgtaggatttcacacagcagcctccagcacaggagcttattgcacgggatattcatgatgtcgagtggaaattcaggcatatcttccgaggcaagtccgacaaaatttataaacttcactctttcaacttttttttttcttttcccctttttttgaaaaatcttgatttgatgtgttatcagttgttagccattttttttgattaattaaaacatactctcaagatatcatatcacctagtgtgactaatctatttccttgcagtttaagtgaaaaataccactccatgtaactatttagtacaatcaagggcatacaaactacaaacaccaagacattaatttggatagtacattgaaaccttttcagttttaatatgccaggatagtgcagtactgggttaagtttaagttgccaagtttcaattgacaggataatttcctcagatgtttctgaatccgtaggagttaggtgctccaaaattgcacatgggcctgtggatgtactgatgtgcattacttctgagtatagtacaagtgtaccacaccttggttcttttcttatatgtcttaaaagacctaacctcccacagtgttttagtctgtttgcggtcgatttgtcagtccagaacatacttagtatcccagtaaatgctaaagtttgattacaagcatcagtgacattcatgaacgagggcccatctgctatactgactgtgaaatggggctgccagctcttcagttgttgctgacagattgaatgatttaacatcaatgttgctatcttttcactaaattggcttctttcaacaggccagcccaaaagacacctgctgactactggctggagtgtgtttgtcagtgctaagagacttgttgctggagattctgtgctattcatatggtttgtttcattgtttcaatgccgcaccactaaaaaaattgtgatgagtaggacttaccctttcccactaatttaggaatgagaaaaaccagcttttgcttggaatcagacgtgccagccgtccacagactgtgatgccctcttctgttctttcaagtgacagcatgcacattgggctccttgcagcagcagctcatgctgctgcaacaaacagccgcttcacaattttctataatcctaggtaatcttaactgtttgattagtaaatggcaattgtatgcttcctatgttccacttgattcaaaaaatgtgcttgcagggcaagtccatcagaatttgttatacccctttcgaaatacatcaaggctgtttttcacacgcggatatcagttgggatgcgattcaggatgttgtttgagactgaggaatctagtgtccgcaggtgaggcagcagtaccaaaatttccttctgatttcttggcaaaagaatatatgcccatgggacttgcaattttatgctcaagaattacgaagaaactcataaataagttattaaataattgcaggtacatggggacaataacagaagtgagtgatgctgacccagtgcgttggcctagctcctattggagatcagtgaaggtaagaggtttttttttttcatttttgttgttggctgtctccttggttccctcgatgattttactcttcttttgcatgacggtttgtagttctcgtttcaaatttgctaataactactctcttaaaaatcctgtttcatgtttttctcattttcttctgatccgctcttctggttcccaagccaataattttgtgagttttaccactttcagatattttgcactacccagatttttgttcttttgcaagaaatttctattgtgaaatctttgttctttttttcccaacaaaactctttgttctcctttatgccataagtgcataaagtcataataaccatcttacatatttggttactaccgccattccatcagactgaataattttgataccacaaaatattccctaatcactatgccactgatattatctacacaggttggttgggatgaatcaacagcaggggaaaggccacctagagtttctctgtgggaaattgagccactgacaacctttcctatgtatccatccctgttcccactgcgagttaagcatccttggtattcaggagttgctgctcttcatggtacacttcaaatactcatgcttgttactataacgttgagtccagcatctcttctgttggggttattttcctgcactattgctgttagtgctacaaattaggtattcgtagcactgctagattacactggagagcagacagtgagagcaatagtcttttagggtagaatcctgttcgtatcagctactaggaaaaagggttacatagatgcttttagatccaacaattgccccataaaactcggcataatgatgaattgttgaccttagccgaagtaacatggcagttcagtgaactggggttttcttattttccatcttgcttccatggaaactagaagtaaagctgtggtacaactgaaatatggatatcttctaagcatttatgccaaattggcaccagcattgaggcaccatgatagaacatgctatttcatttatgtgttagacaacttgtttcattattgtcattgtctttcattctcattattatgactttgttgattgtcatattacacttaagatgacagcaatgctttgatgtggctgagaggagttgctggtgaagggggctttcagtctttgaacttccagtcacctggtataggttcctggggacaacagaggctccatccatccttacttagcaatgatcatgatcagtatcaagcagtggttgctgcagcagctgcctcccagtccggtggttatctgaagcagcaattcctacaccttcaacagcctatgcaatccccacaggagcagtgcaatctcaatccgctgttgcagcaacaaatactacagcaagcgagccaacagcagatggttagtcctgatgctcaaaacattcagtccgtgctcagcccaaatgctattcagcagcagctccaccaactccagcagatgcagcatgctcataatgaccagaagcagaagattcaaccagatcaaccgtatcaagttcctagcagtgcggttctcccaagtccaacatcattaccaagccatttgcgtgaaaaatttggcttttctgatcctaatgtgaactcttctagcttcatcagctctagcagcaacgaaaacatgctggaatcaaacttccttcagggaagctcaaaatctgtggatttgtctagattcaaccaaccagtagttagcgagcagcagcagcagcagcagcaacaggcatggaagcagaagtttatgggctcacaatcgatgtcttttgggggcttggtttcgcttaactcacccactagcaaagatggttctgctgacaacaaaattggccgtgatgtgcagaaccagtccctttttagccctcaagttgactcttcctccctgctgtacaatatggtacctaatttgacctcaaatgttgcggataataatatatcagtgattccttctggatcaacatatctgcagagtccaatgtatggttgtctggatgactcttctggtttattgcaaaatacaggagagaatgatccggcagctagaactttcgttaaggtgagtgtaaatgagtctactagaaacaaatgtaagcccctgctcatgtaaccattttattaaattcaggtttacaagtcaggatcagtggggagatccttggacatcacccggttctctaattatgctgaacttcgagaggaactgggtcagatgttcggcatcaagggtcagttggacgaccctgatagatcaggctggcagcttgtatttgtcgacagggagaacgatgtgcttctccttggagacgacccatgggagtaagaaaccatcactagaactctagtttcaatttgtgatttctcagtagcatacacattttaattttgtcataaatctttacaacatattagaaaaaaaattcacacaggacattttacgctttcatactaagttgaattttttggcttcatttgcataggcagtttttcactcaactgcccattagcctcctcaccaatatctatataggccttgtttacctccatcccaaaatccaaaaatcttcaagattttccgtcacatcgaatctttagacgcatgcatggagtattaaatatagacgaatataaaaactaattgcacagttttgtcagaatttacgagatgaatcttttgagcctagttagtccatgattgaacaataattaccacaaacaaacgaaagtgctacagtgtggcaaaatttttcccttctggaactaaacacggccatagtggcttgcatttgaatggacctacatgttattttcaactatttagtggctcctgatgatctcaaacagatctacatgtgcttgattctgccacacgcattcaagttacaaaaatgatgaatttatagcccttgatttatgatacttcaatactcaggaagccattttagccaatggctgtcagtgtcagtctggtaactggggttcggggtcatctcggtcacgcggatgagttggttcatcttagtgcaacacccgagggaggtcttcctcccagggttgtttttttactcaataaaaaataaaatttacttgtgatatggatttgatgtttctggtttatgtaaagtgatagatgtaacatataaatcttagatcgcatgaaactaagcttgctcactcaatgcaggtcatttgtgaatagtgtatggtacatcaagatactttcaccggaggatgtgcataagatgggaaagccaggaaatgatccacgctacctatcttaaattgatacacggagctctttctggtaacctttgtgacctgcttatttattatagtccacgcatctgcttctccatttgtgatttgatgtttctctattggtacagttatttttgcgcgatggtcttagttactgggttattatgtcagcaagtttatgtaaggtatagggatggcataattatccaattaaatggtgttgtctggagcagtctgttcggtgtcaacctaaatgtactaaatgactttccatgatatgtcctagtggaaatatagctgtataggtgcaacagttccctgattaggccattacttatgaaaggacaagtgttccttggcagattaataatgtcagaaagagtccttatatgctattcttaaaccttaaccctctggagttgctataagatattgtatttcgattgcgcaaagctgaattgcagataaagccgttgtggtgaagtagtacctacaatttgcaaataaagctattctgatgaagtagtacctaaaacttgtctggattttcccaaaaatttgaagccaatgatttcttgtagctaagcaaatgatgaaattttagtactcgggaagccattttagacagatgacttctatctttgttatgaaagctaacaggttagaagtactcccgaattttcgaggtacatttttttatctaaggcaattgttaacttgtgtgtgtgtggctgactttatgtcatcatatactttgttctgcacactactcgactaacatgatcctaatactttatttagtttgttctgcacactagtttttccctcaataggggtgataatccttaacgaagaatagatttgttcctaacatcttggcttggttatcaattacaggctcccatgacgaattctgcagcacactgtagcactgttcatgatggcctgctctactgtgctcgcatgttcgcccgtgtcatctctagcatgtacaccgtgcacgtcttcagaactccccgttacttgtatccggtgcaggccaccgctctggactgatattttgtaggttccacttaggaatcagtatcagcaactctatcctagttggtttgtagcttgcacggcacccgttcttgtgtcgcgtaaaaatcttcagactaaatgcttagttgaaattgttgtcgtgattcgtaagttatctatgtatttgaggagtcctcgacatgctttcgacgatgaactgcaataatttgaatgcaggaggattgtttgaaatttgtaatgctgttttttgtctgccgtagcttatgacttttcaggtgttctctgtctgaaacttttttttttaatggcgagttggtgaccgcagaaatgcagttgctttttgacttgtatgtatagattgcaatgtggcgatggtactaactatggttgccacggtgtcgcctatgcgcgtaacatcgacatccaattgtgccgaggagccataggacaaagaaacgagttaactagcatccatgctccgcgatgtaatgagcatggcgagcaaaagtttaaaagtttctaggattgttacgtactacgcgatgttagcatggtggagagaaacgagttaatagcaccgatactatgcgatgtaagtatggtgccaagacagtgtgtgtatactatggcattaataaggtttactatgagaaagtgatgctatattaagggcaaggttcttccttgctagtgtatatattgtatatatatggcattaataaggtt

SEQ ID NO: 3434 - DNA, 4099 bp, Sorghum bicolor
agctctattataatgtatggtggtttcctcagaaaaaaaccccttgtttattagtacgtgtgaattcgtgtgtgcacgttgtgtaaactaatttttcaagaggcaactcctttggcatgatcgtgtcatgactcaacttggttacacaagttaaagagacttaaagaccgaaaaggttacttttaaaataatagttttgattatgttattattaaatgtttagtttagaaattataaagaaacaatatggagtgaatgatgacatgaatctggaatctttaatgtacactagtaggcgttaagacttagtgtctgtttggtaggaattcagattctcatagtaacattttagatctagattctttttaaaaaaaaacattttagacaatgaatcagaattagtgtatgaaatagtttggctagtatggtggttttgcctacataggtatttttcaaaaataataaaataaagttaaatcataaaattttatagttaagagtattttcaaggaactctctaaatcctttttgaatgctaggagtagagattttaataaataaaaaattgcccccaatagcttctctaaatggttatccaaatatagtcatcttctattttagatttttcgttagccgaaaataaaaaatgagaataactccctagattgcgcacaagatatagcaaaaatgatgcagtgttaaaagatatagaaaactatttatgcaaatgactctcaaataataatttagatagtgagatttagaaaagctcttggagatgctcaaactcactttaaataaagataaaactagtatatttttgtctaaaactacaacctacctattagtgttgaagtgctctatttagagtttctagatcttatttgttcatgtttctagtgcttcattgctcgtttatcacaatcactatttatttgagctatatttttgtgctttacttatgttgatcacatgacatttgagcctttgccttattaagcaatcaagatagagtaaatcactaaccaagcaatgcctagatagtgtgtgtggcggagcatggcttgggttggcgtcaccgttgtgatcttccatgtacacttggaatccatcatatctttctggttgatctcctaatctaataattatagtggaaaacgataataacatctgtgactacaaaagcaataaacatagtaaaatggatgaaacaaaaaaagtcaaagcaacttataacgagtaagatccaaacaagtttaacactttaaatagatcatcaataaccatatgataattttaatttttctaatgatttattatttttatttaaaatgaattagttattaaatttcagagatttaatcatatatatacgaaaaacccaaactagcttatggctaaagctgtccatttatatttttatagtttgatggccaaagtatatgttttaaagcttaactgtcaaaatcggatatattattctacatctgaaaaaggagtccaaagttccttatagttatagtagtagaagaaaaatggcagaaataacattttttttaaaaaaataatggcacaaatagcatctaaacccccgagtccactttcataattaaaacaaaatagaagtccactggcaggagctggaccacgggcccagggccagggcccactccctcctcgtccctatttacaggcgacgaacggcccggatacctcggcttcctccatcgcacccacccggagcgcctcctcttctccagcgtccgatccccattccccacctctcctcctccctctgcggccagctcctgcccccttctctccccctcctcgcccctccgcgcgcgcgtttttataaggtacgtacggcgcgtcgacacgctgcgcgctcgccaccttccgattcccggcggtgcttttctaagctctgacgcgatcgatgccgtgtggcttcgtcttggcggatctagggtttcggcggaggcgcccggtcgccggcgatggcggacgacggcgggagccacgagggcggcggcggcggcggcggcggcggaggctaccgggagcaggaccggttcctgcccatcgccaacatcagccggatcatgaagaaggccgtcccggccaacggcaagatcgctaaggacgctaaggagaccctgcaggagtgcgtctccgagttcatatcctttgtcaccagcgagtgagttgacacgacgcccggtagtgtagccttggccttggatcgtcttctccttttcagtttgagacagtttctgatgtatgtggcgacggcgcggatgctgcttgcagggccagcgacaaatgtcagaaggaaaagagaaagacgatcaacggggacgatttgctttgggcgatggctacattaggattcgaggagtacgtcgagcctctcaagatttacctgcaaaagtacagagaggtaattgatggcttgcccttactgtgttgtagaagtggatcttctgtctttactttaatgtttttgtacatctttctcatggtgtttctttgtgtactttgcatatcctcttctggtgacgggctggtgattgcagatggaggtatgtgatcttcatgcttttattttattttatttatttattttttgtcagaacagcacgtatttgactttgctttggctgaactgtagaagtgtacagtgtacacaacattatcaggttactaacctataacaccttagttagaaaacattgagcacttgacaggaaatacacaatcagtttaggagcctgcaaactagtaggcattaacacctgaacaagactgctagttcgaaacagtgcatacatgatctcgtttgttttctaaattgcctattgtttgttggattgcgtgacttaccaagcaagctcctaggcaactagtgttgttgctgtgaacaagttaatagtttcatgtactgtttgcacatccaggatgcaactgaatattgatcaatattttttggaaaattcttgtagggtgatagtaagctgtctacaaaggctggcgagggctctataaagaaggatgcgatcagttcccatggtggcaccagtagctcaagtaaccaggttagtatttttttttatatgtattggccacccctcccagttatacttgaaactgactggtagcgctggcagtggccaggctgcccactcgcgttcgaatcccagtctgggcgaactgccgggtgccgcatagggaccaagcgtgtggcttggtggcgtgttctgagactgctcagacagcccatctgcgtttgagcgtgcgctctgcacgggtgctcttacctgttcgagtccttacatgattgctaatgctcctgacagatttaagaaacaaactcgaaactgaactactcatgttacttacagttggttcagcatggagtttacaaccaagggatgggctatatgcagccacaggtaatctatcatactgtaatttgtcagtaaaacaatgctgcagcaaataattcatctcactaaaccgtaaacatggcacaaattttcatataaactgacaattttctctctgtatgcactcagtaccacaatggggatacctaataaagggctaagacaaccaaattttatggtaatattgttgctccctgaatatttttccccaagattttgtatatgcatgtttcatgcctttttatttgttctgacaattgcttatatctctccagtgtctatccatcagctagggaagtctctgcattgcttaccatgtttattggcagaaaacagaaggcacctacaaagggtgttgatttttgcgatggctgcctctcagttgtaaattggcttccatgagaatagttcacctatggtttagcgctgcttttgtctgtatatttagaatggtttgactgctgctatttttgctacctattacattcacagatatgtattattaagcataaatataatgtagtagtcctaggcctaaataatggtgattaacatacaagtctgctaccagtctactcattttctggaacaggattcatgcttggctttccctccagcctgaatgcgaagcttgtctgaatcctaatttg

SEQ ID NO: 3435 - DNA, 4996 bp, Sorghum bicolor
tggatgcatcatcaggaggcccttagctcgtggtctgcttgcacccaccacagttttttttttttttttgaaacttcattcaggccaactttattgattcgtataagtggctacatcgtttacaagcaaatgtagtatagatgaaggaggatcatctatccaaacttgagaactcttctgtactgaattacaagatcgattacaatgactactagatatcttgccaaattcgtgccatagatggacaatctcatcatagaatgccactgcaccgtggccgagaagcctccatcatgcatcgctgtattgtgatttgaaaaataaataaataaataaatgccattacacttcatatataatcatgtcatgagcagttcatagtagctagagatcaaatccctcgatgagaagtcctaattaaggcaaatgaattataagatttaggccaatctcactaggtgtttcatatgagttttatttgcattaagtaggttgccacatagggttttttgatgatatggtggtgtattgaagaaggtaaagaataaataggtttcatctagatgaaactctcttgcatgattaccaactatgtatgactcttaaaattaaatgcctatgaaaccattgaataaaactctccattatgagtgggtgtttcatccaagttttattttatttcacatgacatggcagttttagaaacaacgccatgaaactccgtagtgagactgcccaacaaaattatttgttgaaaatcactttctatttttgggaaattagtcttttggtttacaactagacctttgattcaagaccagaagctttcaacttatgcctaaaactttctagtcgagaaacatatcctatgaataaaaatatggatgcacacacactcaaaatcgactcctaaaattctggagcgggaaaagagatgggagagacgtggctagagtcagacacgacaatggtaggtggtggagtcatgcttatgatgattgaagacaagtctttgataagcagacattgaagttgggggaggggagggggtagaggtgatggcgtcagacgagggtgttggcagttggagagtcggaggaagtcgggaaggggttgagccatgaagatgagggaatttcatcggccagcttccatacatcaaatctagatgtcatgcaatggagcatgcttctaatgtagatggaatcaaaatcacctagtaaaggagcatttttttggagctgagtaaattgttgaatggaggcttggattaacggaacatatatagtagatagagcctatgacctctggtaacatggacaatgagaattttcttttgcatgcaaagaaaaaaaaaagaattcaacataatgtcattatggatttactttttttattatgtgtggaatatagtaggtatttgaaataatgatacaagtagatttgcgtcgaaaagcgtgtatatatagatagattcatgaaatgtggacagcccacctttcagtgtaataactaataagaagaataagaatagatagattcatgaaatgtggacacagcagcccacctggtccagatcatcatgacacacgtggcacgctgcccactgatggcccagctttggaagctaacgtgtcaagtatgccggccccctgcattgcgtcgtgccaatagtccaagtcccatggcgaaacccagcgctttgtgccgtcctggcctgtacgtcgtacgtgcacctagacacacacagatcacagctagctagcggctccggccacatctcaactgtgccgcgtacgtacacaatacgtcatcgcgttcatcacgcgacagaagaagttaacactgcaacgcaaggtactatacggtcgcagaagctaggatcggacttttattagtacacacaccactactcacagtacgtagtcgatctatctcacacacatatatatgtacacagcagaacatcgagagctagctgtgtgagctctagccaaattgaggtcgtcgtcgtcgtcgtcgtctcgtggatcgatcgccggcggccgtcggtacgtacgtacggtggtgatggcgcggttcgtggatccgctggtggtggggcgggtgatcggcgaggtggtggacctgttcgtgccctccatctccatgaccgtcgcctatggccccaaggacatcagcaacggctgcctcctcaagccgtccgccaccgccgcgccgccgctcgtccgcatctccggccgccgcaacgacctctacacgctggtatagctatagctgttcttggctgatgtgtccatgcatgtcgctgcacgtacgcgcgcggcggtacacttctatgcttccaattgacatgcatgcacatgactactccatacatgatctgatgtatggattgcaacttgctgcatgtgtcgtcgccgcagatcatgacggaccctgatgcgcctagccccagcgacccgaccatgagggagtacctccactggtatgtactgctgtatgccactgctacttggtgtacatgtatgatctggcatctcgatcgaggccctttattctactatatatatactactaccatatgtgtccagctacctaatttttactccctttgccacacatgcatgcatgtttctccctgcgtcaatttgcggcgtgtgcaggatagtgaccaacataccaggaggaacggatgcaagcaaaggtgagtttaatccaaagagataattcattagttatatactctcttctgtatttctaattataaagatgttttaacttttgtaaatacattgtttttttacctatctaaacatattgcgcagataagtgtatactatgtatctagactagaaaaccataatgatttatagttttttagaataccaaataaccaatttaagttgagtacttctatatgcttctttattgtcataaataaataaatgtgtgtttggattgatttttttcttgatacattgaagaaatgaataaaaggaatcccaaaagttaacagtagtaatgttttcattttattcatggtaccaaattaaatgtccaaataccatacaaattaaagccataagctaaggatatgtatagacggaaatacaaatatctattattgtccatcttgttttgctctgcatttgaaggagttaatttaaagccataagctaaggatatgctacaaaaaaaaccatattattactgactagtcccttatgtttcacgacagagtgattcatagttttgttgtttcctccattaaaaatgtagttttgttatcttcaatgttttgtttttgggtttgaaaactctttgtaaattgtactacatcatatataaatttcaacatccacatgtctgacctttaaagaatgattcgattaggttttcctttttagctagagaataactaggaatatatatacaaaagataataaatgacaaaaagtttcaaaatagaagaaaactaaattaacactctagaacatttacaacctgtcaatccagttatctcttctcagttatgcgtagagtatcgtactctattcggctagttcgatcaaggagaaagagcctatgtcatgggcagcagtacttttcccaattcacaaacgagaaaacactacaaaagaaaaaatataaatcttgaatgtttttttccctgagaatattaattatattatattaataatttgtgtagagaagaatctttggcggcagtggtatgtgcatttttccctatccacagagaaaaacaacaaaaatctttggattgtatatatatatatatcttcttttttctgataataacgtatatgtagaaaagaatcttgtcttgtactatatttctgctcctcaccggccatgcggtaccgcgcatctatacttggtgcacgcataccctgaatgatcttgtgcgtgcgccgcgcccacacctgcatggcacaaactttcatgcatgtgagagccggccggccgtcatcgcgccgtgcccgagttggcggcggcactgcactgcacggcgcatgcatgcacacgtgtcgccgccgctccagcgcgcgccaagcgtcggcacaggagcgttgacacgtgtcgttggtgtgtgggtgcaggtgaggaggtggtggagtacatgggcccgcggccgccggtgggcatccaccgctacgtgctggtgctgttcgagcagaagacgcgcgtgcacgcggaggcgccccgcgagcgcgccaacttcaacacgcgcgcgttcgcggcggcgcacgagctcggcctccccaccgccgtcgtctacttcaacgcgcagaaggagcccgccaaccgccgccgctagcagcagcgctctccggccggtggtcccaacaagctagcaggcgcgccagctgagcgtgcgtaagtacgtacgtgcaaccacaccacaccgccggcggctacgtacgtagtatgaccggtgaataaaaacgttttactgcaccgtaagcatacccctctgttggtatatatgttcacagtgtggctgtctcataatgttctatatatatatatatatatatctgcgcttgcatctatatatgtataaccatgcctgcgtgttttatttgcatggactagtgtgtgacttttcgagtctaattaattaatgtggtcacttattttgggtaataattaacaccagttggcgcgttgatcatttaaagtttgacaatcatgcatgcctaattcaatcgttttacatttaaaacaagttgatcctagatcaaggtgtggtgcaagtttatagttggttagggtgagtcgggttttgtgatatagtgtttgtattgagttgtttagttcctgtttggatccatacactattaatagttagttagataatagctcatagctaatattagctagtttggtctaactagtgaaacaatagtcgttagttaaatatccagctaacaattagctagacattattgtaggattcaataatgagtta

SEQ ID NO: 3436 - DNA, 3710 bp, Sorghum bicolor
gttccttcaagagatcaagccacacgggtggattcaccaaggcatgttagtgacacaattagggaactttaaactcaatctcaagatcagttgttattgagatgggctatagaatatgaagtaattgtacgtaccatatcccttctggtgtaatttgtgattgacatgacatggtagtttatcttgttgttgtataggtagctagttgagatttgtattccagtcttgtaagctaagaaagcctatcaattgtcacagatgaaacttgatatcttgtaatcccaggcatggggatcctccatgcctatgtagacatgtagtacacaaagcgccagccgagagcaaagtcacaacttccacccattccaattgtgcccttgaattttacaattttagtccaattttagagagtttaattgaacctaatggaaccccccctcccaaaaaaaatgaattagagctttgtgtctctactaaaaacacgcatgccacactttagttggatcaagaacctatcaaaccgtatgacttattacacatgagcgtccacatgccaattccagcgtgtgctttaatggtggactgggcataggatggcaacattaatttgaataagatgtcgttcaattaatttaaattgaattttttagaggggtaatttaaactaaataaaatgcatagggtaatccccctcctattaagaacccttcaacgtacataaatcattttttttaacgaactggaagggccccaaggcccctacagggattttattgaactttaaaaacaagtatagttacaaaagctaaacaaagagggcgagaaggagaaatagaagaagaagaagaagaagaagaagaaaaaggagaaaaagaaaagagcaaacaaaaaggagaaacagagagccgagaagggagccacaattacagcaggttctcaacacaaagatcaaaggccgccaccgacctggccttaactctaagtgataggattctgatatcttttcaaagagaaaaaatgatatattaatatcagaaactaattaagagtttggtctttccgccatgattaaatccacaatacacttgtttgctttacaccatctgatagaaattgtgtgtgccatttgtgtatatatatacttcaaatttaaaaaaggaagaaggggaaagaaaacgtataattggtggctttcacattcgctgcaactggacgaagagtattgactaaatttaaatgtgtcaatcccatgaaaagaagtcacagaaaaaatcccatgaaaagaagtaaatatgttctaggaaacagagaaaaaggtatagataacaggaggaatcaagagatcatgaaaatatatattttttagataacggaaccaataagttccaacctctacagtcttgagacgaaacacatctgagaatcagtacaaactgaagccgtaaggctcaaactcttccatccaagagcgaggaaataaaagccacagacaaaaacaacagcaaaagttcagtccaacatgatgatcaactaaaagcctggaactaatagccacccgtgcttcaatatttttagttgactttgaatcctaaatggagctagctagaagattcagatcctcagtatcttttgtgtcaaaggtgaagtgatgatgaaaattcaaattcttcccaagagagaatctgtcactattggccctcatcagctctcagattaaaggagaaccgacgaccaatgcaagaatatccagcagtctccaagccttccaaagagtccacgtacgtttatctatcctcgtcgtcgtcaacatattcgatacacaactggttctctcatacatggtttgcgccatgccgcacactataaatatcacaccccggcctgtgcagcttcaaatgcaagacacagcagctatagctagtagcactccaggcttcttatacatacacatatacagaaacgtatatacaccgtcacactgcaactaaagactgaaaaaaatggccaacgattccttggttacagctcgtgtcataggagatgtcctggaccccttctacagctccattgatctgatggtgctcttcaatggtatgcccattgtcagcggcatggagttgcgtgctccgacggtctctgagaggccaagggttgagatcggaggagatgactatcgtgttgcttataccctggtgagctaagctctatatatctatagctggtcgtcgccgtcgtccatgcagtagtttcctctgtccatgcatgcaatggttcaagcatgtctgattatttaacatgcatggatatgcaaacttgtgccattattgactgtaaatagattgtgccctgtatgatacaggtgatggttgatcctgatgctccaaacccaagcaacccaaccctaagggagtacctgcactggtgagagggctaattttttttttttgacaatgatgagagagctaattaacagccctagctttatatatatagcagctagctagctacgttcatagcaaatcttctgccgttattggcttgttgcccacgtacatacagctgtgctggaatcatcgaaacgatggatgcagccgtacctccgatccatgctgcacctgcacttaggaggtgcatgtagcacgcgtgtcaagcaagtgggacacacacacataaaacatgagctgatcgccgtacaaatacatacacatgtttcattatcattttgtttatatgtgcaacatatcaaacgataaccttttgatccattcatgtccatgcgcgcaggatggtcactgacattccagcgtcaactgatgacacctacggtaagtatatagatatatatatacatggtggtgtcccatgcatgcactgcgcgcatgcatatgtatgtatacatatatatatatgtatatatgttttgataaacattgtacacaaaatatatatattgcagggcgggaggtgatgtgctacgaggccccaaacccgacgacggggatccaccgcatggtgctggtgctgttccggcagctggggcgggagacggtgtacgcgccgtcctggcgccacaacttcagcacgcgcggcttcgcccgccgctacaacctcggcgcgcccgtcgccgccatgtacttcaactgccagcgccagaacggctccggcggacggaggttcaccggggcctacaccggcggcagacatggttagcttgcattggtcacgatgatcgccggccggccgccgacacggagtatatatatacatatataaccttgttgcacgcactatatacttgcagtacgtacgttgtgcgtatactatatatgcatgtatatgggtgacaacatcgtctacagctgatatataagacgagtgtagacgacgacggtcatcttatagaataatatataaacgaataaaagtaagatgcatgctatatacacgcacgcgcgtcagtgtgcgtggcttctagattacatatatactgtagtgtgattatctgtccttcgaaaacatatatatgggatgtttgtgtttcttagttaattagaatgcgcatgtactgctttggtggtgtgctgtaccagcagattatataaataaatatgatttgtgtaaggtgcgccttttgtatatgtgctgggcaacgatcggatacatgtgcccaatcatttgaaattatatatacatatataaggcgtgcggac

SEQ ID NO: 3437 - DNA, 5279 bp, Sorghum bicolor; identical to SEQ ID NO: 3429

SEQ ID NO: 3438 - DNA, 8188 bp, Sorghum bicolor
aaaaacaattttttgttgtaaatgaaatgaaagccttttccctggctgaaactactcggattataatatacacaataaggcacgcatcctaatcctacagttgttggcctttgtgagccatggttggtccagttcaaacctacaccttgcaaatcttgagacttggggttcgccgttcaacttgttttccaagaacaaaagggtgcatgttctttccagcatctaataattgaccaggtgcccatgtgtgacgtgtagccattggtttccgctttctgtgcgagtcaagcatcatgctacagtcacgtgatatataggaaaccagaaaaaaaaaactgttaccaccggtccaccacaagtctatgagcattgcaaagatcgaagagaagcaaaagtatgaaacgctaaggtgtagtgccatatcttttgataatgtcgaatcaaacgctaaaaagtgaaggagcatgtaagctataatcatccttttttcagacttcagtatagatggtatagtgtgaccaacaactctattattattctaagaataagtataataagggtatgtaataagtaggcttatagctgagatggaaggtaagagctgatgcacaaagctccaagaagagaaagtgggctgtattttaatgggaaagtatgtttttatagtgggctatataatatatatatatatatatatatatatatatatatatatatatatatatatattattagccatactctaaaatgatgctctacacgtaagcagcaaagagaaaaatgctaaatggccacctcactctgtttcgacttttttttgtctctaggtcaaatgtgacggaagcaatttgcaagcctttctgatggagaataagaggaaaacaaaaggcgaaggcaacattcgtttcctttatgaatatgttcgagatctctcaccgagtcactcgccacaacttctaagctgcaacaaaaaaatctcatcatatagtacaccacaactagatttactcaatttgtgtttggatgagtttttttatgcttaacaaaaagcgcacacacgaattgatcatagatgaactggttagatttcttgtagtgaaatctaccaatttctaaatttaacggcactatgcttttagtggtaggtgacgtctccgtcgacagcgagacgtctgtggtccttcagaggtgctcagatagagttaggatttgcgtacatgtatttgaggtgtctgcggtcgtgcttatatagggttaggattcgcgtacatggaagtgaatgtgagtgtgttgtaaatgtctgagcacacacaggatgcaaacacacatctttcttcaaaataactaattctttccatttgttgacattagaaataaggaatggaagaaaatttacagttaaggaaacggcggtacttcataggatcaaatagtctctctcctcagcttcattcaacatttttttttgattacacataacagcctgttgatagacagctccattcaacattgaaacaacttttttattagaagcgacattgatagacagaattttttatattttatttattaacaagacagaaaccggaaggaaaacatcccacatcacatcacaaaataataaatggaaaaaaaatcacgtagcttgaatcggcacagaaagggttagccaagttaattatagtttcatagatctctcataatctcttcgtcccaaaattaatgacatttttcacttctaaatattatgtttgaccatttgttttatttatttttaagtaacaaaataagttaattataatgataaaataaagaaatcatataacaaaataagcaatgtttatataaaaaattttgaataagaccaacagtcaaagatgatgcgatgtctatacaagttaaattaaaaacgtgatatattttggtcggagggagtaggatcaaaggaggagcataaagtgccaaaatttgaatcctccatcttgtataataaagaacatagcttgatgtaatccaggcaagcaaagcccatctacagctttgatctgagacttttgtttttatggcaaagaccaaagagtgaccttgtttgttttaacttttaacgcaaaaccgcggctgtgttcggcggccctcccttctccttcctctcgctttccggcgggcgactggcgtgcgccgcttgtttgattgcttccgtcgtcccctccccacgtacgccctgaccgccttttataagcaccatccatctggcctcttttttgacaacgccaaaccatctggcctttgcagccccgattcgccacgaaaccggccgcagtgtgagagagggacgccgcccgttgtccccggcgtatacgcaatccttccgtcgctgcgaagctgatccctcgtgttcgccttcgccatggcccctgcctccagcgtcgccgtggagaacctcaacccaaaggtgagaacgccacccgttttcctccccctctctagctgtctggcccttgaaggttccattttgatggatttttcggtgggaagtttgggctttgacgaggcggaagaggctctgtggatgtgcgctgcgttctgcgtgtccctgatcgattcagcttagccgcgggctggattctcgtttgcttgaaaaatctgggctgaaaaaaattctctttgattcgctggagtggtacatgccgtgcctagttcttgttctgatgatctgattttgattcacactttgaaatcaaatgagaatttttttgaggataactgtaacaactgcacgggcgcaaagttccatcgttttcctttagatgatggcaataagtctagttccttttccccagatcactagtcgctatcgctacctctcaaaccagaggtagatctcagtgcgatccgagctgctggagtgccttttctttttgttttgttgtgaccgagaccagagtagtttaatgtcatctatgtcagtgtcctttttctcccctttgactcaaaagtgggtacggcgatttgtttgggctgctgccccacagcccccacttgtggtcctgtgagatctgaggtactacttcgttggcaatctgtgccttgttactaaacctattgaagtttgtaaacctgattgtcgtgtgatcttgattttcacctgtttcatagacggcagctttcgtactttgcttgtctggataaggcgagtgtggcttctcatgcctagctaatacactaataactattacaggtcttaaaatgtgagtatgcagtccgtggggagattgtcatccatgctcaggtatcttgagtgactactgatattcaacaaggcttgctgtctacgttcatgttcccaaataatcggttaatcacgttaccacaaggcaatacagttaaatcaggcaatgttcatatacagagtttcgttagactgttgtagtaatagtattgcttttgacactgctatctgatttgagtgaattaccaaagaacagcatagtgcactacctggattcacaaacatgcattgtgttatagagcttactttatagctttggaattctagtttggttcaggaaaggaattaagcatgtagtctacttgattgctattaaccatattactttagtaatttaatttgcaattgttccctgatgaaattcatcctaattattgaaggttaataatcttgttcaccatattttgtatggctcactgtgaatgcttttaagactcttgagcactccatgccactggcaggtctgccattaaggaactgcttcgaaattgatttaatataaccccactgtttttttgtctgttaacagcgcttgcagcaacaactacaaacgcaaccagggtctcttcctttcgatcaggtacctaactgttgaattaaaattcattaaaactacctttatctttcctttttttttaaaaaaaattatatagctcattccaattatatttttacccttgcagatcctcttctgcaacattgggaatcctcaatctcttggtcagcaacctgtgacattcttcagggaggtatgcgtttatttgacctgctgattctacctttgtttctttggtatttacatggtaccttgcaggttcttgctctttgtgatcatccatgcctcttggaaaaagaggaaaccaaatcattgttcaggtaaatatcgtcattgttctattcattcatcgttcaatttataggtcttaaatggacagatctagtgcaagcacttgactaagtgatatcctgctacttttcccaacttcagtgtcaaatcaacctaaaatttctaaaaatattacagagagggcaatctatctttctccaaaaacaaagctgtggcaacagaattatgtggaattttatttgaaaatagtaaacatttatataaatagtaaaatttcctgtgaaatctgtcaggtatttaactttttccccgttcatctttgacattaattaaacatacctaggaagacagttttagagctcccatgtttaattgagctgttcatcagaagaaccattacatcattgcctaattatgcatgccctttcaattaatttattttttctaaaatttcccttgatgtcatttccagttataaagatgatttttgctatttgttatctgtcttgtttgtactgtttaatacttttgttatccacaaactttcagaagtagttcagtgtcccatttatacataaattcttatgtgtacttgatggctcatctcactgcagtgctgatgctatttctcgagcaaagcagattcttgcaactattcctggaagggcaaccggtgcatatagtcacagccaggtgaacatctcagtctgatattatttattgaccacaatgagaaaggaatcttggcttcatttgatttctttatttttcctagggtatcaaaggactgcgtgatgcaattgctgctggtatcacctcacgtgatggattccctgcaaatgcagatgacattttcattacagatggagcaagtcctggggtgtgcattttttaatttctctttgaattgtcctggacattttctgaataaacatgatatcactgaagtctcatcattaccctctttttcctttttaaggtccacatgatgatgcaattactgattaggaatgagaaggatggcattctgtgcccaattcctcagtaccccttgtactcggcctccatagctcttcatggtggagctcttgtatgtactttcatttgctcagcagaagaatatggtctatagtgttatatattgtatcaccgacacctaaatcgagcacatgttctttcaggtcccctattaccttgatgaaaaaactgggtggggtttggagatctctgatcttaagaagcaactcgaagatgctcggtcaaaaggcattgatgttagggccttggtggttatcaatccaggaaatccgactgggcaggtttgtaccgaccatttatcctctctcattaaagaacatctctgcttgcttggattttctatttcccatgcacaccatactctttataattgatgtaataacatgaggtgtgtatttcttgtactcctgttttaagttagtgaatactttgtatacttgcattgtctagggaaaagtttagcttagaaaaaagtaagtgttttttgtcgttctgcaatgtgaatgaatgttttttcagttctggtggccaaaacacaaattttattgaagtggttcatttatttgtaggttcttgctgaagacaaccaatatgacatagtgaaattctgcaaaaatgagggccttgttcttctagctgacgaggtgagtgatgggctggtagctgatgttaggcgtcagaacaacacaaaaaaatttgccacagctgtaacactgatgccattttcattggtaggtatatcaagagaacatctatgttgacaacaagaaatttaactctttcaagaagattgcaagatccatgggatacggcgaggatgatctccctctagtatcatttcagtctgtttccaaaggtagattgatataaccaactactttatctgccatttggtcaagtcactggcttagccaaaagattctgctgatgcaaccaggatactatggagagtgtggtaaaagaggaggttacatggagatcactggcttcagtgctccggtaagagagcagatctacaaggtagcttcagtgaacctgtgctccaatatcactggtcaaatccttgcaagcctcgtcatgaatccaccaaaggtctgctatatggcattctttgaattatgccctgattggaattaggaaatgctaagttgtccagttaaaaatcattgctttattcttcaggttggggacgaatcatatgcttcctacaaggcagagaaagatgcaatccttcagtctttagctcgtcgtgcaaaggttcgcctggttgcatatctactgtagttttgagtaataacttattaaaaatattcaagatttttttgtttgttctacaggcattggaggatgcattcaacaagcttgagggaatttcatgtaacaaggctgaaggagcaatgtaccttttccctcagattcatctgccacagaaggcaattgaggctgctaaagctgctgagaaagcacctgatgcgttctatgctctccgtctccttgaatcaactggaattgttgtggtccctggatctggatttggtcaagtgagtcaactcaacctttacatattgtaatatacttgtgtgcctgtagctgtcgatgtataggttgaagcatatggataagtaacgggagttttatattttgtccaatattaccttgctggattatgtgttgataggttttcatgggacatctagtcagattgttaactcttaggtctagtacaggttgcctttatattgttaattttctgtgcaactaatttaagctgtggcatttatagttttgaattttagagtagggtgaattttagaactatacatgctaaagctacttctaagagcataggatagtgggttcatggagatgcatttttcatataaaatcagccatagctatctccctgtatttcatttcatgttaaccgtcctaatgatggtctgttcctttgttggactgcacaggttcctggaacatggcacatcagatgcactatcctgccgcaagaagacaaaatccccgcggtgatcacccgcttcaaggctttccatgaggcgttcatggctgagtaccgcgactaaactgttacagtgtgaattaagatggagattcagtagaagagtccatcttttttcctccctttgttccccctttgtacttcttgtactgtgttttaatatattttccagtaggggctaaaaacccctccggttgtttcctaaaaaaaagtagaagagttcaatgacagagcaaaaaggggccagtgttagaaatcttatttcctccactggagcaacaattgtctgtcttcaatcaaaacaaaaatttcgaactggactaggcaacttctcactgacactgttgggcttgacatggtagaaaattgtgtgcacctgcctgccacgggagtggctggtggaatcctactagcgggcgtctgaatgatacttcaatcgacgcacgactaggatgacgccatcaaccatttctgtcgatattacaatgttagctgaaatggtccctttcaggtgtttatgtgtctcaggccttgtttggttacccttgctaaattttaactagctaaactttaatcactttagtagctaaagttccaaacatattaacttaaaaggagctaaaatagtttagttccattagtcatccaagagtagctaaaattataattttagctaggtaaaatttagcaaggggaaccaaacggggcttcaatcggacgcggataaagttgatgaccttcaactagctgagatagcactccatggaaggaaatttacctggtgcaatgatcaaacgatcaccgactatgactaggatagaccatatttctttgcctccactgattggcttgagctgtttcccaaagcaaatctacaagctcttgcctctctcggctctgaccattgcacgccatttctccaaggagacgcttctttggatttctaccgttgcttcctcttcgaatcatggtggaccaaatagccagattgcctctc

SEQ ID NO: 3439 - DNA, 6552 bp, Sorghum bicolor
gtttctagataatttatagttttcaaagacttcattttagcactggaactattaggtttgcgatatttctctatacatgaatgcactctgatattgatatggctatccgtggtttcactatatttatttagcgtacataagatcctatacagaccatggaaaaactcgaggccatcgtgctaaaagcatccacagaaaaggaaaccactgtcacttgaatcagagtccaatgacagatagcaacaaaccactacaatcaaaacccacatcccaatttgggtaaacactctaggttcagtctagtcgcataattgagttccaaccagtaattttaaaatgtgaatcaatcaatagctgggcagcacaaggcactcaccttgctcgaaactgacgtgcggtccatgtccttatctgagtcatcctcagagaaatcatcgtaggcatagcgggcatacccagcgctctgctgccggaaatgctctggctggggtggcctcggcaacggaggtaaatcgcgccgccgcggctgaggcggcgagggggggctgagcgaacgaccgtccaccagccactccggcgtccgcgccgtctgctgtgcctgcgccgcggcggacggtggtggcgcgaggctcccgttggttgacgcgataacggagcggagccgccgcatcggcggcacgtacactccggtggtgctcattgcggccgacacgggggtcgacgagaggtgggggttagtggtgccggggctaggattagggtttctggagaggaagagaggggagggcatggtcagcgggcggggccggcggaggaggcggacgcgaccccggaggacggaggtcaggagcatcaccaccaccagcgccgtcgccgcgacagcaggctcacatgtctcatgcagtccgcctccggtcccgctgctccgcgcgcggcgaggggcagccggctcgtcggagggttcctcgccgctgtaccgtgaggctctggggggctctgcgcgagagaaaacgctgacgccgcctgcgtggaaacggcggcggcgattgcgcggcgtggtcgggcgagtggttccctgcgcctgcggcggcctacccggggaggtagggatgggatggcggtggggaaaggggagagagcagtccctggtactgggaaggtaggtcgctgacaagtggggtttgcgcgctcgtgtcgcgtcgcatacacggcggtatacgtctgcgacgcgggccccgcacacgcgcgcgggtttgtgaacgtgagggcgacgtggccgcagttcgaacgtcggcggttgttcgacctgacctagcgccatcactgactggttgacagactgggcccacgattattctgtggaatctgtgcgcttttcccatctggattttgggccaatggcccaaactggcaaacctaaatcgaaaacggaccgagccttagatgtcgatgttctagttgggccttatgtcgtccaacaaggctcaaaggtcaaagcgccgcgcttttgagtttgttgatgagatcacaggaaaaaccaaaaaaaaagtacatacaaaatcagatacatagctagggtgagctggcctcggtggatccgcccggcggcggagacggccaaggagtacaaattgtaattggtcctcgatgtattccttatttacgaacaacctcaatccccagaaaaaggaatacattgaccgagggcaaccaaagtgaaatcaaccaaagccaaacaatatatatattgaaaacttgagatcatatatatatatatatatacacacataacttctataatctgagaagatctttgtggtcgaaaacatgggtagaataaccactttacattcacaaaagtaaggaatggccattttttacacttacgagcaaaatataaaggttaagaaacaaaaacttaaatcaaggaaagaaaagggtctaggcataaaattacatcatactagtttctctcatgtctcccgtgtctcgctctcgcctcgtctgccaccaacccaccacctcccctgttcctggacgcttcttattctccgccctcgcctcgcgtcgtgaaaccaaacaccgatcgcacaggcccgacgaaccaacctaccaaccctctatggctatggcgacggcgaagctgagctccccggctaccagcctgctcgctggcggccgcacccggcgatccgcgcccgcccgccgcgcgacggtgatccgcgccgccgcaggctcctactccgacgagctcgtctccaccgcggtgagcccccccaccaccaaaccctacatctgtcccttcggtatgagtgggttcactaccagccggaggatctggcttttggagtgttgcacgtgacttacgcggcgatctgtgatgtggtgatgacttcgttgtttgtatctgttgatctgtgaacggtgacggggactgtttggcaggactaggatgatgaggaagacaccgatgttttttcatttggtttactcgatttaaatttaggttgaagaaacatttgcctggtaccgattcgttgcgatgcataaggtctacatgtcaacatctagggggggcatagtgttcagtcacagagtgctttgcttgagtgcaaagctgcattgctcattgtattcttctccatgcaaacaaaattgagatgccaggtgccatagaagtgcttaagaaattaggcgatgtgcgcatatcctgtgttatttagagatgtccagctgtggtgcataaaaccatgtttcttgtgcttttatctgctcgaagatcccatacaaaatctgatatatggaatacttggatcgaattgacaaagttctcgcacactatactgtttctggtctctactagactcctaattgtgatcatgtgaattgtgtgcttattgttgggtgttctttcttatgaactgactaccaacagcaattcacctactctctgttattaatagttgtgtgatccaattatggttcatattttgatatgattaaagactatcttgattatctatctgcctctggacaggcacttgaaaatgaagtgtgctcattttgactgcttcagtctctgcacaacttttctattagcatggacttcaggggaatgttggtctgaagactatcaaactgctaaggtcaccaaattggttcaaaggcaatacaagcttttgaccttttgtggtttcttaattgtaataacttatgcataactatttgttaaaatgctgatgtgcaattctctgcatctgatttctgattaatgtttcaacgcaaagatctacaatgtgtgaatttggcacttcctctgtatactgtgaatttagcgcttatgtgatatcaactgtaatgcttctttgtttgtgtctgttgattgatagtaagctcatgcaaagcctgtcaaccatattttaagttatgtgtttcatatattggagttcgcactcatgactgtttgattggttgaactttggtatggcaatatgttcttcaaagttccaagtcattctcctttcccactattgcttatttcttcttaaccgtgattcgttttttctgttgttttttgtgaattctaatctaattcttgcaactttatctgcagaaatctgttgcttcgcctgggcgtggtattctggcaattgatgagtcaaatgcaacatgcggaaagaggctatcgtcaattggtttggacaacacagaacctaaccgccaggcttacaggcagcttttgctgacaactgctggtcttggtgaatacatttctggtgctattctttttgaggagactctttatcaatcaactacagatggcaagaagtttgttgactgcttgaaggaacagaatatcatgcccggcatcaaggttgacaaggtatgcatgccatgatcttattcttgtatcatgttagcacacacattgcttctaacattatgattctcgctacttgattgctttggtttcatgaatcagggtttggttccattgcctggatccaacaatgaatcgtggtgccaaggtcttgatggtttggcttcaaggtgtgctgagtactataagcagggggcacgcttcgcaaagtggttcgttcataccccaattatttatgtgtcaactaatcttactggtatttcccttctaaagttgctatggttactgatattctccaggaggactgttgttagcatcccttgtggtccatctgcattagcagtgaaggaagcagcatggggacttgcccgttatgctgctattgctcaggtaacaaaataaactgcaactgtgcaaacatctcaataaaattttgtttgattgctcatggagctttgatgatgtaccttcctgcattcatatgggcactggtgctgttcatgaaatcatacacattagttgtgctacagttactgtgaatagaaagacatggtgtttgaatggattgaatggaggtcagacttcattttggacagaatgatgtatgaatttatttggtgttcagcctgaggtgtttataatcatctaatatactaggtgaattccccgcgcgttgctgcgggattttcttaaaaataaattattatatatatagtatttctatatggtattcggtctattatgtatgtatacatatgaatttgacttgcatataattttattgtattagatctagtaaaaaattgctaagctaatagaacaaaaactaatatttggttacattatagaggaattaattggtgatgaaacaaatagtgtatgtacatgacttgtatgttaatagattaaagatttaaagtatttcacacatggtcattttttgtaattaatatgggatgacatggacttagtggggatgatgtggacaccttgcatgaagagatagaatatttagtgggtcacttagtgaggaatgatgtggacatcttgcatgaagagagaattcatctagtggggtttagcttataagagttatagattattatccttcggcacacagcgtgcttaacaagttaacatgctatttgagttgacaccacacatgtattcttgaaatggagtaaaaaaaagtaatcatttacctttgcaacgtactcatacagccctgatttgggtgcatgctttacaactttacactagtcagaaataatgtctttgtttatcatgtttcaacatgaataatctacaggataatggcttagtgccaattgtggagccagagatccttcttgatggagatcatgggatcgaaacaactcttgaggtggcagagaaagtgtggtctgaggtgttcttctacttggccgaaaacaatgttctgtttgagggtatcctgctgaagccgagcatggtcactcctggagctgagcacaaggagaaggcttctccagaagccattgcaaagcatacgttaacaatgctcagaaggagagtacctcccgctgttcctggaatcatggtatcatcttgacccttggagcaaataatctgcatataaaatcagatcatcaatcattataaatgatttcttctgcagttcctttctggtggtcaatccgaggtggaggcaactctgaacctgaatgcaatgaaccagtctccgaacccatggcatgtatcattctcctatgcccgggctctgcagaactcggtgctaaagacatggcaagggcgccctgagaacgtggaggcagcgcagaaggccctgctggcgcgtgcaaaggccaactcgctggcacagctcggtcgctacactggtgagggtgagagtgatgaggcaaagaaaggcatgttccagaagggctacacctactaacgtgctagcgagatatatttccatgacattatacttatcgttttggtgtcacggttttttatttgggtacggtcgagtgaataataaccaaattgttggtgccaacaacttctagcattgtatttgatgttagagctcctgtagaaccttgagaacgaacatgtactctgagaacgttaagtgatatttgcaatctggtaaattatattcctagccaaggtgccacctgtgccaagcacaacaggtgaaaacctgccttgatttttgtatgcgcaagtattttcaactctcgctctgttaacccctacgcttatctagtttgatctttgggcgaaaacttcggtttgactgtcattcactgtgtttacttcactactggaggattaagtttgactgtcattcactttgtttactgcattactagaggattttgcaataagtggtgatgatttgtgtcactatcggcagtttgtgttattagctgttaatgatactcaagctgtgtattactcttcgtttgtgtgtatcattccgtgtatgtatcatcagccggttgtgatatttttgcttaacggatgatctgacctgagttttatgtaatccgctttattcttctataagttggcattcataggtcttgtgtgtgtaatccgtgcggtagtcttgcccattcgatctccagcgatctccatggaggccgactggccaaattgccctcttcaatctctgggcgttc

SEQ ID NO: 3440 - DNA, 12894 bp, Sorghum bicolor
agtggaactacaggccggaggtggacgtctagagcgccggcatcatcccctacacagtggtggagctagagaatcatatagggcgtgtggtttgcggtctaaagatggagtggcagataaatttaagccaacagaatcttaatggcaccatagccataattttagcttgaatgattaaaacacatcaacaatgatgtagcggtaataatatatttgtacttagtaccatttatcaaaacacagtaaacgaatcccagtatcgaggttggcaaaatacagaatccttaaacatggaatcctcaccgaaaaagaaataaaacatcattgtaagcaagcaatttatataatgtatcattgaaaatttgaaaataggtgcattacctcttatagatcaaatctatgccctttttcttttatgttcacgaagcgatgaaccacaacatcattttgtaactttctttaattcttctttgtcgacattgcaaataagtctattactcaagtgcacatcacccatgcggttactaagagttgttttcacaatcttcatccccagaagtatttccgccaccgttgcagtagcaattgacaatattagcaaaaatttcaaaagttaataaactaatggataacactgtttttttcttgtctccaccattctttgtgaaagctcaaggatagtatttatgttagagggtcaattgtcttctttcacatcagcaatgtagaggccaaggtggtgtctaagatttctcaaatctctagagctaaaatcatcaggatataattttgctaggtttaacaaactctctacatcaaaatcatgaaatgaatcgcttagattgaaacgtggctttaagctcttgaattagccaatctataagatcattaaaacaatccactttagcaggataagctacttttttttttcctttggctctttggtgtactccttttatctcaaagtaagtgcatatctcacgtctcgacgagtcaaccattccaaatttgactaaaattatagaaattaatataaatatttatttatatctttaagttagtttattattaaaatacataacatgatcaatatatataatgatatttattatattagtattttttcatatatatttggtcagaggtaaaattggttgagatgcaaggagacgtttacgccttgtttagttgccaaaagtttttaagattttcagtcacgtcgaatctttggacgcatgtataaaatattaaatatagataaaaattactaattatatagtttgtctgtaatttacgatatgaatcttttaaatttaattaatctataattgaacaataatcaccaaatacaaaacggaagtggtataatagccaaaccaaaaaaactaaaaaaaggccgaggagatatatgaccggagaagatagggtgtttggttggaggtgtcccgtatctcctcggctggccatatgccagccgtgacgccgaaagccgagccacaggtggtactgtggtaggcacgggcacataggcagcgcaaccccttgtagcccatgggtccatccgcggtgccttcggccttcgtccctaccgagaaaaacaccccaaaacagtatcttcggaggagagtaaaaaaaggatgcctacagtggtgtaccaaggcgttcaagagatcagacgcagaggccgggcctcggcgtacatacagctacaggagcagcgtggatacggtgacctttcaatttcagcaccagcatcctctgtctctctcacagtcacagcagcgggaagcaacaggcaacagcgggggagcagggatgaggtgacgcgcggaccaatggcgccgagggtagggggccactctcctctgaccacctcgtggcggacacctggctccatccatgggcctgggggatcggagcggcagtctggcaggcaccaccgtgacctttgccataaaaagctactgctccttcgtacgacgctgtcctacaccctgcaccctatacactgctacaggctagagcttctgttcatgctgccgcgagcgccaacgcggccgtcctcatcccatcctaccagccagcaagcctctcgtcgcaattggctagttccataaataggagtagtaggcagttgctcactggtcctttgcgcctacccagcctctggactactcccgaaccgcgccgcagatctactccaacacctgtaaggattttgctgtcgctgtggcttttccggcagctagctagggttcttctccctcgctccgatcctcctcttcttttctttgcttggtcaaattactcactccatctctttctcgtcttgttctggttgttggcagctgcagcggcggcggcgccgccgccggtggaggacagcaagagaggcacgatggccgggaagagggagcggatagcgatccggaggatcgacaacctggcggcgaggcaggtgaccttctccaaaaggcggcgggggctgttcaagaaggccgaggagctctccatcctctgcgacgccgaggtcggcctcgtcgtcttctccgccaccggcaaactcttccacttcgccagcaccaggtacctatatctatctatctatggacacagaccttgcgccgtgccacacggctgccatccggccaatctatcttgctcctgcgcgcgtagattccgtgttcttggatttcgatttcgttcttccatctggcctgggtcctagacctgcgcatcttggtactggatgccctaatctcgattccgtatttgttcttctttaattcggcgtcttaatcgattgatcggttaattccacaattagaaacctgatttctctatttcttgagatcggggattcttgtctcccggtctccaacaacttgggtatgtggctgatccgctgtccctttttctagaccaagcttgtctacgacatgtgtcgcatgtcgattgatatttgatggtcgatatttcaatgtatgattaattaagtaactcgtgccgctcgttctgttgatcgaaggagaaagttcttgcttgttcgccaataagttccttttccccactgtcaacaatgactaagattgtttgactgtcgttccgagatcgatcattatgtctttgcgcgcggtgtcattttctcccacattttttcagagattctcatatgctcgcttcgtggtcctcgcctgttctaagctgggattggaggaaaaaaaattgtccctggatttatcctgtcgctccctaacatattcagagtttattaatattaattagtgttattcttttttttctatccgcataaggatatatacttcaaggtttgtgtggtaaattcgccggattaactactttcaagtaattaggcaatactttcagtaacccaccccagaaaattagtgggaaattcaagggcatgcatgttgatcagtcagtgtgatttcatcatatctaatttcttatctattgatgtgaattgagatagaataaggatccttttcttatcttggctaaattactaggaaaatataggatatgctttcaacatttcaatgactttttttcaccgctcttctcctgctcttgccgtccctaaagaatgcacttcttcttttttttagtaaacatatattacaaatatattataaataagtactattaaatatataataatgaaatatattcttacaacaaatataatttattaatgttaatatttttataaatctaggcaaaaaatgacttttgaaaagaattgtgtatttcttttttagggagtgagtatatataatacagtactaaaagaacttggaatgcgtggaagagactagacagatggaggggttctctcttttggcagtgtggcagtaaaaaacagatgctctttgacaaaaggtagatgtcacaagtcttcgttctgatctgcaacataattttttctgcaccttttgtacaagttgcttcgatttccatgtttcttctattgctcttgttctaccacgtttacatttctatttttaatgcacgtttacatttcttttgacttcaccgccgatgtggatcgtccaaattaacccggacatcctacctagaaatgctttctagctggtcagagctttctccacatgtatcccgggcttgacaggaaatgcctcggaatgttcatgcgacttacatgatctatcgttttcaccctaagaaaaaaaggaaaatgtgatacctcattccgtactttataactgtatactcggacctttatttcctctttagaatataatgatatgtaactctccttcgtattttacacctaatgcaaggcacatgccattttgttttaacttctgctccctcagttttgaaatattagagatttttagttgtcctatatgttaaaccatcctaagttttactaagttcataaaagaagtataatactatttacaatatcaaatgatttttctggtaatgtagctagagctgtgaaaggctgcaggtagccaagaggctaaggttgttcacttgttttttcacaacacatatagttacaaaaatagttctgaaccaattgtataaatagttttttttaccagtggcatgatctcatcatgcgttatattgagataaacttggtaaaaaaaatgagaatgacatgtgagacaaaggtcagaaattgtgtcgcaccatatagccaaactttgactaagaattttgatgactgaagtataacatggcaaatgttttgaatgaatgaagcatgtccttgaccctaaaaatgttgagtaaaggcagcccgaatcaagaaaataataggatagtctcgatattaaccatgtcataacactccatacacagatcgaagaaactacattttcaatagataatttctgcaaaatacatttttttcagccaatccactatcgtttctccgctatcgtctacctcatacacatttaatcttagtttccatgtagaaatagtttcttgtataagaaaccatgttccttctctcagccttttaatttccaatactacaacaccattttacttacttggcatcctaggtgagaggagtccagcactaggcgcatgcagagccccagcgcctagtatccgtggatggatggagggggggggggggggtaagaggagtcaagcactccagcagtaaatccacccgctgatccagcgcatgcagagccccagcgcatagtatccgtggacaaataaaaaaagtagttgcgcctaatatccgtggacgaagggagtaatgctatagaaactatattctagtcatctcattaggactgccctaatatttgatttatattatattacagcagtaagtgttgaaatcagcctttttggcattttgagcagctaagccttaactatcactataccatgacgtttacccggatttgagtggcatgaattgatctaaaccacagctttcagggtgaattaaatgcttgctatttaaaaattatggagacacgagagctttagacatggtgggcagtggtacatgcactgtatactccgtctaaaaaatataattttatatgaatcaggataattttttaaattttagttgtaaatttatatgaaataatatcaacatttatgactcttaatatatttactataaaaatatattttatacttaattaatttaataatatttatgtggtataataaacattggtaattttatatagatttgatttgagtgaattgcgtttgtttagacagttaaaatttgtttttatatccacagaaattcatgctcatagaaattagtctcatcttttcgtgaccaacagtgtgagatgctggatcagtttcgaattcttaaaaaccagtttttgcctcggtttttaagaatctgaatttatgcatgtattaatctttggtcataagaaatgggcacaatctagttaccaactgacaaaaactgacagcaaaaactaacttgtttagatcatacatagtttctaaaaactaaattcttaataactagttaaaactagagggatccaaatgggcccttaaatcacttgcacagtcgcactagctgcctgtgtgcatgacatcatcaggagggctagggaaaaaagactgaccaatcctatctgaaggcatttttgcatcgtacttcgtttcatatttgcccttgggtgtcaaaaggcagtgggcatttactacgtagcacgataaggttagcattgctgccccgccacaggacgaacacaactcatcttttgctttgtaacacagcaacatcatttcattgtaggtgtctataggatcaatcttgaggccaagcattttaattctaggcacacaaattttgttgtggcatggatgatgtttttgcataccattgtgcataaaaaatgttttcagccaaacacaattaaccgaaaatttagaataccaatctgctaacgaaaatgcaattgtgctgctgaccgttgcagtgcataaagtttaagcaggtagttaagattttcttagagtttaacactaggaacaccattgctactattttctcctagctaattaacactacaagttatgaggctgtttgctgtcatgtaagctggatgaagtagggctgaataaaatccccggtacagtgcatgaaatatcagtagttacacagcagtatattgctgtactagcctcccgtgtagactgatatcttcatttcccaagcatggcctacttaatatgggtttctagaaaaataatacaacatctagttgctgagacaaattgtcttggtattgaagccatcatctttatctgaagtatacgtcagtcagtcgtattattatttaatctttactaaactgtgcagtcagctgatcagttgatctgcccaatatttctgcagcatgaagcaggtaatcgatcggtacgactcccattccaagaatctccaaaagtctgaagcgccgtctcagctgcagtcacatgtgagctaatctgaattcatcctgtaattgttaactactgtttactccaaattgcgaacacaaaagcaatggcagaatgggtacaacgatgttggtactaacagctttgggttctgtgatgtgtcacatgtgtgttacagattgatgatggcacttgtgcaaggctaaagcaggagcttgctgaaaccagccttaagctcaggtgcacagcatctctatatatcctacaattaatcttcacatacggatgtagttcaaaagcagcacaataatctacatgcgcctgacagttttatcttttggaacaaagcacttcttttttagaaggacacgaagtttccactactatacagatgatttagaaaagctccaattgtttcacagagatttatatgttatcttttagaacaaaatggttcttttttatacaaatctcgatttagaaaagtcccattgtttcatgagattattgggattttcagctggccccaaaaaatccaacagagggctcagctaatatatagactgccttggaaattctaggagtcactgtaacgcacccattgcctttgaaaataaacatttctaggaacggttgacgttagacccaagcatttcagtccaagatcgggtccgagccggttgggcttagcccaacccgcattcctgacatggcctagacggcaaaacatgatccccaaaaaaaatattggcctaagatatgaatttcaattgtctttctaccaaaaattagtgggcaacctgctgaagctcgggccaagactataaaacaggcatgactcgcccaatggaacgatactagccatggcccaccttgcaaaatgctaatgcctggttggtgtttttagatttttcaaggcctatttgtaaggtggttcttctgcagaaatagttgccgcacaaataaatcataagtttttaaaccaagttatatgaagacaaattttatattaaaattgtacaactccaagagacataaaatttatagttggtaagttttttatttgaaatcgtttaggggacgcaaaatatttattttcatttgaatttgctggacccaaatattcaatttaaaacaattattttaaatttaagttttttaatatttcagatggcctatgatggaggcacactttatactaaaattgcagtgctcgatgggagtcgatgattttgtcacctgatattgtttaagagcataaatattccaaaaaaatccaaagaagtttttttgcgagaaagatccgaagaagttaatacaaaagaatagcttctgatatctagtcacaagtgaaggggggcatagggagacttgaggtaaatcctaagaatagctcctgagatatctagtcagcaccagtcttttttgcgtcatttgtcctcattcgtgcgcatctgggaaaaactttccgatcggtcacccatctctaaatttctttaggccaagcacacttaattttagagttctttggagataaacttccgaaaaaagaacttgcaacttgttggtataaatattctattaatcctattaagcgctgggccgagatgttacatcctcaccctcttaaaagaccggcgtcctcgtcggtcaaccccaagctaggaacatcccctcttgactacgtccgtttgtccagtgccaacgcatgtgtcatgttgtgtgaccactatgggtccacaccaaccatgcgcaccatatctgcgcaattgcaatacatgcaacccgtgaaaccacaagagtcagctctgataccattatataacgtcccacctcttcaaggtcaggctcgcttacatttggcagcttttctaggacatagactaccctaacagaccaacatcagtctttttctgcacactttgtccccactcatgcacccatgaaaccgcgagagtcagatccgataccattatgtaatatcccacctcttcaaggccgggctcacttacatctagcagtttttctaggacatagactaccctcacagatcaacaccagtctttttttgcacactttgttctcactcatgtccactcgggaagaacttctcggttcacccatccctaaatttctttaggccaagcacacttaactttagagttctttgggcttttgggaaaaaaagttgcaactcgttagtataagtattctattaaactctgggtcgggatgttatattgaggtcatgaattcaaatccttgatacgcgtatttctttttttttaaaaaaatattactgacttatgggggtagttgcttgggcatgagaaaattattttcctattttttgtgtttgcattctccggaaaatatttcccgaggccaccaatcatataaatcaatttttagggactaagatggtgcgaacctacaaatctttgatttatagagaccttttcatagaggtatgcgcagatttcgcctggacaaatctattttgacctcagtgacattgtttttgtagtagtgtcatgttgttcaccataggtagaaaaagagtttgattcaatttacaaagcaaaacctggcctagaaccatacatatggttagagggacacaagcaaaagaccaaagtaaaagaccccaaacgtccaacctgaatcaacccaccctaaatgtccagcctgaatcaacccacaacaaacagataaccattcttgaatacattatttcataaattatggttattatttttctggctatcctctccacaaagttggctctcttacctgccccaagcgagtctcactggctatccctatgtctttagccatcgtggtacccaatcatcacacactttgggggtgggggccattagggtcaccatacaccctttggttctgttgggttaggagtccaccaaggggttgttgcgttggttgttcatcatttctttgcttagccttcggatgtccttctagtcattgctgtaattctatgccctatagtgttgtttggtgcttagggtacaggatatgtcatatggtgtatggtgaaagccctagctagatttttgtcgctgctatacttttgtgctctagggttgtttggtgtggtcatggaggtgtggggtgagagcctacctagctctggttgagaccaacaatggtgatgctctcaggtatcattcaccttgttgagggcattgttatgagaccccgttccacctatcttccctagctaggtgaaaacctagttcacttttgtcagatgaacaatggcatcgccgtgtgggtaatgtccttctaagtggcattatcttgagaactactccactctaccgttgccattagcttaggtacgaggtcgtcttcttccacactactcgtcggtaattgttgcttggtcatcacttgtggacctaaagcggctgctctctcaccgtgagttatggttactacttggtcaccattgtggtattgtgtcacctactttcttgtcgtggactgctttttgtgcagtcatgctatttagttgggtgtttgttccttggttgtcacttgtggagagcaagcttctctcttgtgatgggctctctagacattgcttggtcgtcgttgtggtgctatgaaggctactctctggttattgcttggtgatgcctgtgctgtttttgtgtttgcttagtagttatagatattgttgttgcttggtcatcctcatggagctgaggtggttgctctcatgctgcaaagtttttggttgcttagttgttgctgtggagcaaaggtggaagaggaccgaaccgatgccggcagttgttctcttgttgcggtatttatttgctgctttgttgtctcatcaccgcctctcacatgcttgttttgttgtatttgttggaggtctaggttgtagggttagtcttttgtcttgtgtgtgagagagagttcttggttgtagccttagttttgcttgtttggtagttcggttgctttatgacgtatgtttttgttcctccatggtcgccgttaagatggtaatcgcttatttaactattacctttctttctgttattttttatttagtcgttctaaaaactactcctttttgacaaaataggttatcagcatgttataaaagtaaccccgttaattctctacaggcagatgagaggagaggagctccagaggctgagcgtccaacagctgcaagagcttgagaagaccctcgaatctggcctcggctctgtactcaaaaccaaggtatctgatactcgtgagttgtgacagcatcagactggactgtacagtaatgatgcatagcataatcatctctttccctgtcaaaattgtagagccaaaaaatccttgacgagatcagcggtctggaaagaaaggcaagcaaattcccttttcaaactgctttagttaatttatttcaaaacaagatgcatcagacctaggctagtgctgcagcttaatcaactgctgtatggaaaatttcagcacctcaccaactgatgcaactgaaatatttcagattacattcagccagatcccatttcctgccttctaacagcgtcagttgtgttgttgaacagagaatggaactgatcgaggagaattcaaggctgaaggagcaagtaaatccctgctctcccctgctgagttttcgattctgcccttcctttgtttcgaacgatgtctcggtgcttaagccacggcgatctgaagctgcaggtgacccggatggcaaggatggagacgcagcttggcgtcgattcagaaattgtgtatgaggaagggcagtcatctgaatctgtgacaaacacatcctatccgcgcccatcaacagacactgacgactgctccgatacatcgctcaggctagggtgagtccagagttcttcccaagcagacctcacaccagataacttgttcatctcaagccaacgcacataagaaattccatgtaaatatgctggtgactcgtgagatgacgcatatggaaatagcactaaccatatgaatctgcatactgtaggctaccattcttcagctcgaagtgatggaaaatcaggaaacttgacatgttcagtagcggagcggtgctgattacttgccctctccgttctggattggggagcaggattgctggattagtgaccaacgcgtcgcatcaaaataaggcattctgagtgctgtatgatgtgtgtattctgaaagtgagactgcttttgttatatacaggcagcatggtaataatacaacgggtacccgctaggatgctacctgcagtccgtgttctgtcctctgttttttagtactcgtataatccccctgcaaaccatgtttacctgcagctcatgcttttgttatacagcatgatcatctttaggagttattccagtccctgcaaatgagttccagtacttgtgcccttcgcaatatcggacatgtcacgctgttagtattgaggatttggagtctgcatgctttttgtagtaggaactttgatgcgaatgtagcatcagagcaggtgaacttgcagcaaagtagcaatggaagataaactaaagatactccaagctaaaagagacacccactaaagatactccttggcatccacagggagatttctttgaactttctgcttaattcgtacgtgttacacctactcatggttcgcattttggctttaacgaatgagacacccactaacatgcatgaagcctttcaagcacctctctcctgctttcagggacataattgtcctcatatctgcagatgatagcgaggtgagacatgatggcactttagaatctttattagctgaagcctggaggctaatcatgtggggtcggttctgttctccgaatcgcgttcgcctgaagcaaaaaatgtaatcaggcctacagtttctctaacgttgcagtcaga

SEQ ID NO: 3441 - DNA, 3523 bp, Sorghum bicolor
gaatgtgcatatatgctaaaatgctcagtgcttttgtaaccaaccccttcattgaattaaggaactgcacctgtatcagatttcctttcaaaaggaacacgatagcattattttgcttagcataaatatgaatcataagtcattttcgtttatttagtttattctatctatctatctatctatctatttctctgttttaaattataagatatcgctttttctagatatactatatgtctagactagatacataatagaagtaatgtatctaaaaaataaaacgttttctaatttagaatgaaagaactatctatagtatattattatgtatctagatatatatttaataaaatgagttataatttgaaatggggagagagtatcttagcatgacagctaatctctataactaatactcaacttgtaaaaaaataaatgagaaccaatttagatattcacctaagagcaactccaagagagttgataaaaatggatgaaaattcaagatttagctaacatctaaaatagaaaatcatgcaaaaaataaaaaatctccaacagtctttctaatacggcaaatcatatggctagtggcaaatcatatgactagtaggacatgcaagctatatttaccatgccagaactcctggataaatgacttgctattttagcaaacaaaatacaatagctgttggactctcttttctctctcaaatagctaaatatagaatacataacatagataatttttttttaagttgctctaaggccctagcgggatagctccgtggtcggctctgtccaacgtggaaagggaattatagactagctagcgcctagcgaatcgttaggcgatttcacgtcagctaaggtcttgttagtccagtcttaatgcatgtttcatgagaatgttatacatattaaatagggtgccatataagcaaaattgctgacttgccagagtcattaaataaagaagttttataagatgaaagaggagtttcatacccataaaactcatgtggctcggttacctagtttgtagtcttggtaactgtgtcatgaaactatgcgttgagacgggccttagttcaccccaaattcaaaaagtttttaagatttcttgtcacatcgaattttgcgacacatgcatgaatcattaaatatagatgaaaacaaaaactaatcacacagtttaactgtaaatcacgagacgaatcttttgaccctagttaatctatgattagacaatatttaccacaaacaaacgaaaatgctacagtggcgaaatccaaaaaattttcaaatctaaacaaggcctaaggcgaacagatggggctgtttaggagagagattacagatcaattttattttattcctcacttattcatatcagccgatgaaaggtataaggtcttttgaaaacactctaataagtgctaatattttacctaccatctagctaacaactattcctcattattggctaataatttaagaattgctaacatcttacccaccgtttagctaacaattggtatacataggccttgtttagatctaaaaagttttttaattttaataatgtagcacttttgtttttatttgacaaacattgtataatcatggagtaactagacttaaaagactcgtctcgcgatttataggcagactgtgtaattaatttttattttcgtctatatttaatgttctatacatgtatcacaagattcaatgtgataaagaatcttaaaaaaattttggttttttgagctaatcaaggccatagttgagtggtcccaacgggccctatatcatatggaagcttgactcgtgactcttgacttgtaggagacttccactccagtcttgctggcctgggtcctgggctcctggctggtgaggagtgaggagtggtgatagaatcattaaaagcagcaccggtcctgcttttgcgccttgctgttcgcataaacaagagatcgtactcctcccaagcaatgtatccgtcggcccctccggacgcgtatagtaacaaattcagcagctccggggctcccccaacggcgccgccgccggcagcgtaccagcagcagcagcacggggcgaacatgaacccttcacgccccggcggcgggctgaggaaatggtccaccggccttttccactgcatggacgacccgggaaactgtaagtcatccccatccccatccccatccccatccccatccccacgttccccgcttccccttcacagagacttcatagcagttctatggcgattcgagctcacttccatggcgctcatcaggtctcatcacatgcctgtgcccctgcatcacgttcgggcagatcgctgacatcgtggacaaaggcacctgccgtgagtcgatctcctctttcagtctcagcttcctctagttcgcagtctctgaaacaactcaaagatctccccgattcaccgctgcaaaactctgatttggcagcatgtctcgcgagtggattcatctatgggctcatctgcgcctcgacggggatggggtgcctgtactcgtgcctctaccggtccaagctgagggccgagtacgacgtggatgaaggggagtgcccggacttcctggtgcactgctgctgcgagcacctggcgttgtgccaagagtaccgcgagctcaagaaccgtggcttcgacctgggaatcggtaaggcctggtttagttaaaaaataaatcgagattatctgtcgcatcgaatcgattttttttacccatatttattaaatataaataaaaaataattaattatattaaagtatcacttttgtttatatttaatacagtaggcaacgctaaaaaatgcaagcaagcaacctttttaccgtgtgtgtgcgctcatatccatacctaccgatgtgtcgtatctgtgcgtgcgaaggttgggaggccaacatggaccggcagaggcgaggagttaccggcggcacggtgatgggggcgccggccataccgctcggcatgattaggtaggtggtggatgggaaatggcaacgctttgctagttgctttcatggtgacattggtccctttgtgttgctatgtacgtactccgtaatttatttttgtttcttcgaacctatgtaatttatctggctttttttcactctttctcgtctggagtcgtgtgtacgacgctgctttttagttgggtgtgaatcgtgcccgtggtacctgtaatatactgtattctgctgaagtggagcttaaatttgaaacccgccatgccggagaggcaaatggctatccactggagtagttgagtggagcttaattaagtttaggtgatttagactgtgattggtttctttcccaatataatacaatggccagatttgataaatgcaaccttttgtttggttgtcgtatccatccacacaaacgttggagacaagcgaagccgtttgtttggtcattcctacctcgtctcgtcaaggtttaaaattctgggcatagtaaatagcgacatcttt

SEQ ID NO: 3442 - DNA, 8679 bp, Sorghum bicolor
  misc_feature (26)..(125): n is a, c, g, or t
taaaaaattttgcgaactaaacaggnnnnnnnnnnnnnnnnnnnnnnnnnnnnnnnnnnnnnnnnnnnnnnnnnnnnnnnnnnnnnnnnnnnnnnnnnnnnnnnnnnnnnnnnnnnnnnnnnnnnaatttgttgggaacgttaaagggcaacaatccaatttaaccggcccaacaaaaagggtaatgggaccatttccaactaagagggccaaaagggctttcatgacagccaagccgatgcaaacacacactggcacaagtagggggtgggggggggggtactagtagataagatagatcatgggtttgtacgtagaagaatttatagcagaggcttgactttaaggactcctgacacgcaagttagcatgcttgattaggaatgtttttccggatgtgagccaaaaccccggaagtccagcctctgcatccgtctccatccgtatcatggcaacgacgacgacgatgatgatgaaggccaggaggggctccaccatgctctttttctttgctttgactctcgcaggcaggcaggcagcaccaccaaatccaatgattcaagaaaacaataggcaagagacaaagaaaacaaaaactggcagtagcccaaaatattaaaaaaaaaggccggccgtagtagggaggaaaaaacattagaaagccgaaaaagggagcaggaccccctggctgctttttttctgctaaaatggtggtagagtatgagaatggacatgcatgtcgagtgagagactttttttttttttgcaccaataaagactgacttgtaccagacgttgattatattgtttggtcgaacaagaaactataacttagggggtttttctcgttttcagatgagaatttaattaaaggtggggttatatggcgtagcgtaatcaataaggcaaaaaccggcctacctcggcaagaatttcttccaagtcagaaataataataataataataaaaaataggaccccacaaattattacgcataaataaaaaaatccagaaactcttgttattaaaccaaaaagaactggaagcagaacatcagtcaattaaatcactgatgaagagcagaagttttatagaaaattaaacagaaattttacagaaatcggtttattttcacgagagaaacgaaaagaaaaaccgaagaagggagaaacgaaacccagaacaggagaaagcaaggcaggagccaaaacaggagaggcggcgagggaccagcgtgcaaagcgaagactactagcgtgctgcgtgccggccggacagacggagcagggaggaaaggcagccgagagcaccaactccccctcggccctctgaggagtctcgtctccactccgctccactccacttcgctcgctcaaacacacgagcttccaacgattccattcccagctcgctctccccgcaccttttcctccgtccatccccccgttcctcccaacccatttcaaatcgcaccaaaaacccccccctcgagggccgaggacctggagcgtgcgaggccgcccctctccgcgctcgcagcaggcacccgccccgcgtagatcccccccattcctcgatcccgtcgctcgctcgccgccggtcagattccggatccgcggggaggtctcgtgcggaggcggggaggcgctgctgtccgtggtccgtgcctgcctgatcggttgccgcgagttggcgggcgggtggtgtggtggtggtgcgccggcggtgggttctggcatggggttgcggcgccggggcatttcgtcgaccaggcggtgggcggcggcctaagatgcgagggcggctggaccggggagtggggcaccagcagctaggggaccgcttctcgccgtgcgccgccggcgtccgcctgctcatgctgccggccgcccggggccctcggcgacgggcattggggttgcgccgcgctcttcccgcggggtgctgctgagacgcagacgcagacgcgcgcgcggcgccaccagccgctcgccctgccatgggcaacagcacgtcccgggtcgtcggctgcttcgcgccgcccgacaaggccggcggcggcgtcgacctcgacttcctcgagccgctcgacgaagggctcggccactctttctgctacgtccgcccgggcgccgtcgccgactcgcccgcgatcacgccctccaactccgagcgctacacgctcgattccagcgtcatggactcggagacccgcagcggctccttccgccacgagcccgccgccgccgacgacctggccgccgccgccgccgggctgcagcgcccctgcaggagcttcggcgagaccaccttccggaccatctcgggggcctccgtcagcgccaacgcgtcctccgcaaggacgggcaacctcaccgtctccctcctcgccggtgacgtgcaggagcccgccgccgcgttcgagagcaccgcctccttcgctgccgtgcccttgcagccggtgccgcgggggtcggggccgctcaacaccttcctgtcgggcccgctggagaggggattcgcgtccggcccgctcgacaaaggctccggcttcatgtctgggccattggacaagggagccttcatgtcaggtcccatcgacggtggcagcagaagcaacttctcggcacctctttcctatggccggaggaaggctcgtctggggctgcttgtacataggattagcagacccatgaaaaccgcattgtcaagaactttcagcaggagctcacacaatccaggctgggttcagaagtttctgatgcatcctatggctcaactgccctgggcaagggacgcaaagtccagatcagaaggctcgcagaatgggttggaacctgggatacctgaacccgagtataatgtgaccaggaaccttcagtgggctcatggaaaggcaggggaagatagggttcatgttgttctatccgaagagcaaggatggctgttcattggaatctatgatggttttagcggccctgatgcacctgactttctaatgagcaatctatacaaggccattgataaagaactggaaggactgctctgggtttacgaagacagctctgaaaggtgtgaccatgtatctaatcttgaagagggtgaatcagcttctgcttctgtggatgctcctcatgatgataatggccagttccagagtgacaatgggaaacaagaacagcttggtaattttggaaaacaaaatgtctcacctggaaagggttgtgatgaaagtgtcttgcaagttcaaccaaactgtaccagctgtgaagagaaagatttggctgcacaggattcaagtagtcagaagttgggcagggatgagatagttgaggaaatggctggagctgatctgggaaatgatctccaaagtagagaatctcacaactcgaacagcggtctttctggtacagatctaaacaccagctgtacctgtgcaacagaaaccagtgcctattgtgatcaacatgccaagttcttgaaagaaaacagaaagagcaagcgtcttttcgagcttcttgagatggaattgctacaagattataacaaaaggttatctaaggcgtcactagaggaaaggaaaataccgagcttgcatgttgcacaggcaggcactgcagaagggagctcaagaaacgcagctgagatctccaggtgttcattggcagcaactggagaatgtttcgatgattctgaagatcttggaagttcaagacatgctgatagtgtacttggcacagatcttaaagagtgtacagggtgttcaatatctacatcttcatcagagcacaagcaagttacgagaagatttgtattcggatcaaagttgaggaagatgtacaaaaagcaaaaaatgttgcagaagaagtttttcccatggaactatgattggcacagagatcagcctcatgttgatgaaagtgttataaaatcttcagaagtgactaggagatgtaagtcaggaccagtagagcatgatgctgtattgagggcaatgtcacgggcacttgaaacaacagaggaagcgtacatggaaattgtggagaaggagcttgatagacatccagagcttgcattaatgggttcgtgtgtccttgtaatgttgatgaaggaccaggatgtatatgtcatgaatcttggggatagccgagctatcttggcgcaggacaatgatcagtacaatagctcaagtttcttgaaaggagatttaagacatcgaaacaggtcaagggagtcacttgtccgtgtcgaacttgataggatatcggaagagtcgccgatgcataatcctaacagccacctgaacagcaatacaaaagctaaggaactctcaatatgtagattaaaaatgagagcggtccaactgtcaactgaccatagcacgagtattgaggaggtaattattctgttaaacaaatgctattcttgttttcacttcttaatgcatgtgctattatatacatatttgactttgagttcttcatctaccaatcctgcagatttagcaattcttttgatcaattttctttatttccttaaggaaatggtgatatgatataataacttctagttgtgctgtgtgccttagttaatacagcgatgctaaaatatgtagtctcctgattcgagttgattgtggcatcagaatttgataggattgattgtattagagtctacacctcttcatatacccaaatactttacttgatactgtaaaatcatgatattgtggttttgtaaggtattggtaaagtggtaagtagttcagttaacaggaaattagcaaccagaaaagttatttagaaaataaacattatgctctagctcttatatgtgcttctgtgattttttagacacttcctttcagttggtcaaaaatattcaaactcacccgccaccttgaactttttgaagtactggtttggcccatcatcatcacgtgttaaaaatgaattgaccatagacttcatgctcaatacttgtgctagtgaatacatgcaaatcactgtgccttttgtcctgaactgcagccagatggtcttttttttttctcgaacatgcagaagagttgtgtatcattgtattaatagaagaagagagttgcacatgcacacacccaccccactgtcatgataaagctataattgccgctttgaagagaaagaaggataacccaacccaacaaacttaaaagcccgagctaggagcagtaaggaaagtgagccccttagctcatgccgtgcaccaaagctgagatttctccccagcaagacaaagggctgtacctgtaagtaagctcggagaaatgccatttaacacagtcgtttctgtgtttccacagcaaacagccagatagagtctcagtctgacttctttgagttatctaagatgaccagttgagcttactcactaatttagctatgcaggaactaccaaataagttctttaaaacaaaaaaatgttgactctaatatttctgtttgtccaatataccaaattccatatctaaaataaattttgaaatataaggattgctatattgattattgaacataagtataccttgctagctacaattgttcagtacatcctttataagagatctacagaccacaacctagtttatttgcatgtaagctcatagatgacgtgctaacttccatttactgtcttctctttatgaattcataccaattgatttagcagttatctgaaaggtaatcttttgcaacctttcaacatttatttttgtgctggacattgcagcagagaaatgagccatcagtactagtttcttcttaaactgcctgggtccacattattatcattttagcatcttgacaacttattgctcattttttatgtcggccttatattgcctgatctttagattataagtgctgtttttatgtactttggtccagtgttttacacgtgcagacattaatttcgaagggtgtctaagtggctctgtttattacgtcctgatgtaaatgaagtcaggctcaggcatagctttcatcatctagaaatgccttcaaatgaatcagtctggtttctgtagctagtttatggtttttgaggcgtcctgtggtgctgaggatatacctggatgcctaggcagcgcctaggtgatatggcataacttaaaccttgtgacacccgggccctggggtacacctcaacacctaggtggcgcctcaaaaaccatagaagaggatataagacttagttttttttttcaatatcttcattcctgctcagaacaaatcctccagttggttcatccagtcacatttgacatttaaagcatttaacttactctttcaaatttcattgttaaatctggttaccgttctaccttgaactattacaatggtgactacaggctacaatttgtttaaccagtttattttgtgatgacgcacttcaggaagtcttgaggattaaagtagaacatcctgatgatccccaagctgtctttaatgatagagtgaagggacagctgaaggttactagagcatttggtgctggttttctaaagaaggtgagttcaaccttgcatgcctatgactgataatttgtccgaccttagtatgtcaaacagttatgtgactatgttggtagtctttcattttttatcatgatgaggtgcgatgtgcctctcatgccagaactacatccttgaattgtttctgtgctgcttgtgttaaatgatggaaacttggtttgtatttgtcggggtttgatcaaggctagtgtaaacagcagactaacagagggctccatgtccactaaaacaccaggaaagagtgagctaaggtgctatagtcattgatgtatatcatctccaatagttgtcataatgaaatatcttcctatcttatttcatgatgcattaaactgctacgtgctggttcatatgacattagcacacgcacacctacagtgcctagatttcaaggtggcggttagaatgcagtcgtcccttatcttgccttgataaccatgcaaagggcagaagaggctaggtctgctggtcaaataactgaagatgaacagattttatggacaattgtggcagtagttttttcttaatttgtttagctaaacttcaaataaaaattccattggtataggatggtctcagtactttgaagaggcaaaccatgtttattttgttgcaacataatcttcttttcaattgcttgagttgtcttttttgcttgttgcagccaaaatttaacgaggcactacttgagatgttccgcattgactatgttggaacatcaccatatatcagctgcaaccctgctgtacttcaccatcgactctgcgcaaatgatcggtttcttgtactgtcgtcagatggattgtatcaatatttcagcaatgatgaggtagtttcgcatgtgttatggttcatggagaatgtaccagagggagacccagcgcaataccttgtagctgaacttctttgtcgtgcagccaagaagaatggtcagttctgcctcttaactattgatggcaataagactatgaaagtacttttgaaatcctaattgttgatggcaatagaaaagaaattttgtttatagctaagtcatttttcttggtgttgaatgacacatgcaggaatgaattttcacgagttactggatatcccccagggtgatcgtcggaaataccatgatgatgtttctgttatggtaatctcacttgaaggaagaatttggcgatcttctggatgaatgttgaaacatgacccagtctgttccttgcagccttgcttagtgtagtaaatctcaatcaggaaaggcaccaatgtcttgctctgtctttatttttcaaccatgttcaaattctggcaatccatgtgccttttctgtcttctacattttggatttgcactgcattcttgggcagtccgagtccgacttgacatatacaggtttttctcttttgttattaggggaaaaaaaggttcttttgagggcagatatgttttccatgtgtccttttaaaatttaattttgtgttgtggggttattatttttcttttcgctacatttttctaattgctagaaaggaccctttttttctaagttggggcacaggtgattggtgtccaggatgttgcggattgatgctaagcaaatatgcattatacagttgcttatgtaaacttgttttggggcataggggttggaaggttcatcaaacagcagcatgtgccagtcacttgtgcggcacttggtgtccaactttgtcagtttgattagtattacgcttgtccgtgctcagtaccagatgatccttttacgccgggtgaaaatgtgtccaggcactgtgtaattgactgacatcttcgttgtttgtcggctcatcagtcatgaaattcagctgatcaggccatgagcccatgatctccttgccttttgtttggattcctattctagctcgttgtggacctgttagttacaaccacaggaggttcaacaggaacagaagattccagaggaatgtgtggtggttatcaggccatgatgaatcaacctcaactatgagataatgacagtattgtgattctgagcttggaatatatgctatgaccgaactttgacccagcattttttctctggagcctttcactgctggattccccattgggagatgct

SEQ ID NO: 3443 - DNA, 3370 bp, Sorghum bicolor
gcaatggagaaccaacgacagaaccgccaccgaagggagatgccggcgagaaaaccggccgggagcgggaagcagagatctcaccggaggagtggaggagaggactggagaaatagcggcgataaccctaactctagaaccacgcatgcccccgatggatccatcccccgcaaagccatgccgcacgcacccagggttcccttcgctgcgccgcgtggtcccggctcatgagcgaagctcgcctcgaggagacggggggagccaggatggaggggtggaaaagcacgagatgatgcagaacaatagtgcgagtcgggaaaccaaacaagggcgtgctgacgtaaatgggcctggatggctctttgcaccatcctatacgggcaaccaatcacccctacgacaacctacctgagtctttgtttagttccaaaaaaaatttcaaaatttttcagattctctttcgtatcgaatctttagatatatgtgtggagtattaaatatagacgaaaataaaaatttattatacaatttagtcagaattaacgatacgaattttttgagcctagttagtatatgagtggacaatatttgtcaaatacaaacgaagtgtcgatttcgcaaaaatttttggaactaaacaaggcctgagagcacgtacaataatgggcttatagccaagctaatactgatgtggaggagaaaaaagataaaagagatgatagctttgatcttatgtaagcaccaagctaggcacaaatacataggtagtggtgagccaaaatagtaagtgttgtgagaagaaataggaaaaaaaagatatttagagacaagtatgagacaacttattgtataacttgactctaatcatttgacttataactaaacacttggctttattattgacgttgctctgacaaaactgccgcagctaatcacaacccaaccgtaggactagtttataggtgagcaagtaataagagtaaatattataatacagccagctgttggctgtaagatttttttatagtatttttgcagcctacttatgtaatggttagctcatcactattaatacatgacctacttgtctatctcacagatttttttggtttttgcgtctgagccgtctgtaagcttacaacccacttttactcttgctcctcttctctttcgtccacttatcattttgctagcttacagcctataagagcactcacaatgtaagactctatcacaaagtcaaagacaattaattacatgttatttatgatattttgctgatgtgacagcatatttattgaagaaagagatagaaaaaaataagactccaagtcttatttagactctaaatccatattgttcgagataataaataactttagactccctcataatactcgctctggtggtcgacacgggtcctgcactggcggtggcggtggtgctggttcacgactcacgagtcacgagcccaaccacgcacgcagggcagcggggcggcagtaaagcggagggagctgccagccgccagcgtgatccggcatggctcggcagcctttccctgtcgccgcacatgccggcccggccctgtcctggccgcgcggtacgcttccataactgccctctcctaccgtgcttgctacggtgccaccaccaccaccaccgtccactgccgctctctcttttctttgctcgggccttgtttagttctaaaatattttacaaaatcgacactgtagttttttcgtttatatttgacaaatattgtccaatcataaactaactaggctcaaaagattcgtctcgtcaatttcgaccaaactgtgtaattagtttttatttttgtctatatttaatacttcatacatatgtctaaagattcgatgtgacggagaatctgaaaaattttacaaatttttttagaactaaacaaggccctagcctcgttggccctataaagcacaggacgccccacccaaatatctctcgccttccacagcttctcctcctcacctttgctcaggccgccaacgaggacgagctatggcgagcaaggtggtctccatcctggtgctcgcattcctgctcctcgccgccgtcgccgtccccgtggtacgcgcgctgtgccacattctgcattccgcattattcgtgtacggacaaagccttgccgaccactaaccggacgattcattcattcgctcctctcagtctgcaggtccgcggcagcgggggaagaacggcggtggcggcgccggcggcggtggtgggagcccaagtggtggcggcaacctgaagccctgggagtgctcgcccaagtgcgcgtcgcggtgctcgcagacgcagtacaagaaggcctgcctcaccttctgcaacaagtgctgcgccacgtgcctctgcgtgccgccgggcttctacggcaacaagggcgcctgcccctgctacaacaactggaagaccaaggaaggagggcccaagtgcccctagagctagatccacacactcccggccgccattgctgccctttaatttcttcggatctggaaatgcattgttcttctatccacccaaaatcgctgaatgtggaatgctaccagccagatctgcgtgctccatagcgagctaatcagggagagtgaggattcctaggtagggtggcatgccatgccatgtgaatcctgaatccccttccctaaagcagtatagtgctccactggtacgagtctcatcagtcaactaaacattacccccggattgacggacatcccacgcgattagcggggcctgtcactcagacctgatagccattgctagtattggcagtctttgtatgcggtaccagtcctaatgcaccagcattattttgttccggtggttgtgtttcactgtgttcttttgttaaagagtttttgagtgtgcaagcgcggcaaatgagcattttcaaggaaagatcttggcctcttggggggcagagggggtgagtcagatagatctgggatgtttgggagcgcgaaaattgcctggcttgtaccttctttctattataaggctttgtttagttcacccaaaaactaaaaactttttcaagattttctgtgacatcaaattttacagcacatgtataaagcatcaaatatagataaaaataaaaaataattgaacaatttatctataaatggcgagatgaattttttaagtctagttactctaattggacaatgtaataaaaacgaaagtgatacagtctcgaaaaccaaaaagttttcggaattaaacaaggcctaaatattattcaatcatgtattaactaggcttatttaattatgtatgaactaaggttaaaagatttgttttgcaaattacagttaaa

SEQ ID NO: 3444 - DNA, 4255 bp, Sorghum bicolor
atcgatctcttgccttgcaagataaccggctagagccccttacacaatctctccactagctactctctgtcatgctagggaaattgtggtagtccatcaaccacacaaattaactaatggtttgaaggcctttctttatgtgctgagaatttgtagagtaatgtctgctactatttcaaaaatttagtgaacaaatttgatggtgcagtgacactattgttggagcacctatactaacattgttaaagattagagatagtagttattaaatatttggagaaaggtataattgctcaacacttacaaatttcatactccattacatcctcttcttgagcacatagtgaatagaagtaatttatttcatccccaaaccaaggggcttggaggggatgaaacaaacaaggcctttgttatgtttacctatgcattagacagaaacaatttcctctatttccattatctatgccctatttccagcttgaagttgtttcgatttcatctcactagctttagcagagacacaaaacatctctaatctacaatgacaaaaagggtaagaattaatcttgcaaggattttaagacgaaaccatgggtgccaaatagcatggtttgcccccatctgtcatgcaatcgaaggtaactaggcctaccagagccccttacacaatttcaactagctactctctaacatacttgggacaataaggtgatagattgaacactagagctcttcttcaccataaacgtttgcatctcccctcctatcattgtgttctgtgctttcttgctgttgaagaggacctttctcatctcttcttccattgtcctttctccattgcttgctggggtattcttcagattgtggtgccaaatacgttagatacatttcaggtctttgagacctttaaagaccagcttcagcttcctttcttcatttatgtcataatcacaatgtgctgggccacatggacttcgtgcaatgacaaaatcttcgggggcattgataattcaatttccaggtgcaaggcaattttttgtaaagagtttgcccaggttatcctgagagcaaagaagacccttcaaccgcatctttcttcatggctacaagcctttgtatttcagttttgctttttttgttgattccttttgctcctctttggatcttgtaactccttttgtaattaaacttatttctttttgatacatttcagtaagggatcaaaccctttctgtttcctcaaaaaacaacttcatatatggttcgaaggccttttattatatggcaagactttgttatgtatgtatgctcactattgcaaaattagtctcgagcgtatatgttcatttgaagagatgaaagtatataattgtccaacacttcacattttcacttctctgttgtatgttcctcttgatatgagcacatattcgacagaagcaaccaccccttccgttatgtgtacctttgctgtcaacaaaagcaagcctttcagtttcaattttgccttgtttccggcctgatttttgtgatgtttccatttcatctcatttgctttaggagagatactaaaagtctgtaagcttgaacaacaaaagagaaaaaaaggcaagcaatagagcatggaagaagaaatcgtggctcccaacagctaagctcgcccaggtgttgcgcaatcaatctgcagtttgccagataaccagccggagccccttacacaatctctccactagctactagtatctggcatgcatgggacaagtgacaaacaatcaacaacagcaacatcatcatcatgcattcttatctttctcatagtcatcaaccaaacatgtcgatgtcatccttccaccaccaccaccctccatctccagcttataaatactccgtgacccctgctcacaatctccactctagctaacatcgtgtcacacggtagctctcgatcagatcgagtgagccatcagcagggagcacagtttgtgtgtccagccgccatggctgcccatgtggacccgctggtggtggggagggtgatcggcgatgtggtggacctgttcgtgccgacggtggccatgtcggtgcgcttcggcaccaaggacgtaaccaacggctgcgagatcaagccatccctcaccgccgctgctccggtcgtccagattgccggcagggccaacgacctcttcaccctggtcagtactgacggtgctcttatttattttagcagctggttgataatgatgacaaactaaacatttacgggatcgttgtgcgtgtgtttatgatctgtacgcgtgcatgtgatcaggttatgactgacccagatgctccgagccccagcgagccaacgatgagggagttgatccactggtaacctcttgcttgcttgtcatgtggtattgcattctactttttgtggctaattttttccatctacttttggggatcgacctcctgcgtgcaaattgaaggctggtggttaacataccaggtggagccgatccttctcaaggtaaacaacatgcatgtgcacgaaaacgactgctggcatgcttacagcttactttgtgtgtgtacatctatgccactatatatgtgtcacgtcagttgcttgcttaatctttgattgattcaaagtagtacaagcattagaagtcgattgggctgtctagactagctctagagaaagctgcagggacatattgcggcgatccatcgaatgcacactcctgcatagctgcaggtcgacagtagttggtgcgtgctggcggcggaaacctgtccagccccggaagcagaggtcgtggcggcggcggggccggacccctcgtcggcacacgttacctgctggcctcctccccactccactgtgcacgatgccgcccacgaggcgtacgtgtcgaccgcggcgccgcacctcgtcgtcctcagcagccttgcacaacaggccaccagtcggtgtaaacgggcatgctcagttgctcacgtcaccctagttagctagcgtccttttggccggtacctgttcatcatctcattatattagactgacaaatcagctagcatatgggagccatcgtaattcaattctgagcggcgaaactatagaggaaattagagggattgtcttatactcgatagtagaattttttttcctttttttgagaatttttattaatttcttcgtcccttataatgaattaccaagtattaccttaaaagtatacgatcaagcttattatgacactttgtttaagaatcaatagcgaccgtgaaattcatgcatttgtttattctctgaattattgtcaaaaggtcgagtgcgtgaacctgccttgtgtttttttttttttaaaaaagaagctgtcttaatctgatggcgatatatttttcgtaaagttccatgtttccctgatcggtagctccaccagccaacacgtgttagcagcacgcactcttgttttatttgctcgctgctgacgcgttcttccgcattatctgcaggtgagacggtgatgccgtacctgggcccgtgcccgccggtgggcatccaccgctacgttctggtggtgtaccagcagaaggcccgcttcagggctccgccggtgctagcaccgggggcggaggtggaggcgtcgcgcgcacggttcaggaaccgcgcctttgccgaccgccatgacctaggcctcccagtcgccgccatgtacttcaacgcgcagaaggagccagccaaccgccaccgtcactactgagcctgaggccactccgctggctgatccaacaagctttagcaaccaagctttagctagccgctgccgtcagcgtccgatcagaaagaagacaagttttcttgtcgttgttgtcacctagtagtagtacctttaattaagccggcgtgtttgtgtgattgagacttgtctctctttattattgaaaatacattctctcaacttgtggtgtctcattattttatttattatttatatccaggtgtcatcaagtcactagccgtaatcatttgtttctcctatttatattttttctaattatcaatttgtttaaaaaatccttttgtttttaataacataaaaaagcattttctagttgatggtgtctaccaactagcctcaagaattccttaatttattcataaaacatttttttaaatagaaaaatcagccctccaacaactcgggatagtcactccctcaacatctaccatgcataaaacctcacatgtgtttcttgatat

SEQ ID NO: 3445 - DNA, 7443 bp, Sorghum bicolor
gtgtcaatttgtgcattgttcgtgaaaagataagaagctaacaatgcactttttattggtaagccgaagtctatgtaaatcttgagattgatttttattgtgcgttgcaacgggggaaaagcatcaaatggccatagaaagttatgacataatgttacattctatttatgtttatgttttttttataaaatttaaagtctataatttattttattgataaccatgacatctatggtattagatagttaatatttaaaataatatatagcttggagacatatttatttaataataataacagaaattagtcaaaccttctcttactttaatattacctcttcatataccttaggattatattaaaaatgagaagtttgttagtagctttattttgttatttagattaggatttctatgaatatgatatatcagttaaatgtatgtagattataaacacatggacgtataaagtgttcatatgacataacaacacatcatacaaaggtagtgtaagtatcctcaagcataaatttagttaaattagtaaatcagtaagatatacaggaactgtgctaaaacttttaccacaaatcaagcgtcatattaaataggctattataaatttttcataataattgaagcaagataactacaattttagttttacactaaaaagtatagacaagcatctaccagcaaaaaaatatactaaaatttgtgatttttttgtttactatatggatctaaatatgtggagctaaacaaaacttgttttataatttttagatttttctataaattactatatatttattaatttttatagaagattttgcattagaaacctaaaaaagattctatttttttcctcttcctgtacgggccgattgtgatgcgggcagtctatacatattttcaaacattccatacgacgggagttaaactttaactgagctaaccagatgaggcctaagcctcacaaggatgattttttttgcccttataggacaaatatgggggaagctatctttttttttaactaggggaagctatcttcgtgattgacaagttagcgagtgtttaattccccttttatttcaaaaaaaattgaattttagtttatcattttgcataatgaaactaaatatcatataaattttttgactaaaagttagttattctccattttagattttgacctcaacagaccaaaaaaaaaatccaaaaatgcctcaagtgactctcacaagggcaataagttctacatttcaaagtagttggcatttgatattttgcattttatggggactaaacacccccttaccgtggctcttggctgtcgagttaggacgaccacctccaggctaatatatgcctctgttgacagtagagggcggcaagactatctcaaagctcaactagattgttttagtttcacactaaaacttaaattatattttaattgatcatccttgataaagactcatgtaatactggtgcgagcatcatacttaaaacatcattttcaaaagtacaatgtacgttcatatttatatattattataatattgtttatttttcgatgtgcaagtatttatctagtagtttaaaattggctcaacatttttaaaattttaaaactttactctctctgtttctaaaaactttgactcctagagctagagttatcttaagtcaaacttttaaaactttgattgattttttttaaaaaagttaaaatttatagtaccaaattaataatattagatttatcatatattatatttttatatgatatttattttatgttatagatattaatgttttttataaagttggtctaggaagtgaagttcactagcccgtccaccaaaaatgtataattttgatttttttgacacatgtacgtgttttcgggggaaaaaaaaagcaacgcggtcaccgattggctggtcagctggtgtgggcttgaacactttttgttccagacttccagtggccacactaccagaggccgacgaggtgtgaactgtaatttcagatttcagagggcgtaggcgcccctttgagtcttgacaccgccgccgccgccgccgccgccgtgaagccaagcaaaacctcgtaagcagagccatggagggatccgccgccgcgccgctccgcacgcgcgtctgcatcatcgggagcggtcccgcggcgcacaccgcagccatctacgcggcccgcgcggagctcaagcccgtgctcttcgagggctggatggccaacgacatcgccgccggcgggcagctcaccaccaccaccgacgtcgagaacttcccgggcttccccaacggcatcatgggcgccgacctcatggacaactgccgcgcgcagtccctgcggttcggcaccaacatcctctccgagaccgtcaccgccgtcgacttttcggctcgccccttccgcgtcactgccgactccacaaccgtcctcgccgatgcggtcatcgttgccacgggagccgtcgcgcggcgcctccacttccccgggtccgatgcgtactggaaccgcggtatctccgcctgcgccgtctgcgacggtgccgcccccatcttccgtaacaagcccatcgctgtcgtaggcggcggcgactccgctatggaggaggccaacttcctcaccaagtacggctcccacgtctacatcatccaccgccggaataccttccgtgcttccaagatcatgcaggccagggctctcgagaaccccaaaatcaaggtcgtctgggactcggaggttgtcgaggcctatggcggtgcagacggcggcccactggctggcgtcaaggtcaagaacctgctgaacggggaggtctcggatcttcaggtggccggcctcttcttcgccatcggacacgagccggcgaccaaattcctgggcgggcagctcgaactcgattcagatggatatgttgcaaccaagccaggttccactcacaccagtgtcaagggggtctttgctgctggcgacgtgcaggacaagaagtaccgccaggccattactgccgctggatcaggtttcactctactgctctatgattatatgattttgtctttcaagtgattaattaatgttcatacatatcaatcatgggagctactattccccagtgagtttcaatagaaaccatgaagtttagtgcccagctcagtttttgttagtaatgtagtgggactgagagtacgaggcttcaaagagggaattctttaagacaataggttattctcgctttccagtaacaacagatgcattccttgatgatctgaagcaatctaatctctgtatctatgttacaacattatccaagatgtgactcttatagttatacaaaacaatcccccaatacctcccctatcctcataaaactattatattggtggtaatacttttttcttactccagaagtttctgcatgcctaatgacaaatctggtgatctggtttctatatagggtagttttcaacgttgcagtcaactaaaagattcctcaacttagggcaactgagcatatggggatcatttttgtgattccaagttgatgaggtttcaggattgtccagttgctactcctgttcacttatttgggcaaaggcaaatgatttatttgtactgcaaatcatatgggacaataaagtcaggatgaggttttaataacagataagttccaagttcaagtctcctgtattctcgacttagagctctggatgggcataaatttaataagactaaaagctgtgctaaacaatagcaactagagtcttggttgagaaataccccaaagaaaacatttaggtgccatttggatgcacactgggatagggttaaggatataggccaggatataaaagattgggttatggataaggatatgtacattcaccctgtgtggtgtttgttttgcaccgggttagggattgggaaatgatttttgaatggtcaaaatgtcctcaccaaatcaaaagaaacattattattagcactgttaattggatatataatattttcttcatgccttcggctgagaacggagatcctatcccggtcatgacccatcctcccaacaggatacatttggtgggaactgaggtgcttatttccctaaccctttccctccctgtttcccctcttgcgaaacaaacagcagaaaaagataccccaaccagccacatttccctttcccgccctcaaaagtgcttgttagcttaaaaatgctccagttaagatataccagatcatttgaaatgctttaaatcaaaggattcaaattatgataatttcgacttggcaaagtgctcatgaactgcgcaaataattatgcttcatgctggagtggtttgttaaactgagaaataaaaccagtagtgtatcttatatatacatcaaagagttaagagttacctgttttctctaggaaagtctgcatactagatgtatctgctctgtacaaatctgttagttattcgttaaccttaagtccttaattgcctcgtagctcagtttttgggttagcaatgtagtaagagcatgaggcttcaaagaggaacttgatttatgtacaataggaattgtttatgatgatttgaagcaattcaatttctgtagtttaatgacaaattatccaagatggcaagatgtgactttaacatatgaggaatttattcaaaataatgctatgaagtactttaatgacaactttggtgatttgatttatatatgtccatcattatagtatagttttatacacagataaaaaaggggtacatttcagtgtgcagttaaccaaatgatttccaaatttagggcaattgagcatatggggagtgctattgtgacgtggtaatttgggctggtagactaatatttggaatattttattgcatttcttcgaagttgatgagttcagggttatctagttgcaactcctgttcacttatttgaggcaaaggctaggtattatttcgtccgttacaaattataatacgttttgactttgctagattaattgcttttactactatgtatctagacatagtgtatatataagtgcatagcaaaagctatgtacctagaaaagccaaaatgtcttataatttggaatggagggagtacagttgtactgcaaatcctatgagaaaagaaagtcggaaattattgcatacatggatacatggatgaggttaacaaacaagtctcgagtttaactctcatttattcttgagagctctggtttgacataaatataataagattaagttctgtactgatgaacaatattacaatagcaagtagagtcttggttgagatatgcccaaaagaaaaccatttggttaaaaaatgctgcagctaagatacaccagatcatttaagatgctttaaatcagatgattgaaattgtgacaacttctacatggcaaagtgctcctgaacttcatgcttgattgatttgttaaacgaaggaataaaccagtgcaatgatttacactttagaaagagttaagagttacctgttttttctaggaaaatctgcacacgagatgcatctgctttgtacaaatgtattagttatcgtttgacccaaaaagaaatacatgcatttacttctggtttgatttttagccaaaatttcatgtgattcaaagtaataaatctgttactttcaatattagctggtagagtcttggttgagatatgccccaaaaaaaccatttagttaaaaaatgctgcagctaagatataccggatcatttgaaatcctttaaatcagatgattgaaattatgataaattctacatggcaaagtactcctaaactgcacagatgattatgtctacttcatgcttgattaatttgttgttaaacgaagtaataaaccagtgcaacgactccttaaacttcagaaagagttacctgttttctctaggaaaatctacacacaagattcatctgctttgtacaaatgtattggttatggtttaaccaaaaaagaaatacatacatttacttttggtttgatttttacccaaaatttgatgtgattcaatgtaacaaatctgttacttttaatataattctgaggaccgagtgagggctcagttggctagctccgactggggtcgagctgcccacctgtgttcgagctttggctggtgcgggtgcctcaccttcttaagagtgtctgcttcttaagactgtccaggaggctccaccgtgctttctaaaaacaaaatccctgcaaatataactgtgcatccgaattcgctagaagattaagaaatgtgattcaaagttctgacctctgatatcctgtgtctcaatctcttgataagatcaatctagtaaactagcacttggtggtttcagctgttcacgtccttgtggatgcgtgtgaccaatagctaattatttatttacttgcggatgttgcagggtgcatggccgcattggacgctgagcactacctgcaggagattggtgcacaggagggaaagtctgattgactatatctgggtgtagcaaccagcagtccatcgaatggtcagttgccggtgctgaaagccgccctgtgatgtgcgtttatgccatgggttctcatgaactcatgattgaagaacctgacgatttatgctgcttagtatcatacattcttatcattaggatccagaagtacgtttgaactgtctgggcttctatttactggatacagattcatgattactgttttgaagtttttggcctagatatctctattgctcaagtctcattattgtgttaatggtggtgttatgctgagctcatctccgtcactgttgagcctctcagcttcgtttctttctctttcttttcagaatacattgatattttcatttttgaacgcaaacattgattttgtcttgacgtgcaaaattttaagttaacttattagatttctgcacaatgagtttttttttatgttttattgcagtaacttataatccttaatttgtgcatagaataaaggaacgttgtgggttgcatgacaataataatgaacacaacgttgcataagctgtaccatagttcttaatttgtagtgtaggttatatatgacgcagttgttttataaaacttctctcttacctcctatatcatcagaagtcctatgttgctatgtatgagacaacatgtgtgactgcttacacaatgttacatgcttatttacaaaggcggttttttgcccttaagggtacatattctcactctcttctcaaagcgaatccaatgggtggaaaagtgaaccaagtgatactatatgcgggagatccatattcgtttggctcttagattacgcctttattgatcaacatggcgtgtacaatcaatagctcgcgtggcatagatatggcttcacatatgagtccctgt

SEQ ID NO: 3446 - DNA, 7051 bp, Sorghum bicolor
aaatgtatcactagctgctcaacaaaaattagttccttttcttttccttactgatcctagggtttacttaggagttacactggcttggctgggcgagtcggtagcttttgctggtggtgtacagaggtgactacttcctcgccattttcgggtagagagaatgtacataattgtcctttggacatcatcttatgcctatggcatcggccattgcagctctacaatgaaattttcagcttttccttgcctggatgatgtttgaaggtaagctattgaggatactggatgggttaatttgttggcatgggtgcaggcaagtgatgtgtccttgcgtcatgtcaggaaatactcgtccacttgtttatgcaacatgtgccaaggatattgcaaagtttaagaacatgtcggtgcataattgagtaggcgagctagcatacccaaaatggcgttcgaaacaaatacaagaaattttcagctgagcatataaatggaaacaatagggcatcaaatatcttttttttttggtttgttttgttgacaacaagggcatcaagaactttggtttagtggagttgcaagctaagagtgtgtttagttctttataaaatgcaaattacaaaatgccaactactttggaatgatgaaatgcaaaatgctaaaattttcaagattatgtttagtttcattcaaaatgtataatttactggtctcatgaggaccttttgggactcttttaggcttttctttttgtctcttaaagctaaaatctaaaatggagaataattatctttttgccaaaatttttgtatagtgtttagttctattatataaaatgatagaccaaaactcttagtaactgagacaaaaagacgaactaacgattgcattatagatctctaataataataactaaaataatcttggttaattcggttttattattttatttatttagagttgctctccatgtttgccacgtgttttttttgaacctgggtttcatctttcattactcattggctaacggatcgttagcaacaatcatgagtacagcatcaggtactgagttggtgatgaactcctctaactcattacacagataacccaaagcagccagctcatgagcggctctattacattctttactaatgtgaaaacattcaaaggaggtaaaatttgagcacgtcaaggacttgatttcgtcagtcagatgacacaccgttcactgatggactcaacgaggattcggccaataccaagatgcacagccagttgtacttctttctttagcagaggttacctaatggcacccacaatgcagactttatcataaagtctaaagttatttattatctcgaacaatgtggacttagagtctaaataagacttggagtcttattttttctacctttttcttcaataaatatgctgccacatcagcaaaatgccataaataatatgtaattaattgtcttggactctgtgatagagtcttgcattgtgagtgccctaagggcactcacaatgcagactctatcatagagtctaaagtttttattacctcgaacaatgtggacttggagtctaaataagacttggagtcttattttttctacctctttcttcaataaatatgctgccatatcaataaaatactataaataatatgtaattaagtgtcttgaactctgtgatagagtcttgcattgtgagtgccctaaccgaaacaacggagcagttcaggccaaatatacttttatatatgcggagaggcccaaccatagctttcctacggccttataacagcccaaggcggcccagccagataccctttgctcgcactcccactcgaggcggcagcacatcttccacaagagactagagaccagtcgcagcggcgtccccgtccccgtccccgtcccaaatttgttgcggcgggagagcagctctagagaaaacagagagcgcatagccgccgccggcgggaggcgtcagcggcgatgaggatcgaggaggtgcagtcgacctcgaagaagcagcgcatcgccacccacacccacatcaagggcctcggcctcgacgtagctgcccccgctcctccgttcctccttcctcccccctctggtttttctagggttttagctcttccgtgtgttcgcgttgtagttcctcactgttttttttttccccgttggtttcttttgggagaggagcaggccaatgggatggcgattgggttggcggcggggtacgtgggccaggcggcggcgcgcgaggctgacgggctgtcggtcgacatgatccgccagaagaagatggccggacgcgcgctgctccttgcgggcccgcccgccacgggcaagacggcgctagcgctcggcatagcccaggagctcggcagcaaggtttgtgcgtccagttgctcgctcctttttctcacaagaatcagctgttcattcattgtggtggtaaagctaggagtttattcctatccttttttttttcctttgttgtgggttgtactgtctcgtaccaatatcctgccattgtaacaatatatggattgcgacctgcacatttgtaagaaagaggaccaaatataatctactagttttctatattgactgatagtaccagatttttatatactcaattcctctattggaccatggttgtggaagtgatgataggttctgataactgtgggctgtcctcagttaattttctgtttgactgtttattagagattaccctgttcggtgaacaagaaccatgggcacaaaaaaaaaactgtttagctagtcatatggatgttgaggtattctagcattatctaattaatgccattttagctgaatggtttaagttttgtgttcaactagctgaattggtgctctagagggacagtttgtttggtaaaatgttagttgctaagttgctatgcttgccgagttcactgtagcacttcttattgggctaattaatgtttaatctaatgtttccttcccctgttactacaatgtaggtccctttctgtcctatggtaggatcagaagtttactcctcagaggtcaagaaaactgaggtgctgatggagaatttccgtagagctataggtttgcgtattaaggaaaacaaagaggtttacgaaggagaggtaagcaatgcatatatgcccatgtccatgttaaatgaatactaggctatagttagattagtttgttccttcattgatagcttgatgttcacttcttgctgctttaatagatttaccaatgttgctctgttcctaggttactgaactttccccagaagaggctgagagtacaactggtggatatgcaaaaagcattagccatgtaatcattggcctaaagactgttaaagggactaagcaactgaagttagatccttcaatttatgatgctttgatcaaggaaaaggtaactgcctgcttccttacctcctgatggtggtagacttttggattagatttttactcttcaataaccttgggcggtgtaattgtttcttactcaaattaatgtctttttggacattttaaatctgtttatgcatttgataatttactcattggaaaaaatcatgctaactcactggcagatgtcctgttgtcttatgactagccctggtgctgagtagctccttaaacatgagaaataatgcactatatttgctttctgggtttactttatctattctgctatctgcatttgtggttactcattgtctgcatatggatataggtggcagtgggtgatgttatatacattgaagcaaatagtggagcagtgaaaagagttggtagatgtgattcttttgctacagaatacgatcttgaagctgaagagtatgttcctatccccaaaggtgaagtccataagaaaaaggaaatagtgcaggtatcattctgatgctatcttaaccttaaaatttcattgttttctgcagcagtctttttcacatggtaccttcattagtcgatgttatcatggttgaaacaaatcttttcactgttaaaacagtatactcctcaagatgtaactttggccaataatttctatcacaaattgctgtctaatttccttcacaagatgttggtgaagctatatcagtatagtattgcaagttgacatgttgacaatagctgcttgctacaatcaattttaggtacaaaaagtttcatagaccttccctgcaaagttgctggccaccttgttcatctttttttttctataatggaaactgcttttgtggtttacaaatcagctaattgggaggtagtataagatggggtcaccaggtttccagaacaacaaatgttgaagagtcttagtgcaatgctagtgactgttgcttccttggtagaatatatatacatgaataaaggtcacaagcaacgtttatgcgcatcaccattggccataagcccaagtcctttcaacaagattctcttagagttcattaacttggtactatcattgctgcttctggtaatgtttagtaaataaacagttgaaagcttgctggtagattacctgattgactgattgtttattatcacaaagaggatattttattaatgcaatttttaataagaattaatgctcatatttgcatctcaacattgaggcttcctgtattctatatgctcttgttctgaagaggaaataaccttctcaccgttgtatgcaggacgtaacacttcatgaccttgatgcagcaaatgctcagccacaaggtgggcaagatattttgtcccttatgggccagatgatgaagccacgaaaaactgaaatcaccgaaaagctgcgccaagagattaataaggttttctttttttttcaactaacaattttagagttttctaggcagtatcaaatttggatatccatataagaattttcacctgatatttttaattttatatggtgacaggtggtaaacagatatattgacgaaggaattgcagagcttgtacctggtgttttgttcattgatgaggtattattttattgcacttgtgattgaaaaatccacttgtcatgtcctaataaaaagaaaataagtagaaagtgtattggttttgttgattgctaaacatattttgtccgcctcatcgccacaattgttggacttgattgtgtcaggactgtcttgtggctatttaaaatcaattaataaaatatattttttcaggtccacatgttggatattgaatgtttttcttatcttaaccgtgcattggagagcccattatcaccaattgtgatacttgctacgaacaggggaatatgtaatgtaaggtaagcagtttattgccagagtactctgcggctaacttcaataagcagcataaatccgtagttgtctattaagttgcacttaattaattaattaattatctgcttaatgaatcttgttttggttttatccagaggaactgatatgacaagtccacatggtataccagtggatcttctagataggttggtgattattcggacagaaacatatggccctactgagatgatacaggttcttaatttgggcatgatttcgttatgttttttactcttcagaatttgcattaatctttttttgttgccctttacagatattggctatccgagcacaagtggaagagattgatattgatgaagaaagtcttgcttatttaggcgagatcggacagcagacatccttgaggttagatttttgtattgttctttggtattttccatgcatttgatggattagtttccttgagcagatgtgtatggtttccattacttttagaattcatctctgtactgattgatttgcaagccgatttctctttccctccacaagtgagaaatgatggtaatgaatcttattctctttgcagacatgctattcagttgctatcacctgccagcgtggtcgcaaagactaatggaagagagaagatctgcaaggtatacctaccgagctttcattcctagctgattcttgttccacaagctatgatctctgagcttatatatgatctctaccaggctgatcttgaggaagttagcgggctctatttggatgccaaatcctccgctcgcctgctccaggagcaacaagaaagatacatcacctaggtttcccctgctgtggaagtgtcgaagagaatgtacttgcaagctcaaagccatgtagtgcgtcgatctgtttcagaagttcatagtctactagtcttggagagagcacttttttttttttggggggggggggggggggggggcggtttgtagtgcctgcttgtgttagtctccagcgaagacttgattccggcatattgcttgttcacacactgttcactgagtagattggctatcggtgcaggaattgccgtgtgtattttcacccttgctaatggatgtccagaatctttgtgcccacgggttgtattggttggccctcattggtcccgctcctagctttgtaaccatggatagtatttttacgctatgcaacttctatggttttatttctcacaataaattagcaaacattactttcaactatgacgaaatggcttttttacagtatagaaatttatatgttccaaggtaaacttgcacatgcatgttgagttgtcttatccagtgtctagtttgaattaaaggttcgggaaagaaagtacgtaggcaactaggcatggtggactgactgcaactgttcctgttcgcgtaaccttgtttttttttcctctacttgtttctgaaaaaggaaatatagagagagctgatattgctgcacgtaattcgtgttttgacgagaatccgaaacgtttagtcaaccattcagtaggtgcggctagagctctgtgggctgtggctagagctccctaagagcatccccaactgttttgcaaataagctttgcattcatgtatttgtaaaaaagtcttaaaaacacttatccaacggtttggcatttagactttgcaattttgttaacttggcaaaaagagaggaaggattggcatatatgacaa

SEQ ID NO: 3447 - DNA, 5555 bp, Sorghum bicolor
ctgcaaactatagcatcagagatactaacatttttttagttagcatcagttgctcaacatattgcaccgtatctaatatttttttcttgctagacccttaattttttttgagaaacggtagtacccttaaataaaagggctgttgcagtcgcagctgctctttgaaaacaaaccgtggatgaagacacgcggataagaagttttctaaaagaaagcaatacgaaaaattataacttagcttttttatttttttagaaaaatccacatcaccttcctcaactttcgcgaaagtccacatttcctctctaaactctaaaaccagacaaaacaccttcttcaacttttaaaatcctccagcttacctatctgacctgttataagcagttttgaaggcgattttgtctattttttatttattttggttgaatctttaaaaaattatagtaaattataaaaaaattataaaatagaaaatcaaattttgttggattttacatgagtaaatttatactgtgaacatataatatattatgctttactataaagtttttactgtggcttgagatctatacttttctgtaattaattgaaataatttatagctacagtttcaatattccaattatggtaaaatttttatgctgaactaattattatattcttaaattattgtaaaaattttatacttatcagattttgtataacttagttatagatttttatttaggtttatgcttgttaaatataaataaatctataactaaattgtacatgatacaatgagcataaattttaattatagttcaatcatacaataataagcccgccataaaaaattcatcatcattgaaccatagaaactgcaactaaattattctaattaattacagaaaagcatagatctaaagccacacaaaatatttgtattaaagcatacaatattatatgttcaatgtgtagtggagttcaaaaaaattaaatgtttctatttgtattttttgatttactatgattttttttaaagatttaggtaaaataaagaaaaaagataaaagataaaaccatcttcaaaattgcttataacaagggtcaagatgtcaatgggaaattccttgtcgggggagtgcctccccatctccgtctccgtgggaagaaactttccccatcctcatccccgccaaatgccacgagggagattttctccccgtccctgtgcgggaaataatatctatggggttctccatatctgtgatgttcatatcagtttatctaatgttaactattcacatattcacgaattcatattaatggtatagaaacaaattcatactataaaaattcacattcgagactgagaaagtgaagaattaaggtttcaactttgcttatatatcacaattattagatcttgtaagtatatgtgcctttagagttgggtccccgcggggagcggggataggggcctgcataccatctccggccccgtgaaccccgatgcagacaagtttagccccatataatttcccatggaggcgaaatttgtaccatcctaattccccgcgggaaatcggagaacagggcccattgacatctcgaaacagggaggtaagacgaatggttttaaaaattaaaagagatgttttattttaaaaattgaaagaggtattttatctgattttggtgttttagagaaaaaaacaggctttcgcaaaagttgaaggagctaatgtggactttttccttcttatttttataggaaatttataacttgtctgggccacatcaatccatcgtcagcccacaatagaacggagatcctccctttcttgggccacaaggagatcaaactccctttcttgggtcacaagacgataacgcttccttgcttggacccgaagtcggacgcacccgacacccccaaagaccgcccatagaatttccatttcgccgcattattttttccttcttctcaaacatcaaacatccccagctcgtctccgactcaccgatactactccggtactccccaccgcctagcacccggccgcggccatgttgacaccgcgcgtcctcaagccttcgctgctccgccgcctgcgcgctgccgccgagctgcctccgccgtggcgaccccggtacgcctcttctcttctctcggtttacgagcgcgtggtgttgctgtgcggctgtgcgtgcgcgccaggtgtttgcgctaataccgcagcgggcggcacccaacggcgttggcgccctcggtttctgcaggtgttgtttgggtaattgggttggtagtttggggtggtttggaatcgggatttgagattcgtctccgttggagcgttccatggagctgagcggagaattccgggagagacgagtttttttttctctctctctcaagttgagtcagcatggcacgaaaatggtgctaagttctcagttgataaatgtcatacttgttgtaatgttgcatgtagctttgttgatggctcctgctacaccataagtttaatttgcctgtgaatctgtgatgtttcacttgtagtttgatttgatatgaatgataatgtgttgctttccccttctagatagttgctactgttgaacttcaatttaatgccataaactgacacttaaaatatcacatgcttgagggtattgaatttttccatctgttttgtcactacctctaacttgtgcatgcagccacatgtgtagattatttgcttgtgcttgttttactgagttctgataattctatttcttcggttctgtaggatcctacctgtgcagacttaccattccagaggctattctaatgggggaagctccaagtatgataggccaatgagacagttttctgaacagaatgagtcaacttctaggccattgatatattatgttgctgtatgctgtttctaaagacttcttatctgatttctcatattatatttaagttacaatgctatctagagtattgtctaatgtcaaataatcaacaagatattctttgacacctatgtctttgggcacatttacagttgcctaattgaaccttagcaccattatatgcccacacttttctgagtaaaactgcaatagcattttaagtaatactgttcctttgtaaacatgttggttttgcagcctgctctacttgcttttgctgggatagcaacttttgttcattacaatgatgagaggcgtgcagttcccttcggtaagagttttccagcaatgcagctttatgttgttttctgaggttccacattttgatggtattcattctatgcttcagtcttctccctccattcctagttataagtcgttctggcttttgtagatacatagcttttattatgtatctagacgtagtctatatctagggtgcatagcataaacaaatgtacctagaaaagccagaatgacttataatttggaacggagggagtacttcttaacttgtatagattagattgtgataatagttcagttggatgaaataccctgtcatggtatgcagattcaatttatctatgcttggacatctgatggaacttcttgatgatgaagtagtgtgctctcgtgattaagtttgttatgacactgttaattatagtgtacatgacatcttggagttactattcctgctgtttgcaaattgctggtacaatttttattggagaaaaagaaaggaaaatgcatgaaaacaagttttagtggtgaatagtagcttagctcaaacaagtggtttacattgattctttagttttctaatagttgtattcgctgttgctgttttgcaattcatatcatggtgttttcagctaaagtaccaggacagaccagtgttcccaaaagatgtaataccaatagacctgctataggagggccatttaagctatatgatacagaaaaaaatgaggtgactgaatcgaagcttcggggaaattggactctgatgtactttggctatacatcatgcccagatgtgggtccagccgaagttcagaagatggctgatgttgttaaactgttaggtacattgctatattaccctttctcaggaatacaaatacatttcataggcacattatgtgttaaatttgttcagcatcctctgtattttacttttacacaattgtgaagctgcttatttagttacatgcatgtgatcttctgtatgtgctctgtgtatgtgcatgttttgtttttcatatttagtttgaaggctaaaaacccactttatacagaaattggcttatgtcctctgtttattcactttctctgcaacctttcttagctgtttccaattatctgttatcttttgctgaaaagtgactcgtaatgatgttttcaatactaggctagtagaattgctcagtcttggcttctgtcagtcattgtcaaatctgcgatctactcagtgtcagctgctttggaaaattgacagtctaaaattggcttgcaatgaataagttttctggattcatctatgtgcacttttaatttaggatcttcataactgcttatggtgcttgatttgtttttttttactagagtcaaagtatgctatcaagattataccactctttatcacaattgatcctcaacgtgattcaccttctcagcttaaggcataccttagtggtaagatattctgctattggggtcagaaacattgaaattttaggctatgctgcaagtgatgattcgcctcgttttaactgcagagtttgacccaagaatagtaggactaacaggccccatcagtgcagtaagacagattgctcaggagtaccgtgttttctttaaaagagtagaggaagttggtcaggactatcttgtagagagctctcacaatatgtaagtgcatgttgtgcaccttgccatgttgatgaatgttttcagacattgaccatctgaagttacaggtacttgctagatccatgcttggagacagttaggtgctttggaactgagtatgaagcatcagaccttgctgaggcgataacaacagaggttcagaaagcatctgcttcatcaacaaattagtctagcgggtattcccacttggtgtactttttttttggttaatcgcactttgtatatgaaagtaaagctaggcctgtttatatatttgctagtccttttaatatctgaaagtagaacattagctgcatgttaatacttggccgtaggttccaaccttttatcttactagaaacttttcaagtgaaaatgtttttttttctgatagtgagttattaataagaagcccatgtgattgtatcgttctagtaacaaattctctatgttaatctgcctaccatctatattagaccaacaactaaatatttcaatcacagttactctcttcatgttgcagacttgaaaagctctgttcttattgttgcgttcttttgattaattgtttaatcctgaattcctgatcacaattcgcacacactgaatttccaagctatttgttgtcttgtagtgatttcaatgtttattgcatatcaaattatattctctaaatgccttttgatgtc

SEQ ID NO: 3448 - DNA, 4996 bp, Sorghum bicolor; identical to SEQ ID NO: 3435

SEQ ID NO: 3449 - DNA, 5447 bp, Sorghum bicolor
aaaaagaactataaacattttaattgaatttgtaaactaaatcattaggctccatttttgtcttctcctttaataaaatcttgtctgtaaataggtcaaattaattgatcaaggtataactaccatattatagaaagccatgagaatactatattaaaaagagtcatatatgtaaccacatatatagaacaaaagagagcaaagtgacgatgtgcaagacatgcatggcttgtacctctaggcaaacctgcgtgcattagacaattcttgtagccttaaatttctagtgcctagggctgaaatgtttttctagagtaaaagttatttgaatgggcacaaactgaaaagtttcgtagttttacgtgtacctacaaagtagtcatatcttcaaagagatgttttctatacttactttaatatagtaagtacaagtgtacaacctaataatcatatgatatgaagtttaaggaaggtacgctcgtaccaataattagattaaaagtcgtgacaagacctatatctgagtcttacaataagattcaggagcgtggtacttgatgccattgaatactgtactagccctctagccggaataaaaaggccggactgttgtactctgtagcgtcacgcgagttagaccaaacgcaaagccccctgctgatccaccacaaccgcaacctgtaaaatataccgcgcggctgagacacagtagctcctcacctcacggcctcacctcctcaataataggaggcatgcagtgccgcagcgttgttcacggccgttccccggacccgccaccaccaccaccggccatcaatagtgcacgacgcccgctgtgcaaaagtgagcagtggcagctgctggcgccggccaatggccatgcgtgcacgagcgcgcctgcctccgctggcctggatgcatgctctgttcacatagcccggccggctggtggtttgatagacctgacttgatcgcacgtacgcctccgtgcgggtccggtggtgcggtgcggtgtggacgtagcaacgagaacgagcaaagcacggcgcgggggcgcgcggcccccatgcgggagcgggagaagccgacgcagagacgcagcggctagctacgctacgctacacatcgaccgggcagccacggtggcgcgcgcaccaggagcacagtgctggctgccgctgccctgccggtgctgttcatgttacaggccgaggccgaggccgggcgggctactgttgcgcgccaccgtccgcgtcagcatcgacggcacttgacgacggggggccctccccctgtgcctgcgctcgcgcgtgatgggatcgccggaggcagacactgtgggaacggggaagcgaacgggggcgcgcgcggggcggacggacttttccacccaaacacacgcgcgctatataaggccggcgcagccagcaaggaaagcaaaccggagaggaagccaagcagtaggagccgcgtaggagccgcgtggaacagtgggagcggcgcgagaaaagaggagcttggtggcgcgggtgcggtggtagtagtggcggccgagctagcagcagcagggcaggctgccgcgaccgactgggagggagccgagtgggagtgcgtgtactactgctactacgctggtgagtgaggacgtgggaggggagggagggagctgagctgagggaaagaaagggacggcagcaggagcacagcacacaggcgcacacgcgcgcacactgcaccacacacgccacaagcgttattttaagggcggcgcaaccactgttgtcgcctccctccatccacactcgggaggcctcctactcctaccctcgctgaagctctgtctctcgcgcgcgcttccctcccactcccaccactggacagagagagagagagagagagagagagagagagagagaggagggtcagtggagggcgggctagggaagctacgccgccacagacgttaacagcgtcggggggaagcacggaagcgggtggcaatggcgaccggcggcagcgggagcgacgatgtccacgggctcacgtttggcaagaagatctacttcgagcaggacgcggccgtcgccgccgcaggcggaagcgggagcgggagcgcgactgcggcggcgggcggcaggaaggggaagggcgtggccaccggtggcggcaggccggcgtccgccagcgccgcctctgccacccagccgccgaggtgccaggtggatgggtgcggcgtggatctgagcgccgtcaagcagtactactgccgccacaaggtgtgctacatgcactccaaggagccgcgcgtcgtcgtcgccggcatcgagcagcgcttctgccaacagtgcagcaggtaaaaaaaaaatcccactactctagtcattctccttccgtctcccagtaccagcccaaattgggcatcgaaaaattgtgcgttcctgtgagcactggactggaccagctagctgctgcttcggtctactattccgctcgtgataccttgggaaatacagggtcgtctcgtcagtaggcagtagctgactgaatgtaccacatgtccacataggagtagagtatctttgggtgaaaaaaaattcagaagccaacctctgcagttggctcatctcacttcactttccaactgaaaaacaacgatttctgaccatttccaaccatccaactctcttaatctctttaatagtcttctgtcttcactgacgagttcacaaattctgcttctatgcgcatgcgttttttacataggattctgggagtaccgttggtgcacaattgtttggtgtgcgtctagttgttggtgtaaattttgggcaagtggaatctgaccagaatagtaagggacatagatgtgaacattcacagtatcttgtctgagcagcacataaataggaagcctagatttatctttttcttattctactgtaggtagcctatgtgaatggatattggctggtacagtacctgcacgacactatttaaacgcctaaatgaaatggaacaggagttggttatgaaacaaacagggctggaatggctgtgctgaactgctgatgctgaaaatatttctaagttcatcacgtatggtccatgcttgttggttgataacggtgcttttgcttaactttgtttaatctaaatctgcatcgtgtgtacagtgtaactgtgtaaggttacacgcgcatatcatagtcctaactccaaatggtgtcgctttgttgcatcttgaattcttgatgaactctttggggaggggtccaagcgttgtactcacattgtctgtagccttttgcatcaccggtaaagagaaggttctgaccgttcattgatagataaatcctcttgtttcattgataaacacatcactttacaaaggctctatacgcgtgtccgctccctgtgaatgattgcaggtgctcttcccacatggtaaccttttaaatctttttcatggggccctgatgtgtggatctaatcatgaaagctgtgtctttggttaatgtcactacatatacttcgaataaaaatgttagttcagggggcttagaaaacacacgcacgctgcttgtatcgacgcagcttttcacatgacatctggtttgctttgtatgtttgttcatctgatgcgagttggtattaagatataagcaagtagcagagtcttgattaccgagttaacaattccctctttccatgtgctagaaatataatagttttctacactgttgttgatccgtggatattccttagtctgctgtttgttatgtaagtactaattattatcttgtgcaatctcattgctgattatagattataactgtgttcatgacattattccgttataaatggtctgaattatagatgtgctacctattttcccaacatttttttgggtgactgcactagccgttgacctactactattggttgtcttgtgaccctgctttgatcagtaaattcacatgttaagtctgtactgtgagtaaacctattcactgtaatcacaggttccaccagttacctgaatttgaccaagggaaacgtagctgccgccgacgcctcattggtcacaatgagcgccggaggaagccaccacctggacctctcacttcacgatatggccggcttgctgcatcatttcaaggtatcaagtgtttttgcatcttattatgtactagagttgtagagatgcatactcagttattttcaaatgcatatgccaatccgctgtttctcaaatctattgtttgttcagagcctggtaggttcagaagcttcctgcttgacttctcgtacccaagggttccaagcagcgtgagagatgcgtggcaaggagttcagcccggcggcgacaggatgctgggtaccatccagtggcatgggaaccaagaacctcacccacaccgcagtgcagctgcgggctatggcaaccatgcatacaactgccatggtggcttggtggcaggggcttccatgctcccctctgcctttgagctcccgcccggcggatgtgttgcaggagttaccaccgactccagctgtgctctctctcttctgtcaactcagccatgggatacaaccccccaaagtggcagccacaaccggtccccagcaatgtccgccgcggccagcgccttcgaaggcaccccggtggcgccgtccgtcatggcgagcagctacacggcgtcaagcacctggacggcctcacgggaccctgccgacggtgccaggaacgcgcagcagcatcacgatgatgctctgcacctggtccatccaggcccggtccaccacggccacttctccggcgagctcgagctcgccctgcagggaagcgggccaccgccgccgccaaacatgccgcacgtcgaccatggcagctccagcggcaccttcagccattccaccaccaacgcaatgaactggtccctgtagggacacaacttttcccagcaagcactgccgccttcttcgtccggtcgtcacgccacgagacatggagcacttggtcaccctggttttgtgcgccttacattgccgttctgggttttttttcagggtggaactggggattcctaaccgtagaccgtgaattcccttctcgtgtagcccattgcgtccatgaactcggtccaacacctgatttgatcctataattgtagaactcctgtagcctaaattattattcagttatgaagatgcttgtcaagtgacctgtttttatccatcatcctcatgtcgttgcttagtttggaactcaaaatctgctttgatcaatcatcttattgttgttttatgagatgattttttttttatgtcgcggctgtgatttgtgaaatgtggtggccgtcgcagacttcccatgtgccactgtagtatttccgaagagtactggaggacgatcccgtccccaactcggtgtggaatccttgtcc

SEQ ID NO: 3450 - DNA, 3942 bp, Sorghum bicolor
cctagccggctcgatcttcggtccggtcctaataactttgcatgggagtagttactcccatgtgtgtatctctagatttatgacgtatatgattcaacgaagtgtatatacacgtagtatatagtatgtatatcaagtatacaagtatacatgaagtatatagttatatttattttatatagtactgtagtggtattttagatatattaaaaagtatggtctcttttgaaaaaaattcacgtacgaagatttgaagtatcttaaattgattatataaacatattcaaactaataaattagtatgaacatatatgtaatatgatttattgaagatgagaataactactctcgggagtatagaaaatacaccgtataaatataaaagtagcatatatatatatatatatatactaacataaaattccactctgctgatgaaacgagtatgccaagaataggaaaaggagtgatgtcaggtatattcccagataccatatccatagtgcgattgcggtggcttgtgtgttgaactgatagatattgggtcgatttcttctggttggggcatgccataagatgactatagaggattatccacattcaagctaagcaattgataagcatggacattcacgtataccacaccgcctggagcctctcctggatgggctgacaccctacgcatggacaagtggacgttgcgccgtcactttactgggaaagcgctagctagcatgccatgccacttcacccggcctgcacgcactgcacgtaggcatgggctttatccatctatatgcatgcagaatgtgtgatgaatagatatagataagaatgcagctttactaaattaattcctttggaagtaaagaattgaaaggaaaatatcccctgcatgcatgcgtaaaacaagctgtcatcgccgcctatccccttggcaagattagtaagagcctaactaaccatggttttcaaagctggcgcactcgcacgcacactttctagttgggcaccaatctatgcatggtttctacgtgacaatgtgcacgggctagacacaactaacatatcatccagcaaaaggatgcctacgtacatatacatacatagcaacagatagcacaccgcatcggcacagcaggacacacactcacgtgtatctccatgcacctaaaattgatcgagtagtaaacaacacgacgctgcagcgccgcaatgatcggcaccagatcacgacggccatcactggcctgcttgttccagatggatgcctacagctatagcatcccctgtactgcatgcgaggcaacgtgaaccctacgctagctagcttgtctgcaactttctatcacgaagggcttgtagcagccctcaaccgctgatgtgcgtgcatattgacgtggtcggccgccagccgcaacagccattttctttctgcagacaaggcagcgatggctagagcaagcctgcatgcatgaggagcgtgtggacacatacgtccataggaactgcaggccagggtaggcaaaccagagggagatcacagtaggctacaggctgcacgcaggtggagacattccggaacccgggcacctgtcaccggtagcgaccgaggccccacgtgaaagtgagccagggtgcgcgaggacaagcacgacacagttggaaagaacaatagtccaattcctagtagaaacagccaccaccggaaaagacgggagacgggcagaggtaggaagcattagtggaaagtgggttgcgcgaacacgcctcctgcctatttaagccgcgctgtagtgcttggcttagtgcaccacaacaactcgtcctgcatccgtcttgatgagtgagcgagagacctagacagatcgacaggtcaagaagagtttgtgcatgtatgtatgctttgtttttgagtactttctagagattgttccttgttgcttgatatggttgttggtgcttcctagatttgatctcagttgaggaacaagagagccatggcagagcaccaccagccccaacaacaagagatgaacgtggtccctactagcgggcttgacctgcctccagggttccgcttccaccctagtgacattgagattatcagcgactacttaatgaacaaggtgcgcaacacaaacttcacctgcatcgccattggagaggtcgatgtaaacaagaccgagccatgggacctcccaggtacataacaagcaacctcaatctataaatacatatacaccttgtttttgtttgattggtgcagtggatatgcatgctgctatgctagtgatcgactaataaatggcccttgatttgcatgttgtagatcaagcaaaatggggcgagaaagagtggtacttcttcaaccaaaaggaccgcaagtatccaacggggctgagggcaaaccgggccacaaaggccggttattggaaagcaacaggaaaagacaaggaggtttacaaaaccacagaaggggtgttgatgttggtcggcatgaagaagacgctcgtcttctacaagggcagggctcctaggggtgataaaaccaactgggtgatgcatgagtataggctcgaaggcagcggtaggctcctcggtcccgcatccgcatctagctcaatagccactgctgccactgccacaaaagcttcaacttctgctcccatggtgcgtggtagtggtaacaacactagcatgatgcatgcatctatttgctacttgcttaatttgcttaccctaatctgatttcgctctttgtttataaatgaaattcacgcaggatgagtgggtggtctgtcgtgtgtttgaaaagaccactgggattaagaagacgactgcaccatcttacgaggttgccatggctagcactgagattgatcagaatcagaataacatccaagcgatccccatccctatgtcgctacagctgccattgtctgtgcctatgcccatgcaatttcccatcattccagactttgctatggacccagtggccccctactaccctaatgctagcactgggattcctacgatgatgccgtctatgacaggtatcagtggcactagcgggctccagattaacaacgcccagttcagcaatccgataatcgcgtcgccacaaatgaacttctaccaccagatgggcatgggggctgtagctggccggatagacatgggggctgcagttggccaaatgggtatgggggcaggagctggccagatgggcatgggggcagcagttgcccagatggacatgggagcagctggagcgggtggctttgatgttgttgcgccagagagtaggccatcctcaatggtgtcacagaaggatgaccaggctaatgccgctgagatctcatcgatgatgtctgtgaccgacccagggtctgcaaccaccaccatagagatggatggcatatggaagtataagtattgaaggagtgaacatggatggtggaggaaaagacatgaatccacataaatatgcatgttatatctatatctgcatttcatttgcatggtttatatatttcggtagtgctagttggtatgtgatgtgtgtatatatgcactagtatatgcatcataccattacattgtagtatgtgtgtcatttggtcttactaatttggggcatgatggtatgcatacctggatatatgacatctgcttggtcatactgatggttgtattgtaagaagcagattagagtttagtacaatattatcatgaacctatatattatatacatatgaactatagtatgttgcttaattatatgaacttgattgccaaattaattgttaaattgtatgtgtttatattgcactttttgttaaggctacttaccgaatatgcatgtgatagttgtcacgcctacacacctctacagctgtcgcatagggacaaaacaaatcctatggtgctagatcaacc

SEQ ID NO: 3451 - DNA, 4496 bp, Sorghum bicolor
tgtaatatactaatatctgcggctaagcagttagatgctactactaattttcttcaggaaatcttccaactttgcgagggaataaaaggaggcatcacaatccatttctttccccgctacacccgctgtcaacgacagcacatggcaatctctggcaaatctagtttctcatttctcagtcaaatgtttctggatattgttcaatagtctgtactcaagcctgtacgtctaccgctgaagccctctgtcatatgtccagttcgaaactttgacagcccccatgtgaagtactcatacatcctttctccaagttgcattcacccttggagtggctggaccaatgggatatgctcacgtgaagagaagaactgctttattcgtcagccaaggtcaagaatgtgcaatgaaccaagagctccatacgttccagtcattccactaactttggcgttcatattcaatgcatcatgatgttaagtaaaccctttcagtcccgtgttcgaagctcaccaaagtggcatgaaaatcttgtattgaggatcgggagataacttcctaatttattaacaacacctttaaggcaaagcagagtttctctggtcgaatttgagtttcttgccccagtgcaggtagtataaccgttggtgcagaaactgaaacttagatacctgattacatgcagagcgcaagtaagcatagaatgtacttgtaatatcagaaggatacagttcacacaaaaccttgcgtgaagtgcaagaacaaaacgggattcgatgtggtcccttactagtcgatatcattgtagactttatctatcaaagccttgctgcctcttttatcctgaaaggttgaaacacagcatgatctatgataacattataatattcaaacacaaccaagggcagtaaaattgtgaggcaaaaggaaatggatctatcaactatcatctatggctttatacatttactggcacattttttatgaaattaacacattttggaataaataaattatctttgaccacaactcttgtgttggcaaatcagaatcgatcttaaaagcatccattactatcattatcatatttacagtatccaactgctctgaataaagaggcattcagtctatgtgcttatttaacaccattaggaagaataaagcttaaatcctcctgatttataaagatagaaaaatgaagatgcttctcaaaggaaaatttgcatcataattcacaattgatagaatgagtgttgatggcccacactaacattatcatcgttaaacaaaaggaagctcctgtgtagtgttcgcaggatgaattttacatgattctgaattctagacgacaccatgcaatgatatagagcatacacttgtacaaaaaaatagctcttgagcatataatattgaaatcattatcttaggagcagacaccgaacaattgatgcatttgtgaagaaaatcccctaccacctttatctgttaccgtatagtatgctcatccctgttgaagcaccatcaatacatcatccttttcgacttgttgcaatgcataaacaaagaaacatagcaaccatcaaggctaaatgtctaggagaaaacaaaggaacataaggcgtcagtctaggatataggtcaaaaggcaatctccttttttcgctacgaacaactatttattaggctctggatatatagggaataagtgagtgtgatacatcagattatattcacctgcgtggaattgcagtgagcactccttccattggtgtagacacagagggtggacagcccaaaatatttctggtgatggcaacccatatcattctttacagtataaagcaagataccatggcgtctagagctaatagtttcagtcatcatgaatggtcctcattggggactgggagtatatatagagtaccagcctgcacccttcacttcacccaagttcagacttcaagccaagttagagtgccttgaattgccaatcgtagctaaccatgtcaagggacccacttgtagtaggcaacgtagttggagatatcttggatccatttatcaaatcagcatcactcagagtcctatacaacaatagggaactgactaatggatctgagctcaagccatcgcaagtagccaatgaaccaaggattgagattgctggacatgacatgaggaccctttacactttggtgagtccataaccacatgttacttcattgcagcatgctaattttaaataagagtaaattggactttgcaccatgtaaactgtatttcctttgcacctggtttagctcacattttattttacaccatggtaaattatcacttcacactagggtacatcaaacatcatcaggatatagaaactcatgaagtttcatagaacctaaatgaaacttcaggaaacatagccgaaattcataaagtctcttgcgattttacacatatttcatgatgtttcactcaaagttcacagcataacacaggacaaagtaaaacttgttttgatttacactgttgcaaagtgaaacaaggtgctcttgatgcatggtgcatggtgcatggtgcaagttattcttcaagttaaggaaccaaattagatcactggcttagtgtcttttgtacaaacgaaacataatacacttcttaacaggaatgtaacagttcagagtacgtccttacagaagttgctttcagcattatagatcactgaaagtcatgaattttgaccatacagattcggatgttgtttgtaatgattggaaaaataagtataatctatagagatgtttgtcttctttttatctagtgtcaacaaatataccagcacgttcgcaggtactgaatgaaaatcaatataatatatatgcatccaactacctagtatctaggaatctaaaaccatgatgattacctccagcaacaaatgtgaataatctaaatatcttaccttaacagaagccactaacattggaatagataaagttcaccacacttcagtttgttttaaaaaaaatgacagctcagatggctcataatccaatcatgcactaatattaatctaaaagaacaacataatttgctttataaaaacagacaaatatagtgtcattttaagataaatgtatatggatctacaccatttactgcttcgtttagtaaaatcacatctacatgaagcattatttcttatgtttctaaagaagataacaaacttaccactaggtgatggtggatcccgactcaccaagtccaagcaatccaacgaaaagagagtaccttcactggtaagacctgaaacataagtgataaatgtgattttccatcacatgtgtattcttcttgtataaaaacaaagcaaacaaattgcttacacagaaattcatgcatgcaggttggtgacagatattccagaatcaacaaatgtgagctatggtgagtttccgtagtcctcctacatttcgcattccgtacttgaatgtttgtttcaacctaaaatgacaaaacaaaacatgctgtgcctttttttagaacccaaataatgcaagctgtaactgatgaaagggttcatatattagttaccaaagactaggacaatatcacactaagcagtttatattgacatatttacaaattttgttgaagataaatatttgaataactgccttaggcttgtgcaacatgactatctatttgcaaagtctagatatgatacttgcatgaatttgttctgattggttttattcaaactatatttcaggaaatgaggtagtaagctatgaaagtccaaagccaagtgctggaatacatcgcttcgtctttgtgctcttccgccaatctgtccggcaaactatttatgcgccaggatggaggcaaaatttcaacacaagagacttctcagcattctacaatctaggaccacctgtggcctcagtgttcttcaactgccaaagggagaatgggtgtggtggcagacgatatattagatgatattagaataacctcctctacaggaggactgacggaattctgcacgaggccaagcacaccgaatgggtagtaaacgctggaccttaatttctagattactttcccacctgtacaagatttgactatgctagaaatgaatttcacttactatgtgaaatgtgagaatgtcacttactatgtgaaatgtgaaaaattcacttactacgtgaaatgtgataaatatattccaactatatgttcctgcctccttgataaggaaaactactcagcattggttttgtatgttcctggtgcatagcaatgctacgacctaggaggcagtttttaccacctgacatacaaatgattactgattcaatcaagaccgatgctagtgacctcacagagcatcagaatccagagccgcctctcgcaaaccaccagtcatgcttaacgattccagtattcccaccaacaccatagagcgaaagctatctactgaaattgcgtccaggaacgac

SEQ ID NO: 3452 - DNA, 5744 bp, Sorghum bicolor
ggccttgtttagttcggtttccaagattcctcgtcacatcgaaacattaaatatagacgaaaacaaaaactacttacacagtttagctgtaaatcacaaaacgaatcttttaatcctagttagtccatgattggataatatttgtcacaaacaaacgaaaatgctacagtaccaaaaacttttcactttttcggaactaaacaaggccttgcttaacgactgaagacagattcttctcacgtcttttgtttcgtccttgaagtgccacacacggctttttacttcatagtgcagctctagtgtgattaaaaataatcaaagtatgggctggtctgatggaaccatatatcaacatggcatctgaaccgtgattgttaaagataaaattgccttctacagaaaaggcatatcaagcaatgtaaaactagacctagcacttgtacaaaaaaaaaactagcatttggcatgcgctccacgccaataaggttgaactacaaatgagggcaaatagaagagacataatggatgcatacactagagttgtcaaactttattttgtgttgtgatggatatggacctcgtggttctttgatcattaaagctgctcttacgcttttatactagcaccactgttttgggacaattgacgtgatacacaactaaatcaaaagtgatgatttcacaaattggtgccttttatagtgaatatggaagactatggctgggcacacattagtgcgttggtgatagcggtttaggttttagggcattcgataatttcaccagtactttgatagttgtgaatcatgtatagtgatggatagtatttctaacattagatggtttgtcgttctgtatagttgttattgtatttgtactttttgttcaatcgatcaagttgtttttgttttgggccttgtttagttggtgaaaaactttaggtttggctatcgtagcattttggtttgtatttaacaattattatttaatcatagactaactagactcaaaatatttatctcgtaaattataaataaactatataattagttatttttttatatatatttaatactccatatatgtgtttaaagattcaatctgataaaaaatattaaaaaaattagaattttagagtgaactaaacaagatactcacatgcttgctagttaagaatttattatatatcctgcaatatgcatgaataaaaataggattgtcggctctaaaaaaaattacgatttcacctagtttcaaccgtgcacagggcagcagcagattcactgaggccttgttaagttgactctaaaaataatttttttaagagtcccatcaaattttatgacacatacataaaatattaaataaaaataaaaataaaaaactaattgtatattttatctgtaaatcacgagacgaatcttttaaatctaatatttcatgattaaacaatatttattaaataaaaacaaaactaccacaatattaaaattttaaaaaaatttagatctaaacgagttctgaatgactgaaagccaacggctgaccagacgagtcgtgtagacagagcagcaaggcaaggtgcgggtgcggctcacctcagcctcacaggcggccacacggacgcggacgcagaaggttgcatcaggtttccgcaccgaggcgcaggcgggccccgccccccacgacgacgcagcggaccggggcgatgtgggcgggctccaccagctgcctggcgggctcggacgcccacacgagtcaacgcctagaggtggaaaccagcttaaattattcgggcatttcaaccccacccactctcctcctccctcgtcccttctccagttctcccctctcccataagtcaactctcctcgcctcctccgcggctagaccgcagctaatgctccgcccattataaccacccaaccctccccccatccgcagccctccgctccgctccgctccgctccccttcccccgtctcccgtcccggtcccgccatggggaactccctcgcctgcttctgctgcgcgggcggcgccgccggccgccgccgccacgtggcgcccgccgcgctcccctccgaccccgcctacgacgagggcctcggccactccttctgctacgtccggccggacaaggtgctcgtgccgttctccgcggacgacgacctcgtcgccgacgccaaggcggctgccgcggccgaggaggccaccacgttccgggccatctccggggccgcgctcagcgccaacgtctccacgccgctctccacctccgttctcctcctgctgccggacgactccacggcctcgtcggccgccgcagcatcctccgggtttgagagctccgagtcgttcgccgccgtgccgctgcagcccgtcccgaggttcccgtcggggcccatctgcgcgcccgccgggggcgggttcctctccgggcccatagagagggggttcctctcgggacccctcgacgccgcgctcatgtccggcccgctccctggcgccgccacatccggccgcatgggaggcgccgtgcccgcgctccgccggagtctctcgcacggcggccgccgcctgcggaattttacccgcgcgcttctcgcgcgggcggaaaagcttcatgattccctggatctcggctcgcccgacgccgcggccgccgtggccgcctgtggtggcggctccgccgggctgcagtgggcgcaggggaaggccggcgaggaccgcgtccacatcgtggtgtccgaggagcggggctgggtgttcgtcggcatctacgacggcttcaatggtcctgacgccacggacttcctcgtcacccatctctacgccgctgtgcatcgcgagctccgcggcctgctctgggatcagtgcgagcgggaggagcagcacgacacacatcccgaccagccgaccagcaccacggcctcagatcatccggaccagccccccaaccgccgccgcgcccgccgatcaagacccccgcgcggcgccgatgatgaccaacggcggtggaagtgcgagtgggagcgcgactgctccagcctgaagccgccaactcagcgccctgctaggagcagcagcgagaacgaccacctcgccgtgcttaaggcgcttgcacgcgcgcttcgcaagaccgaggaagcctaccttgacgtcgccgataagatggtcggagagttcccagagcttgcgcttatgggctcttgtgttctagccatgcttatgaaaggggaggacatgtacctcatgaatgtaggtgacagccgggctgtcctgggaacaatggacagtgttgatctcgagcagatcagtgagggttcattcgatggattggttggggatggcactccgctcttgtcagctgtgcagcttacatcagaacatagcacgtcagtgcgagaggtaactgaattgatgacttcacagtttgattcaagattaactgagtcattcagtgactgttcctttgatgatctgatattacagtaactcataaggtatgttgcctggttacaggaagtttgcagaatacggaacgagcatcctgatgacccgtccgcaatctccaaggaccgtgtgaagggctcgcttaaggtgacgagagcgtttggagctggttacttgaaacaggttagtttatatttgattacatcagttctgcacataatgaatttgtttagatgattatgatcatgcacttggaaggataaatttctagggtcagagaaacagtctaatctcattatatcaggtgcaaaatatgacacttttgctgtggttctgggtcaacaaatagttattcggatcttgattaatcaaaagtcaaaaatggaaagcaggaactggtatagctggtccaaagtttgaaaaaaagagtaaatcgttttcaattctaatttccttggagtggaaattatgtccattttacactgaaacagactgtattgaccttgacttaaaagcttatggtgacatgtacaaaattttcaacgaatgaataaattacttgagtttcacagtcaccgtgtctgaagaagtgaaggagaagctgctctcacagaaaatgaagtttcttttgcttctgtccaagtgcaaagaatgtgcttgtgcagtactgaaatgtggccaggaagttagcaagtggagtggctttgaagggaggcacgtttctccaacgaagctaaaatagtgtcggttctagtaaaaactattatatataatccatttttgcaaatcaatcatgacacaatgaaagagggcagtctctttcttggaactgaagtgagatatagcttataagatggaaatttgtgacgataaccatgaagccaagcaacccaaaattttcatatgatcttggtagttgagtcaacatgcctgaactttgaccttttgcatctagtaacactaaaagctatatcatctgtgctgcatcttgtaccatactcttgtattccttcctgtacttacaatttttgctatgcttttacagcccaagtggaatgatgcgctgctggagatgttcagaatagattacgtcgggtcatccccgtacatcacgtgcaatccttcactctttcaccatagactcagcacaagggacagattcttgatactatcttcagatgggctttaccaatatttcaccaacgaggaggcggttgctcaggttgaaatgttcatcgcaacaacccctgaaggcgaccctgcccagcatctggtggaggaagttcttttcagagctgcaaacaaagcaggtatactgaagtcatatcgtgtgtttggtagtcgttgtgcagtaacttttgaacttctggaaggtcaagatgaattagctcggatcagtcactgatcttgtttttcacatgccttgtggttgcaggaatggactttcatgaattgatcgagataccacatggcgaccgtcggcgataccatgacgacgtatctgtcattgtaatatctttggagggcaggatctggagatcatgtgtgtaaataggtcagccatactagtactagattagagaaagaaacgtatatagagagagagagagaggttcttgaaggcgagacctcccagctgctactgtacaatatcattgaagcactgggtgggcttgggatctcggcgcatccaagttgaatcacgatgaggtcgtggattatgccgatgcagtgccgtataagatgttcatgtaaaagaggatttgttcaattattaataactaaaatagtgaccaattggtcaactttctttgaaccgtttttgcatcctctgtgttcatatcatacgtaactgtacatgtgcacgggagactgattcaaagttggacttctatggttctgaaatactaaacttcatgcaaaaatgcaaatggttctttggtcagaaatcatttgcggtgttgacctctttaagtcttaactggtagccctttccagagctaacccatgttgaacaattcagcagccactgcaaggttgccgtccttatctgttgtgaccaaaccatgggttatccgtggtactgtgccatgaatgaacctaagttgacctctgatgtagcacgccctactaacaatcaatcaggacttatggggtaagcattatctcttggatttagcactttcgtaaattcagagatctgatgatcttgattgctgtttcaccaataattggatggagtttggctttgttgtgcgtattgtatttcgtgtctacctccacttgctg

SEQ ID NO: 3453 - DNA, 3711 bp, Sorghum bicolor
  misc_feature (1)..(1195): n is a, c, g, or t
nnnnnnnnnnnnnnnnnnnnnnnnnnnnnnnnnnnnnnnnnnnnnnnnnnnnnnnnnnnnnnnnnnnnnnnnnnnnnnnnnnnnnnnnnnnnnnnnnnnnnnnnnnnnnnnnnnnnnnnnnnnnnnnnnnnnnnnnnnnnnnnnnnnnnnnnnnnnnnnnnnnnnnnnnnnnnnnnnnnnnnnnnnnnnnnnnnnnnnnnnnnnnnnnnnnnnnnnnnnnnnnnnnnnnnnnnnnnnnnnnnnnnnnnnnnnnnnnnnnnnnnnnnnnnnnnnnnnnnnnnnnnnnnnnnnnnnnnnnnnnnnnnnnnnnnnnnnnnnnnnnnnnnnnnnnnnnnnnnnnnnnnnnnnnnnnnnnnnnnnnnnnnnnnnnnnnnnnnnnnnnnnnnnnnnnnnnnnnnnnnnnnnnnnnnnnnnnnnnnnnnnnnnnnnnnnnnnnnnnnnnnnnnnnnnnnnnnnnnnnnnnnnnnnnnnnnnnnnnnnnnnnnnnnnnnnnnnnnnnnnnnnnnnnnnnnnnnnnnnnnnnnnnnnnnnnnnnnnnnnnnnnnnnnnnnnnnnnnnnnnnnnnnnnnnnnnnnnnnnnnnnnnnnnnnnnnnnnnnnnnnnnnnnnnnnnnnnnnnnnnnnnnnnnnnnnnnnnnnnnnnnnnnnnnnnnnnnnnnnnnnnnnnnnnnnnnnnnnnnnnnnnnnnnnnnnnnnnnnnnnnnnnnnnnnnnnnnnnnnnnnnnnnnnnnnnnnnnnnnnnnnnnnnnnnnnnnnnnnnnnnnnnnnnnnnnnnnnnnnnnnnnnnnnnnnnnnnnnnnnnnnnnnnnnnnnnnnnnnnnnnnnnnnnnnnnnnnnnnnnnnnnnnnnnnnnnnnnnnnnnnnnnnnnnnnnnnnnnnnnnnnnnnnnnnnnnnnnnnnnnnnnnnnnnnnnnnnnnnnnnnnnnnnnnnnnnnnnnnnnnnnnnnnnnnnnnnnnnnnnnnnnnnnnnnnnnnnnnnnnnnnnnnnnnnnnnnnnnnnnnnnnnnnnnnnnnnnnnnnnnnnnnnnnnnnnnnnnnnnnnnnnnnnnnnnnnnnnnnnnnnnnnnnnnnnnnnnnnnnnnnnnnnnnnnnnnnnnnnnnnnnnnnnnnnnnnnnnnnnnnnnnnnnnnnnnnnnnnnnnnnnnnnnnnnnnnnnnnnnnnnnnnnnnnnnnnnnnnnnnnnnnnnnnnnnnnnntattattattattattattattattattattattattattattattattagttattattattattattattattattattattagatcatttgttaaaacaagcctcggcgtctcatggtagcatgatgatatgatggtaggagtatttagtaaccaatgtccacttaaacgttaaacagtaaccaatatatcacatatcatttaactgattattgggctaaataataaccaattaagtaggctaaacttacaatttaaatgacacaaatagtagatccaacgcaaatagccgatcaaagtacattgtataacaggttaaacggtgagtggtttgccagcaggccaacgatgtgcaatgtgctgcctctgccgacctacatcgtgtattggccgcaggaaccagggaggaggtattgcggacggacacgtgaaaagctatcattgggcatcatgcttttttgcagagtccggtgattgtgctcaaacgcttttcaagcatccacctgtcaactgatgattagcacttcaaatattgtcaagtccaagttcttcgcgtctcttacacttgtcaaaaaacaacagcacgacctaacccaaaaacaaaacaaagcaaattacactgcccaaaaacggtgaagtacgtaaacatttatttttttaaaaaaaaaagctgtagaaaatctccgcgtccaagcaaaaccaaggagcaaacgacacgtcgtgacacaggcatgcagcatcactggggcccctaaataaagcagccaatccgcacctcccaccgcacacgctctcaccacttcccaacaggcatcacagcacgcacgtacggacggacgggcactgcacgcgggcgtcgcgtcgcggtccgccggacacgatccccggcaaggcaataatgagggcgccccccggccgacgcggcctggtcgccgccggcgcctgcgcgctgctgctggcggcgttcctcctcctcggcagcctgctggtgacgacgccgctggcgccgtacctgctgccgccgctggcgctgtcgctgccgtgcctgcccaaggtcaccgcgccgtcggggtccgggtacggcgcggcgcccggcgtcgcggagctggcggaggccgccgtgacgtacgccacctcggagaccgtgccgcagcagtcgcccgaggagatctcgctgtcgctggccgtgctccggcgacgcgcgccgctgcggctgctggtgttcggcctgggccacgactccaggctgtggcacgcgctcaaccccgtcggcgtcaccgtgttcctggaggaggaccccgcgtggtaccgcgaggtgcgggcgcagtcgccgttcctccgcgcgcacctcgtggcctaccgcacccggctcgaccaggcggaccgcctcatggccacgtacaggaggcacccggcctgcctcccgtccacggccaccggctccggtggcggcggcggcgacggcagcaacgccaccggcctgctgcgggtgcgcggcaactgggcgtgcccgctggcgctgcacaacctgccgcccgaggtgtacgagacggagtgggacatgttcatgatcgacgcgcccaagggctacttcgcggcggcgcccgggaggatggccgcgatatggaccgcggcggccatggcgcgcgcgcgccgcggcgagggggacaccgacgtcttcctgcacgacgtcgaccggagggtggagaggatgttcgccgaggagttcctctgcgaaaagtttcgggtcggcggcaccggccggctctggcatttcagcatcccgccggtttcacggcgcgggaatgccacggcgaccgccggtgaccggagaccgttctgttaaaccggatttatatcgtcggccctgcagttggagtggagtttttgttcaaaaagcagatgtaaatttttgtttcaaattggaagcagagtgctagcaggccaggtagtaccaaacacatgtactttgtattactctgtacctcctttctttcggaggtaagtaaagcagcgaggttactgttttccaagacaagtatttcatcagaaatagctccaacaatgtgatgtcaacttcagccatagtagcactacctattgggttatgcaataaggtcttgtttagttatcaaaatttttgaagatttccaatcatatcgaatttttgtgtgtatgcatagagcattaaatatagataaaaaaaaactaattacacagtttatctataatttgcgagatgaatctgttaagccgagttagtccatggttggacaatatttacccaatacaaacgaaagtactatagtaactaaatttaaatattttttttgcaaactaaacaagactaagaattgtaatggacagcgggaaacatgacccataccatttttggtgtatgcaaggacatggggggcatggtccatcaacgtaacctgtctcagcaccgtccttgttgtcttctgtctcacatccatgaaccatgagtggtcgaatctccacaaagacaacatag

SEQ ID NO: 3454 - DNA, 2992 bp, Arabidopsis thaliana
ctcatgataattccaaacccgtggaatatcaactgagattacccgataaccctggaattgcagatttaacaacataagttcaacatttttggagatatctaatcagtccccaaggatcacatcaacacataagcatctaagttaccatatcctaacaaatgtttaaagctacctgtgattaagaaaagattgtttgcagataactgttgaaagactagaacttgacaaaccttcatagagagtgccataatctgtttatagtaaacatctgcagttcctgcaattccaggaatacatatgagcggaggaacagtctttggaccaaagtcatagtaacgccattgctttgtcccaatctgcagttagcatgcacataaagctagatatttataagattgtttatgctctgagcaaatgacattccaagaaaaaacaaaaaaaatgaaatctttcattccgaagcttgaaacagtggacatacatgtacaaatgcttaacaaatcacagttttccaaactctaagcaacacaacccgaacaaacattacatctatagagccattcaatagttgcttgggattagtagagctaagaactaaatatgcgaacataaacaaagacaaatcactaagtgtgtcacaggctactcatagatcaaatcaaaagcaacactaaaagaatctacagaagttaaaaagatcaaaaatggagaatacccatcactaaactaaagactaccaagttcttgcttttagacaagaacccaaaaattaaaattctaagcataaaatttgaacccaaactcagcaggataaacccatttacgatagaactactcacacaaaaaattctgcataaacccaaacgattaaaacccacatgagattaatcgaaaatcaacaaaaaaaaaaacaaaaatcaaaacctcaaaagctcgagattaaacctaatttagtagccgaatagaatgcagaatcgaaaattcatcaaaagtcaaagagagagagaggaagaagaaacatacgggaatcttgtgaagaggaacctgagatttaaagtagacgtaatctccgggcgtcgaagagacgcctttcatcgccgatcggagattttcaacatccgatcgaatttatgtatttaatttcgcttttgctcttcacgaacaactttgcaattaatcttttttatttttttttgctctgattttcgataggaattatataacggcgagataacagagtctcctatatcaactgcctgtcaacgttgacgccgtgaatggtccgtgattgtagcagtcattctcagttaacgacgtaaagtatgtaataattaatggtcatcatgtgactcatcaacatctattttcacatatgttttgattagatttcggtatgaatcaatttccaagaatatttggattttgatataatttctttcattttattgatctgtctttcccaaccgaattacccatatttttaatatatttggaataattgcagaaaaatgcacaaacttttctttatttttaatttttcatagtgcaaatgtaaaagtagataatttagcacgaaagattcgtatcaaaccgtattataccatatatgtaaacaatattttttgggattaactattttgaattctaattaatatcggttgccaaaaatataaagatctattttacgtactactcttaaaattaatcgagaatcagttaaaagaaataagtaacatatatccacctggaattaacattgtctccaatatttagtaaattatcgacccaaaacacatggaaaaaaggaaacttcttaaagaaaaggaaatttgtttgatgacaagaaaaaaggacactagaacctgaaatatgtgactatactacgtaaccctaaagctattcacaattctcttctctctcaattttctctcattacgatttgcgaagtcgtcttcttctctgtttgaatctcttctctgtttttcttttcgtttcaaaacatgaaatattgcaaagtggaattacgcttcatcaaccaaaggaaactctctccatcacaaccaaactcagttctcgttttcatcgaaaccaaatctgaagagatctttgtaaacccaacaaccggtcaccaaaccagccggtccactccggcttcaccatcttttttcgatactatcaatctctgtagttctagtcaccaccacatccgatcacttctccgtagtcggttcgttagctaccattttttgtgtgatatcttagccccagagatcgcgacggaggcaatcaacttaggttttggacgaaacggctttaccttcaccgtggtcgtcacagttactaaccggaccgtctccgttacttcaaacgacacagaaatcattgagaatggttctactagagaggataaaagcagaggaattaaagagttcgaacatggaaacagagtcgtgttccatctgtttccacgatctctccagtccgaaacctagcgatctcccacgcatgacttgttctaagaattgaaagtattagggtttcatctactgattgcataacttgtgtcacacgtacgctctatattggggaaattttatgtgattttgtttattaaggtttcaaatctaattttgtttcattcgctctgtgcttccagaaattgaatgtaattttgtgcttttaagggttttaaataagatcattggaccatcattaatgggaggttattaacaatggctcttagcaataatttaggaatagattttgaaaatttggtagttaagagtttgggtaagatttttaagtttagtcatcctcaatgatagtatattaagttaggattcttaaaaaaaaaaagatatgattttggtttatgtgtggttttgtggagagaaggaatatatgcgatgaagtaattggtggtgtttggtgtattgacacaaagatataaaagagattcataattggtatttaagagttcataatcaaaaca

SEQ ID NO: 3455 - DNA, 2755 bp, Sorghum bicolor
tgaatttccacattagcatataattggtatttctttattataaaaaggaatcatattaagcaagcatcttacttattaaacttcggaactgtgcaggttgtgaaggggcaccgctactaccactactatttgtgttggttaacatgggatacaatatatcattactacacctactaaagatctcctcggcagtcatatcttccttggcttctacattctcaggttttcatactgtcttcagtgcaccatcccatttacttacaccagcggctagcacatcaaacttttcaagttttgtgcttaggtttcattttaacttcacaatgtctcaattttatggtaaggtgcacatctgaatgttttgaagaagggattgctgtcataccacaggagaaaacacttaactaaagtaccactgagtgttccattgatatgtgggatgggttcattttgggacaccgattgcacaaatagcattaatgtatccaccatagttgaactggtttaaaaattaaaattgttttacacagtttattgaatattatctagccttttattgtgaaacctttatttcaaccatacacaagctaatacttatgaagtcccaattgacaaatgattgctttggtttgattaactattatggtcggccttcctttagtgggagaagaaaactggttgcagtgcttgtgtgttcttgcatggaatggtgggtaattgctatacataaatcttctatagatagtgagatactgagatggaatataatgctatattatgcaacacctatcagggtatgatactatgaccaaagcatcatgtttttaaataagatgaataagcaccttagctgcaacttagtagattattctggtacactctcaactacaaccagaaaggacaatgatatggctgatagtgaattagtgataggacttcaaatggatgagttacagagaacacagatgtattaactttatttttgtgcttgtttagcagactaccatacagactaagtgactaaccttgccaacaaatcatggacctgcttattcctatcaattggatactatcaaatagtttacaatcttcttcattgttgggtattttctgttcatgatgacaacattaattgaattatatcatttagtaacaaagtgaaaaaaaaaactgttttttattcctatcaataggacactaacaagtagttttagccttcttcattgttgggtgcttcctgttcatgctgccagcagtaagttgaattatatcatttaggaaccaaatgaaaaacttttgagcctttgacagttcagaagctgtcctagagcagaaccaacattcattttataattatgcttttgctgctaccacgtacagagcagtcattgaattatatcatcgaagaacaaagtgaaaaacttttgagcctttgacagttcacaagctggcctagagaagaaaaccaacattccttttataactatgcttgttgctgctaccacgtgcagagcactcaagtaagttgtagcatgatatatgaactgatcatgaatgatggttttctcgtgcagttccactgtccatctatgcattcaccctaccactgccgtatattggtgtggcatcatctctgccacctggctttgttgcgggtgcagctgtactcaccgccggcttactactatacagcctaccacaggcgcaacattatggaaattctttccacaacaaaaatgactagttagcattcatttcttcattggtttatcacccttcactccaagatggtgcgtcatctgggcttgaaaggtagaacagaagttctcctgagggctacctgactgttgtatgttgtatatgatacatatcatatatatactcccacctataaaggcgaggaaatagcatatggatatattgggaataaagattgagaagaggaataagtacctggcagttactgagtgaaggttggagaagagcatgcacagtggtgagacgggaagagaaccagggagaagagcaggagcatcatcaccacagggacgaagagaaggaacagcggtggtggcggaagtggtggcagcaccaatggcaggcacaggaggatcactgtcgccaccagcaacatcatcagttctcccttgcttatcgtcgacgccaccgcccgcgctgtgatggaacttctgcctcccccaatggctgcccggctccagttttttttttttctaagctttcatgttctgttgtgaggaatttgttgtatgtgagaaaaatgttgtacccaatggaggaactggtaagctatatatggccagctttaagcagcaggccagatggggtgttttggcttgtgtgtccttgtgactgggcatgtttgatccttttctgcttccagttccagtacaaagactgcactgactggttgagggacccgggaccgtttctttctgggacgtcgaggaatcccttggtgcgctgggctgcggtggtcggtctggggagagcgagatgggggacagggctttatgcctacctgctgctgacggatttgcaaaaccagcgatagtctgacccgcaaattcgaatttgttttccccatccggctcaccgctcacagttgaagtgatagtgattcttctatatgatgcgctagtactatcttgagtgtgttgaattaagcctgtccatgaaaaccaattttcgtttctgctgacggatttgcaaaaccagcggtaatctgatcctcaaa

SEQ ID NO: 3456 - DNA, 2686 bp, Zea mays
ttgctcctgcatcctcgtcggtggccatcgccgaccatcagcccgacgaggtcgtatgcgctccatcttgtctcacgtgcccgccgccgaccgctgccccggtgaggttgtccgcatttctctcgtcacgtgcaccgctgatccaaccgtcagcgcttcgctcgtagcgggccgccgtcggtggttcggtctaatcgtgcgcatgtctactttttggcgagacgactcaagcttggccccgataaatgacgagtaagaaatataaagctgcatacgacttcgttggattttgtcattaaattttattgttaaatctttgtaaattgtactttgaaatgatattgcaggcttgacctgccattaccaagcaatctctactattgtaataattagtttcaacagtcgtgcgttctaacggtcgtttgtcatctcattcgatattaatatgtagtctttagtagcttctaacacatacaaaacggtcacctgatatcctgagttctggttgttaacttataagctcatggaatgttgtcatcttatcccttctgtagtttgccatcttatcccttctgttgatgctcaagttcagagcttttgttctttgtgatggattcttgaatagattgatctgttcttgtagcatgccaggttgtgagagacctcagtcggaagttcgcgttcatcctgtatgttatcatgtcgaagtccacatttatcgctgatgtaagttcaccttacctttgttggttgtggcttgatccttgagttgcaatataatgccatgtttaaatataggacgttgacgatagcatccatttcttatggggtgtcgactcgaaaaccatcttgtgttctctaatggtattgggatcctcaagacagactgtgacaacttgtacgcgccattccctaaaggtaactactaaaacagaacacaattttcttaggccatctccagcaggccgtgtaaacggccgtgcaaaatgttgttttgcactgtttgtacagtgaagttttaaataaagagtaagataggaagtgagataaagagtattctggagatagtcttatacatcaccgtagcaacgcatgaatatatacctagttaatattatatgatttaaattttatcttaaaatacttgacgctctatgagtttagtagtttataatacatatttatcttcttctaatacatgaacatcctttttagaatacgtcataggacgatcaccggtacggaggatctaggcaaacaacataagaatcgagcgagtgctaagagcatctctaaaagactaataaaatagctcgtaaagttaaattttagataatcaagagtaaaataactattcaacagactcgctatttggctcatcaatatacttttcaaattgactctctcactatttaaacttggctagccactatgactaactaaactagatagatattttggtggaggaagatgctatatatagagtgtaatatttataaaatgataaatataaagctaaaaataaagagttacttctctaagcacggctggatttcaggcctctagtcctctactagtactagctacacgacgtgcacgcacgcatcacagcatcaacaactagacacgcacacgctgcacgcggccggggaacccactgattcccccttccccgcgcgcggtttgatttcctttcctggtacggatccatatcatagtacatagatccagtagaatagaaggtgatccgaccgccggcgcttgcgttgtttttcccggtccattgaacctgccaaccctcctaaccacaggcacgccaaaccgcgggctccggccaccacccccaccaccaccgccacctgccctgccgcacctctccaaccccaaatccagggggggcaccatgcgtgcatcgatccatcgctggcgcgcgggtccggcggggcggtctgtgagggcaaatttatataggtctagtgggtacccggctacggatagatatgatgctgcactgcacatttgctatatctgaggctcctgcgcgcgccttggcccttggccaggtgtctgtcatgcgggcgatgccgcaggaagaagaagccgcggtggcgacgacgaccatggccgggggcaaggtggcggcgctgctggccacggcggccgcgctgctgctgctgctcccgctggcgctgccgccgctgccgccgccgcccacgcagctgttgttcgtccccgtggtcttgctgctcctcgtggcgtccctcgcgttctgccccgccgcgacctcctcgccgtcgccgatgcatgccgccgaccacgggtcgttcgggaccactggatcaccgcacctatgttgacgctgacgatgagaggtctcgtcgatcgacggtcggcttgcaatggcgcgtcggaatcaagcagttcgcagttcgcacacgcatgcatatgcctgacgacgatgccatggatcggagcgaggaaaaaaaatgtacagtacagggtaaacttgctagtagagtaattggattgcttaggcgcttatagcttagctgcggccttgtagcgtgagtgtgcgtaacagtgctctggttctttctttccattctcatcagctgattgatcagctgacgtacatcatgatttactcatccggttccctcctcctccttcgaattctcatcatccg

SEQ ID NO: 3457 - DNA, 8008 bp, Sorghum bicolor
ccctcggcatctatagctaggctagtgtgcgagcgtgctaggttacagaacctccacagctttttgagcgtcctctgtttgccctgcagctgttccctgtcatgcagcaaaccagttgctgcatagtacctattgctcaaccccttccagccaaatttgttcatttggcctccaggatagttgccattgtgcatctctaataagtagcaagtgcagtacttgattaaattattggttgtccaatttgctttgctcttgtggacctaaatcatgaaaagcgacaccacgaattatagataagatgaacaaccaaaaccggtgattacagaatagtatgaaagaaagttacattttcaagaacctctcagtaatgaaagagtagcaaacacaaatcaatctagctttatcataaatcaagcatgaaactagttggagtacaatcaatgtagcacagatatgaaatggaatacgatgtgacatgtaaaaagcgcagagtaccttgctgggcgttgggtggaagttgtcgcggaccatctgtgcaccctgagcgcgtgcccgcggcctggctgccgtgcgtcgagtaggtggggtggcgccctaggcaggcgtcagcgggtcgccgaaggcttcatctgctgagcccataggttgactggtgtggcgaggcgactagaaggcgggacgccgaggtgtctcggccgtcgaaacgcgaacgagaggtggcatgaggtccctgcttccacagagatgctcggcgtactggtcgacgtcgtctcccgcccattggtcaccaccgttgatgtcgaggtcgtcgaaccctagctacgggttgggggtagctgcttgaccctacaccggagatgaacggactttcgaccggaggagctctagaagtccctcgtgatgtcgacgcctacagatctggtgttgtggctcgggttgaagccaccctgctcaccatcgaagccgccgccaagtctacccatggttgacgtgctagcggggaggaaactagaggagaaggctggatctagtggggagagctgagatctccgtcgatctacgacagccgagtgaagcaaccagagggaggagagctcgacggcgggcggtgtgcggtgcgggaaggggcaagaatgagcgaagggttagggtttgcgctgcgggcggtgtgcagtgtgtataaggccttgtttagttctgaggacgcgggcaggcgtgggaatttgggctctgccagccggttttggcctgcggaatacagggccaaatttttacgggtccgtttacttccaaaaggccaaattgcaaagttgttggcatttcgactaaaaaaatttggaagtaaacaaggcccaatccttatcgcaaccactccatctgcatccactcttgaaaatttattttttaaccaaatcttgaaaattgttggtggatggctgtaaaatacattaccaacggttagggcttttctctcttcatctctcacaataaacatagtaggtaaaaatagaataacaaaaaaacacaagatagagagactattatttattttctctaataaaaaatcatgattacaatatagagctctcaatatataattatatcatagcttaagagcttggtaagaacccacatataaatggactaggctagactgagaccttatgttttgcaacagatatgtgtatttttactctcaacaatttttgcaaagctttccaaacctgtttttttatgaggcctttttttttttgagaaacatgaggctctatttattgggcattgttgggacgctttaggcccgtgttgggcttccccgtagcatcgggcctcggctccgctctggcgctctcatgttgggctatttgttacgggccaaacacgcacggaaggatgaaattacgcaaccgcactgtgaaggcggagagcgtacgggttatccttgtttcgacgcgctggttcaccctacttcccgattgcccgaagatctaccggccaggaccaaagcttcgtcgactccctcgtcctacctcacctcctcctccgcttgcttctccgcgatcctcctctttcccgcgacttcctctttttcaaaaatcctcgctagtctcgtgccccgttctacccacctctaccttcgaatcctagcgcctcgcctccgcatcctagggtttgcccgcccccgccgccggccatggacgcggtggtcgtcgacgcgggctccaaactgctcaaggccggcatcgcggcgcccgaccaggcgcccccgctggtgagcacacggatctctggggggcgcctctcagtgcgctgtgtgtgtgttttttttgtgagttatttgacattctattttcttgtggggccttttgctgggcaggtgatgccgtcgaagatgaaggtggatgtggaggaccaggagctggccgacggcgccgtggttgaggaggtggtgcagccggtggtgcgcggcttcgtcaaggactgggacgccatggaggacctactcaactacgtcctctacaggaacattgggtgggagattggggatgagggccagattctcttcaccgaaccgctcttcacacccaaggtgatgtatctccctgctcgaatagagcttgatatgcttcatgtttcggccttgctgatgtgggggtggctagggtatccaatcgtgaccccccaaattgttttaggacaactaaatttgctgaattactaatcgactagtggggcttattttttggcatggcttataagtactagttattaattaggttggggtattctggacttgtgtcttgaactcgtgacccaacatttttttttgtttttacatgattgtttttggagtttcatgatctcaaacatgactcttaattagatggtcatgccatatgtactctaaactttgatgtcaaacattttgctatattggggatgtgtgtgcatggtggatttaatgatctatgtggaagttgataacaatagttaaactatataactgaatttggtagtccttttcataccagagctgaaatgatggaccccgatattttgtggtttctgcagcctatgtgtaaggtcactgcaaatcttggtgttgtataggatctgcactagagcttactagaaagttgaagtccggcctccaggtcaaatttggtgtgcattttaatttaaaaattcgaacaagctaagattgaatcaatagtgtagtgtatctgtgtgccagctacaaagtattcaataatggtacctggtgggcttttctggtgtgatgttttgcagatgctggcatcatagcagcacatgtttggatattgtctcatgcatcttctaagtaggctttggacatatgggagctgcaaaataatatatcttgtacttaatttttttgtcttccattgttcatgttctgagtgtgtctaatgcatttctctagtagttcttttgtacatttgaaattggttataattgtcttcacatctcttaatgctctctgcagactcttcgggagcaattggtgcagcttatgtttgaaaagttcaatgtttcaggcttttatgcctctgaacaggctgtattgtcactctatgctgttggacgcatttcaggatgtacagttgacattgggcacgggaaaataggtaatatcgcaaattcaaagcatctttaactttggatgattcagatttcaattatgtttattccacatctggattttgtttgtgtagcaatggtctgaagctattgactttttccttcatttatttcgataaaagagccatcctttacctgtagattttgactctgttaatgtttaattcagtcctcttgtcagctttcactgctgtagatttctttgatgcaaaccagcacatgtcgaaggcttgcagggaaaacatatatgttcccttctgagctcaaaagttgtgcaatagaaagaaaaggtcaactagtgattgatgatctttaaggatacacaaggacatcacatgtgggtgacataaattctttatgcaaacaattttcaggaatgtttatattacaatacaaatatcaaaacttcaaaatgttatgggctttatgcaattaattaattaatctagtctcgtgaatgaaccatggtttgtgtcatactgttgtaatgttgtgctggttttatttgtgtatctttgccaatattttcaaaggcggcgcttagctccaccttggcgctaggtggagctgcatcgcctcacttggcacctaggtgttttgtctaggcttttttgtgcatagaaatgtttgggcttgacgtatgcttgaaaatggaacatattagagatggaggaagatgagctgcagtcatatcactcatggatgtatgataatttaagttttttagcaggattattctaatcacccacataaattacatacgcttagcattgcataggcactagacatagcccgatcgcctgtctagcatgtagcacttttgaaacactatttttttgcatatagctgtgccacaattctttcacctaatcatcgtttgcctttctacaaagatgtattattgcattccttgctcgcagatcagtctttctgcaggttcttaaagtaaacaattaccaatatttctttttcaacttggttgccatttgccaattaagtgtaaagatgaaagtaaatgtagtaagtggagtttctgataagaagctatttgagaaaacaatacttattgcatatagagattgaagatataaaatgacaatggaatcattttgaaaaagtacttacatattataaatagtttcataaatataacatagatagaatgccaaagttgcatctgaataacaagtggatgcctagaagtacactcttcccttaccaaatgagcacattatattatgaagcctcacacctaacaaaataaccaaaagatagtagtagtatacctgaagaaacagtgcataatgattacacctgctccacatcttctttttaaaatcttgttttctcaggtgccagtgactcccagggtatgcatcatagttatactcgtcaccattaactccgttagcacagcaaaggaacagggactagaagatttcttaagctatggttcatttacgggaatgtgactgcatgtttgtgctttaaaattgtttatacctgcatttatcttgtgattgttatttctttaatctttcaaagctcttactcatttttggcgatttgtttagtgtggcatagttgactactttgcaaaagacacacagcataacaagtcttttgattggctagctttaactaaagtagacattgcctacatttttggttgagttatggccatccagtgcttgttttacttcactaattagtatgtactcccactagacccttttatatagtggtgtgcaagcaaggctgatgttggagagtgtcatttgcttctattttaccagatattgctccagtttgtgaaggagctgttcaacacatagcttctaagagattagagattgggggggttgacttgacaaacctgtttgcacaagaactgaaaaaatccaatccatcagtaaaccttgatgtttctgatgttgagaggctgaaagagcagtatgcatgttgcgcagaagatcagttggcttttgaagctataggaagctcttgccaaccagaaaagcacactcttcctgatgggcaggtaggttattatacattgttttgccgtaaatcttctgtcaaacatacattcctctcttattgtgtgattgattttctacataaatgcatgattattgtgtccttgtctcttttcttgcttttattaggtccaaataaagtgatgaatctatacaaactagtcttttataaccacttctttctccaggttataacaattgaaaaagagggatacattgttggtgaagctttatttcaaccatgtatattgggcttggaagattatggtatcgttcaccagctagttactagtgtctcaaatgtttcatcagagtaccatcgtcagctgcttgaaaataccatgttatgtggtggcaccgcatcaatgactggttagttattgatttcatatgccagatgccttttgttcttgatgtgcacttttatattattcaaccttgtgagctatatgtcaaatgcatatttattagctagatagggtaagtaatatcattttggtttaaactttcgtggatttaacctatgttttctagttgaacacagcttcattcaagatgaaaatctgccttaggtatgaactgattgtgtggatgccaacctatgcaccactagtctggtacattctctgttgttatgttccctaataaaaaaagtgtcagctttgatgttctgttgaactttgaagtttcatttgatggttgctctttggataagtagccaaatattatggcaaatatggataggcttgagtagtcaaaactcaaatattatggtgaatatgggtagcaatagcacaactggaagtggaaagtatgttggttaagtaagaattgggttgctgaaactgattcttgatattgaaataagcatttatcgcacagctacatttcatcatggttacagctttgcatgttcaattggctctcttgggcagttgtgtatacagcttgtccatctttatgcataattaatctaaactcctgtgcttagactcatttagtcactatttcttgcctcaaggctttgaggacaggttccagagagaagcaaatctgtctgcttcagcaatctgtccatcacttgtgaaggtaccctcattgctgctcctagtcaattcccatctcacttgcctggctattactaacttaaacaatgtttcctccagccccctgaatacatgcctgagaacctagcaaggtactcggcctggttgggtggtgcgatcttggccaaggtcgttttccctcaaaaccagcatgtcaccaagggcgagtatgatgagacggggccgtccattgtgcacaagaagtgcttttagagacaactaccttgaactaggacggttggtgcaccgtttgctgctgttcatgtcacaggtgtgctcatacctgaatattgcaggtgtgatgcttgtgtgtacaccttattccagccacagttgatacctgactgttgcaaagtattgatgcatctagctcggttaggctgttattgcccctagggtttattcagagtgcaatagagtgtaacatcgacatgtatttgttaggagttttaggcaattgcccatttgtacctgtagtatcagagaatttgctgagatttccttttcaatttacattatgatccattatctgttcagctactacttctttggatcatgctcacaaattaagcgcgtcacagttcaggccacataaattgtactcaagctttgttagcgcggcaccccatgtcatagatcctttttttgggctaaactttgtaacaggtgtggtgttcaatttattcgccacacttatttgtggctttcgctttacctatggtgtgagttgtggtaatgtgactagcaactaagcatgcctttaattaggataacgcacgaggatggctacatcgactggtaatggacacatgcagttctttatggacctggtggatgtaacgttgacgtattatagactttgatctgtctccttagtcgcagcaccaatacatatatgaaattgtttttggaagattatgataccaaaaccgggggcaagattggacctacggcgcacaggtttttgtacctttggttttttttttcgcgaggaggtttctgtacttttgtgcatgagggcatcggcaaggttgaaatattttggaattcaatagtttagaactaaaccagcgcttaggcaagatccatttgccaccaggcaaagataagtgcctctcgcctgtcccaccaaccccctaaactaccattcctcggtagtgggtacctataattggctactgtcggaaaaaggtagta

SEQ ID NO: 3458 - DNA, 2824 bp, Sorghum bicolor; identical to SEQ ID NO: 3431

SEQ ID NO: 3459 - DNA, 8620 bp, Sorghum bicolor
tgtagacattgaagaaatagtaatcactgagtaaaacttacctggaacttctcaagtgacatgatttcttggctattttatttcataaggagttttcaggctgttgtgtttgattcctgtgtgaagaatatatatgagctctgacgaatagaaagggcatgaaacccgcagtttgtgtaggcaccacctagatcatgggtaacaacaagtaagttgatgtactgctaactgcttcagtgtttcaacaaaatgaattatgaatattctctacaaacagtagatggcgttctcctctgtaatatctccaatcaattttatgtcacatttacaacgattgtctaatgtgcttgacgtacattcttgttatcgggtctttttcagttaacaaaggagacaaccgtgcaagctactggagtagcctcgaacctagtggaagctatccagggagctgggttcaaactgcaaacactaagcttgagcttcgacgatttcgacgacataacagcaggagcaggaggcaatgtccaacccagcgagtgagctaatttgtgcagccgtgcttagtgccaaatgcatataattctgtcgggtacttttacattgtgtttaccccgttgaatttcccgagcacgtccttgtaattttttgcaaatggtgaagaaatcaacgattcttttctaaaaacaacttttgattatttgattcaccggtgttgtgtaagtttatctttggaaggttaatcttttaggtcgaattagtttagctcgttttttttagggttcgaagaagtttagctagcctagccattttggttgatccgtgaagttagtcgtggtgttcttttgctctctttttttttgaggggaagcaagacctttattgagcttcataagaagtacaaacgccatttggcggagatacaaaccaaatatgttcaccaagttcatcatagacactataagttaagatttgggcataacgactcccgaattcttggccagagcagtgtcgacattgatcttcatcaaaccgaccggtgggggatccaccgaaccgagctcccatgttcgggccataacagccatcttcctgtcctcgtttttggaaccatgttcctgtccccgttttcagaacgggagtgagaacttggggtattattttataatgtggaaacatgagtatttgtgttttcgcgtttacaagggtgagtatgcgctcgtgtatgtgagtgtttgtgtttataaatgcttctcaaaaaaaaaatggtgtgtgtgtgtctagctttgatagatcttctagcgcttccaatcgttgggaattctggaccgaaactgcctaccctgtcctttgtttgtttcggctcaacatgcaattgcttgacgtttgtttatggatcttggcctgcttgagtggcccattggcatgcttcgcccatattatcaatacttgtgtggagttgttcttgtcagacacgaccaaaattaatcaagagaaatgagcagaacgaagaagtcggaatatctgtacattcagttatcatatatttttttatcaaaaatcgattgatcccgctttatagaaaacatagtattttgctgacaaaacgagcttacaagtaaaggattcaaaagtgcccacggcaaccccctctcaaacaaagcactcttgcaaaacaactatgataacagtctagcagttcataaaataaaattacatcttagcatagaaaatgtcttgataacttttccactgttttcagagcccatccttttcggttatcataatcgctgtagattcacaagaaaaacgcagaacgtgaaaattttttctcgcgttctagtacattcagttatcataatcgctatagatttcgtgagaaaatcccaacggcacgccaagaggagatggccccacctgcagagtcacatcaagcctttacgaggtggggccattcctagccagttaaccacggggatattacgagaggcaccgcattccaccgcgccgcgtcgtcttcttccttccgcgtggagtggagaggagtcggaattgaaaacggtagaaacaccggttctgctccacgcgagaatccgaggagcgctgccaaagcgcctcctcccccatcagctcctcgccggaatcgacgcgacttgatccgcgagtttcaacgtcgcgaggagagcagaaaattacggaggcagagcggctgggagttgaagctagagcggctaggagtttggcgctaccaaacaggccctcctgcccttcggatccggaagttggaggagggcgcggaggcgagggttgcagggtctcccctgctggccggcagcgggggtggcgatggcgcacgagcggggcgccgccgcatccacccacgccgcggctccaacctccgaggaagacgcgctgtgagtctgctaaccctaaggtcttagtaggcatgccaccggacgctgcgagtgtgcatttggtgacctttgatctgaagcccgtggcaaatggcatcacaattttggtccaggtcgttggatgattaggattttcgtgatgtctggtctttgcgcggggcgggatcggaagtttggtgtctcgctggggctttggcgtgttcatgccgcatgctcccgcgatttgggctgcgggattccatacgagtgtggtgaatgcgagagcagagttgacatgggatcagagcggcctgcttgtgagatttgcggttattactaagatgagtggtggctggttgtgttatctgcactacagtttttgggatgttcggctaagttctgtcaggttaacttcgtcatgtgaaagaaggcaggggattactgttctagctgcaagcatgctacggtttggttgtttggtgtgtcatttttgaaaatattgtacgattttggccgttttatttaattcatacccataacctctagtttgactgaagcatggtccctgaaagggttgctgcatcgaccctgacctgggaatgttgtcccggccctgctacacagggtcatttttgaccgtgtaaaaccctctaccaggttccttgaacccaggaactttgtggactatagacgttctatactaatgcatttatttgctaaatttgcgttaaagcaaatgggcaagctaatttggaagggaaattcttctgttatctaggtttattgatttactacatgaagcacccctgtcgggtcaccgggagcctagaagcatagttggtgggaccttgtactgtatcttattggtaagtggaagtttcttacccatgttatatcgtgcctaacagaagatcatttcagataaataattctgtttcctgaattatacagaaccaaaacattgtgcattttgtcatctccatgtggctgttgttggatattgacaagacattgctttactcctatattcattttatatgatagctgcattttatttatctttctgtaggtaggttttgctgctgttgccatttcagctccatggatatttctcttcgcgccagatatgatctctccattgctatgcagctccaatgctatccttcttgttcttacaggttttctttttctatacctgcttcctttgggtattctatgaactatttatttgtttcacattatgtttctggctgtgaagaatggttcacatgaattcaatgcaggcatttttcaacaatattgggttcaccaggtcaggaaagtgagattgcaggtattgccactcaaaagggtgtacgggtgtttgactttgttttgtttcaatcatatctcatgcaatggagtcgatgtattagttgtaatataattgattttatcagattcagtatatgcattttggtgaagaatatattttcaaattaattaatgtgttctacttttacatgcagggctattatgattttagccagaaactgaagcgtattgctcgacttccatttgctactattgcttgtggtgagaatcaccaactaatctatgtgatgctctagtgctagcatttatcattattttctttagcttattacaaacatcagccacttccttttgttgacaaggtattaggatgatcttcttcattattcatttttcactttattgcttttatccctggagaattatgtgtatatggtgtgtttctaagttttatctagctgtcgctcatttaagaacatgttaggagaactgatttatactagaacaaagtattcatttctgtttttgattttcacacttgttacctggcagtcaaaatggccactgggtaagtggtaatggtctctatttttttgcagggactgctttgatgctcttaatcatggtctggcaacctcttttaaaaatactatcagtttcactgcttctaaggtgcaccttgctatcttatataactttagtaaattgtttgaatttgtctatgcattgctctataaataggagtggacatattcatcagggaaggaaataaagaatgcattttgatttcttaagataataatgttctagttctagtacctctactttttttgtttgtattgtgaagtttctgttaatttcgatgatgctcttttttaagcttatatgcttgtgactgttcacataagccatatttagacctgtgatgtgtctgcaacataaaccttacaaggaaactgggttcccattttgcttggaattatggcttgggatcttcatctaggcggataatgggttcccattttgcttgtctcctacaatctgtccctgctctacttttaagtcagtaggttggattgttggataaactcgacaacaaaaccttcttctgatggtagtatgtttacattagcttgcacgcaacacatgggaatctgtgtatgtctagaacattgcagttaagaccttttcctataatgcaggattgccatcgtagttgaagtcacgtgtgctggatgttttatgggcttatacatatgtgagttgagttcttaatatttatctttatattcaagaatatacagggggcttaatttttcagttgcacgtactgttatgtatctgatttctgtctgttgcccttaaaatgcacgctttgaatcccagaagattttgtaacatcggtggcatgtttcgtagggcacatccacaaatacaactctttggatgggcagcctgatattttgcggtcattatattctgcactccagccatcttgtactttggaagatcgaaggtacgattgcatcaggcacaaaaaatatactgagtttttcatgttatccgacaagtttctatatttgaacatttgagaaatgccaagcttactcttgtctcagcacacccaaggaatgctttatttgtgcactttgtggcttattttctaacattggaaaatgctagtagtattgaacctgcatagccatgtccattagaattatttgaaaatggtcttcaactcatgtctaacaaatatgagtccaaagtatcacagccataaacatgtattgctgaatagttctctttctcttaacatactgcgaaagccacagagattggctagctgatatttctctctctctagatatcatgatgcccgtctttctgatcagcaaatggcgttacttcagtaccaaagggagaatattcattatctgagtgaggaggtacatggaagtttcatgcagaatagttgataggagccccgccaaatttctatttcacttatttctgtaataataactttacataagtatttgtactacatgcatttaaatttgatttcttacattgcaaaaacattatttaggcatgcaaattatttaactagtaggcaaggcatgacaagtacataattaagtcttaggattttatggataggacagacatgatgtgatgatgaaggctgtgatagtcaaatatactaataaacttaaggtcacatttgttatgtacaccatctttatagtacataagattgcaactttcataatatttcttttctagaggatggggttaagcccggttttgtatattaacccacaagaaactatacagggagaggttaatagacagaaattaatgaagggtttgtaccgaagcttacatggaaggtcttgcaaattcttttactctatgagcttgtaggagagtgatattgataaaactgtttttcaggacatgtagcttggctgcttgttctaaaaagattattagattgtttctttgtttgaaattttccaagcagcaataatgaaaattttcatgaaaggaatttaagtattgttttgccttctccatcatgctgaatccttttgttgattaacaattcgtttcttttcttgcaaggtcctccgcttgcaagaatgcttaagcaaataccagagaactgctggaaccactcctcaggttctgtctctgtgcattgcacaatgatgttgcctgctgtatctcattgactagtagtctgatggttccagatctagacagaaggaactccctaactgtttcaggtggtggcttttcttttaatcttcaggttgatcttgcccatcttttagcaactcgtgatcaagaacttcgagcactcactgctgaggtaactatgtttactgaattattattactatgttatacaggccttgtttagatccaaaaagtttttgaattttgacactgtagcattttcgtttttatttgacaaacattgtccaatcatggagtaactaggcttaaaagattcgtctcgcgatttacaggcaaactgtgcaattagtttttgttttcatctatatttaatgctccatgcatgtgccgagattcgatgtgatggggaatcttgaaaagtttttgttttttggggtgaactaaacaaggccatagtgtgaaaagtgaactgatatgcattagatgactagatgatgagcgagaatgtaaaaaacgaaaattgttgataggagtataaatcagtaattcagcgctgactgtgcagatggatcaagtgcactccgaacttcaacttgcccgtggtttgatagatgaaaaggactcggagatccagcgtatccgtctgagcaacaaccaggtatgttgtttagcaatcaagaattcaagggtctaccatagagtgctgacagattgattttatctcgcatttgcttgaaaagcactgattattttaccataaacacgttcaatgcagtatgttgaagaaaatgataggctcagagctattctcggtgaatggagtgctcgagcagcaaaggtactcttggtgcagttctattgtgtatttatggcatttgcccttgttctcgttatcatatattttgagtatgtttaacagcttgaacgtgcgttggaggcagagcgggcgtcaaacatcgaattgcggaaaaacattgcaaagtttagaggtcatttgtacaaagagcaggaggcctgattttcccgtgtttgagaaacttgtacatcttcggtgtatgataactggttccgtaattttacctaagaagacaactgaccaaaggcagtcatctcggggaattgtagaattccagacgaccgacacaaatttttgatagagaagagcatctcggtctggatccattcgaactgagattgattacgagattggcacatgattgttcgatgatgcatatgcgtagtttgatgtacatatgttcgtaggtttgatcatgtagagtatggtatgcctcgtcataaaaaaaaaaatagagtatgatattcctgttattgaagactgctgagtatcatgagcatggtagtgtctgctttgcacgctcttgccattcttggagctctgctgcagatgggattttgcactaaactgaagaggcagctaggaaagaatcttacacgaacaagaacaagatcgcccgtccaactccagctcaaatacgcaacgcagtgaatgcacccagctcaaatacgcaatgcagtgaccgcccctccaactacagacccagttgggcctcatggctcatggatcactcgcgcctgaacccagttgccagtttggcaccatagttttctttttcggatttgtttgtgttttcctattctgtcagactctttcttctactctatatagcttgttacatattaggccatctcagtgcaggttttatggtttatttttcaacatattcgaaacaatatagaagagttttatctctataaaactctctccgcttccataaaactcttattacctctctctctgcattaatacgatgccatattagcatattaaatattcataaaattctaatgaaacctcattcctctagttaaagactggcgagtggttatgttgttgcgtttacttacaatggacagcgatgaatttgcatcgatagtatagaatggacacgtcgacatggagatgtttggaagagatcacgcgtctttgtatgcccatgaaccttggtctagagatgaataaatgatgtggacagtggactgcacgttcggacaatttaagcacggacagaattcgattccagggaacaggaagtgaagacgaagacgaaggccttatttagatccgaattttttttatttttgatattatagcactttcgtttttatttgacaaacattgtctaatcata

SEQ ID NO: 3460 - DNA, 5840 bp, Sorghum bicolor
acgcgtacaacacaaccgagtttttgtttcttctcttcgtggtagtggggtgtcctataagtttctgcggagacagtggccgtgtttggatcctctagctcaagtgaaggttagagttagtttttactccagaactagacctaaactagctctagctgaagacgtgtttggatgtaagggttagaatgaaaataaatgtggctgatcagtacgacagcagatcggtgcggcggatcgatcgccagaaataaagaggataagctcgatcccgtgtggcctgagttggagaaaaaagaaattgatatgagcccaagcagaactcatcgaaataatcatcactttgaagggatagtttttttaagtgggctagttgcaaaaaaaactacctctagccgactagttgaacgtaaattagcgcaaattagctttaaccctggatcagggccagtgtgtcgctgggcgtggatgagagattgtatgaccacaaaaactgacgacgtggggcattgtggaatcaaatagatgagtataagaataaaggggaaggtatagattatatgataaattatagttttaaaattttatagaaagataaaatagaaatagctacatataacattgttattctcatttttcatgaatattcgatgccttattttctaggcatttatattcttattttccatcgatattcaatagctttttattgcctccagtatgtatgtacatatttgctagtcaaattcaaaagttcataattttttttcacatgagttcaaattaagcaaaaaatatatttatttcgattaactcaatgagctctttgtaataaaagtacttccttcgttctaaattatatgtcattctaagaatcttggagggttaaagcatttcaagtttgaccaagtttttgtaataaaataataatatttatgataccaagtaagtatcactaggttcttcattaattatgttttcatagtatatccacttgatctcataatctttatattttttctataattttagtcaaatttgagatactttgacttttcaagatttcttaaaatgccttataatttggaatggagggagtactttatttcatcatttgagattgttttgcaatatgaaaattctaattaatattcaagtcctttttgcacccatttgtataattgtatgtgctccatatattatcttttcatatgcaatatccacatatcttgtaagcacaactttggagcacaaatttgtgaagcttgttatattaagacctttctatgaaatgctattgttttattatcttttgacgatcatattattttagttgaggactaccaatagacacacactgacttcgcgctaaaagtcttgtagttagattagttggaagctggttcgctaattgtattttatatcattttatttgtatatttcgttaattatttattgtatatgtcactatattgcatcgtttaaagtattgttacgtagtttaatttatttggtctaaaactattgaaccggtggtttaaccaattcttaatgattccatcgatgaacagataacctttccagtttgatttccgctcccgtctattcaaatactgtttatttagctgataagtcatgacaaaaaatattattgactaatttattatgaaaaaaaacacaattgaattagtgacaaattcgactagtacgaacagacaatatgcattggactattaccttttccgtgcccggtccccgttccgtcacgtttgcgcaatgagccaaagacgggacgcggtccaagcgtcccccgcaccgtctgtggcctgtggcccacctgtaagtcttatccagccccacacgcggcacggcccaggaggctagggcccaggaccagtcccacctctcagcgacccactcgccgcactgaccatcacccgaacccaccggtcagtgatacgccctcctcccctctaagccctagacagacgccgccgcctcacccgacctggctgcctcactacatttctattcccctctcgagcccaaaccctaaacctaaacctctcacccgccgccgccgccaccgtcaccgacagcaccaccaccaccactccctccgccgtcccggggctccatcccaccgccgccgacttccacctcggattgaagcagtgagtattttccgtccccttacatgttcctcgggctcgattggacctgttccgtttggttcctgtcactttctcgccattactgatcgctttgagtgttggtgtgtgctgcagatgtcgtcggacgatgaggtcagggaggagaaggagctcgacctctcctccaacgacgtcgtcactaagtacaaggctgccgccgaaatcctcaacagtaagtaacctcgccttatcgcccccttctaaccttatcacccatccttgcggttgatctgcggtccagcagcatacgtggagattgttagtttttctagtatttattgccgctgctgtttgttaattgttagctgttctttaatttagatgtttggcggtctttgtgaattgttagtagtagctggagttagctgttgggtgagtaaatgaatttcccgttacagttttgagaagcggaatttgatatgtcaaatgctgttcatattgaccatgatgtctatagtggtagcagtggttttggattgcagagaaggcttctacttggatgttagccccactttgattgccccattttctttggaagttttatcagttatctattttgtatgtatgttgaatttgttcaagaagtgcactgatagtaattgtgcttactttgggctggtgatgcatactaatatcagaaatgaaatgctaaactgatagtaattttgcttactttggcctgatgatgcatactaatatcagaaatgaaatgctaaagtgttttatcacctttgcaacagatgctctgaagctggttgtgtctgagtgcaaaccaaaagccaagattgttgacctttgtgagaagggtgactctttcataagagagtaataaatctttctgtgtcttagtgctcttgattgctactttattgctaatttgcatccttactttgggctcattgttgggaataggcaaactgggaatgtctacaagaatgcaaagaggaagattgaaaggggcattgctttcccaacctgtgtatctgtgaacaacacagtctgccacttctcaccgcttgccacagatgatgcagttctggaagaaaatgatatggttaaaatgtaattgccttgctgcaactatttttataatgcctttttgcagatattgctgtgggcctcaacaattttgttttccttttgcagtgatatgggctgtcatattgatggctttatcgctgtggtggcacacacacatgtaattacaagtgggcctgtcacaggaagagcagctgatgttcttgctgctgccaacacagcagcagaagttgctgtgaggcttgtgagacctgggaagaaggtataaatgtttcacaaagccttaagcttttttttttctttcacaggttatattttatttatcattgttgccttctccctaagcatatatatttgaaagatgtttgaagtggcaacctaactaagtatttcctttctcattttgtgggtgtgaactgatttgtttgtttcattactgatcccctctttatattttcagaataaggatgttactgaagcaatccagaaggttgctgctgcttatgattgcaaaattgtggaaggtgttcttagccatcaactgaaacaatttgtgattgatggtaacaaagtggtgctcagtgtctccaatgctgatacaaaggttgatgatgctgaatttgaagaaaatgaagtctacgcaatcgatattgtcaccagtactggggaggggaaggtaagaattatttttttctcatatgatgcccccccccctctctctctctctctctctctctctgtttgatcactttttgttgaatattcatggcagcccaagttattggatgagaagcagaccactatctacaaaagggctgtagacaagaattatcacttgaagatgaaagcatcaaggttcattttcagtgagatcagccagaaattcccaatcatgcctttcactgctaggtttgtgacttcacaacggattttgagttttgaggtgtttactttgttgtcttttgaaacatgagcttatgaattgctatagggcattagaagagaagcgtgcacgcttaggcttggtggaatgcatgaaccatgagctattgcagccgtaccctgtacttcatgagaagccaggtagagactactcccctcaatataatcactggactgcttgaattcgtttttcaacattccataacttctcactttgggtctatagaaactcctgtaaggtttgggggcttgtggtgcatattgatttatgtgcttatttgcaatttcttcaaacttctaatatcagcagacctataggattattgtaagagacatcatattaagtgattgcatcatgcaggtgatcttgttgcacacataaagttcactgtgcttctgatgcccaatggatcagataagattacatcacatccgctacaggagttaaagcccacaaaatccattgaagacaatgctgagataaaggcatggcttgctttggggacaaaatcaaagaagaagggtggtggaaagaagaagaaaggtttgtcccatgtacacagtacacaatgctcattattttgttgctcctgagctgcatgcttatttggttctcttgataaactagttacacactttttttatatgttttgtgttacgcaactcttgtaccttttgtcttgtttattttgtaaagttctttgtacttagttgtttgtttcctcatgaataggcaagaaaggagatgcagcagaagcagatcccatggaggcgacaaacggtgcaagccaagaataattctgatttttggaattactgcctccagccttttttcttgtttcttcactgcatctgatggtgttatattacattcagttgtggaaaaaattgagtactttttctagtgtcttaagaaatgaagcatcctgctgcacattatcgcatctaatggcacaaagtgaattatctacgaggcatgctcagcgttggttatcagttcttcacgcccttgactttggatttttcagagctcccagcctggaaattttagtggttgcatgaacaacgcactccagtggacattgggattttagcggttgtttggttctggaccctgggaattttgcctgggtcaggcatcgcttgattttagagctggcattccagtgttcgatttcgaacgcctggggctcgatgcacctgcctgggcgagagtcctagggtcagggctccatacaaacaggccctgccaactgctgagatggggatatttaattatttgccacttttatgtttggcatgagctcaattgctatctttgtatgtctataattttgccaccgctacaataaaaactccatggatttaggcattgcacgtgtggctatccaagtcatgggcacgggcatgtgaaaagacctcctgcccttgccgccggcctgcacgcagctacactagccaacaccactcttgggtctcatcgttcacatgcgcacgaaatggctgagtgtccgttaccgcacgcacctctgcacctgctcggaggatcgagcatgggctagctcgacacaaggcgcgtcatagacggccagtgcgtggaccatgcacagctcgcgtcagtatcctagttgatgttgtcgacgagtgtac

SEQ ID NO: 3461 - DNA, 3925 bp, Sorghum bicolor
aattgtgctttttttagatccttttgttgaggaagcaagaagggcatgcaggacatgcttagtagctttgcattaccagcccgaatgagtccaattcggctcgcttgcgtttagcaacgccaggtcgccactcgccagcggttgtttcccgctctgcttgtccggtaagctgtgtttactgtagtgtgtagtactctagcgctacaatctcctaacagtaaacagtgctgcttcctttatctttgaagacatttgatgggacatggtgcgttgcgaggtgacgccgttgctgctcagctctgccaagcatcacatggctgcttttgtagagaatccggtgttgatcggtcatctcagcagtgactcagtctgctacttgcttccttcggtaccaccaatgcctgagtcagacagcttttttcacgtcggctgggatgtgtagtcccgacccacctgggttgggatttgggaacttgggacttggggaattgcatgattcgtctatgggcaaacggctcgtgccgccgtgcgggtgcgggtcgtgcactcgggccgctgccgcatatgttgccgcccgaatgctgactggtcactggtccatgtcgtgtgccatccatttgaagtcacacagtgttcggattcctgtcttaccctttggcctttgctctacgtctacgtgtacagtatttgtttgcccatgaaggtgtgttcggtgttccatgtggttcttcttggtaccagcgaggaaattgaagagttgtcatattttcagaggaatggtgctagtctatactctattcagctatctgttaatgaattctgatattcggtttatgctatatagactgcttcgtgcagcgatggctctgctggttaacgaaataggcctgtcgggctcggagatactgcccccgtgacgaatctaatatatagatattagcattatttcggttttctataaatcaaacataaaatgctttatttatattcattttggacggaggaaggagataagcgccagaatctttcgttcaccccaatggaaatagcctcattccaaagttgtgattgacatgttgcagaggtgattgctgcaatgcaggcattgcaggttacacgcttgggttgtgaaataatggagctcaggcaacggggcccgtcttttgcacttaggccttgtttagatacccctaaaaaactaaaattttacaagattttccatcacatcgaatcttgcggcacatgcatggagcattaaatatagataaaaataaaaactaattacacagtttgtctgtaaatcgcgaggcgaatcttttaaacctagttactccatgattggacaatgtttgtcaaataaaaacgaaagtgctacagtgtcaaaatctaaaaagtttttgatctaaacaagcccttaatattaataacccatccagcgatctcagtgaccgtgttggagtacagtagtaggtcctagcagagtagcagatccataatataactcatgtcaggaaagttgtcaaaaaaaaactcatgtcaggaacgtagatagcgcctgaccagtcaaactacgcactagcatcgttacattgtacagtacgtaagtctactacgttctcctacagcaaggaccatgtgtcaagcgtgcggttccttttgaatggcccctactagcactggatacagagccagagaggcaagattggcaagaccggcctgatattgcctgcctgatgcggacttccgacctccgtttgtggaattaccgacccgaacgcaacgtgaggccttgcctagacgggaccctgtgcccctgttccgcctgtactgtactacctcgcgcgctttctcgctcgtcgtcgcgtccatcgagtcgctcacgcgagtcacgagccccctgttttattgctgcaagtgcaaaggctccctggcgagactccccccagagtccccaaaaggcccagaccccagagccgcacgcgcgagcgagcgcgaacaccatggtgctgccagcgtccattgccctgctgctgtccctgctccccgtggccgccgacgcagcggcagcggcagcggcggcggcggcggcggcggcaatggatccaacagagagggagacgctgttccgtgtcatggaggccgtgtcctccgaccgggactggcgcgtcgagagccccgacccctgcggcgcgccgtggccggggctcgagtgcaagccggccgccgacgcggcggcgcgcatgcacgtcacgcgcctggacttcggcgtggagcccaacccgacgtgcaaggacacggcgtccttccctcccgaggtgttctccctgccgcacctccagtccctcttcttcgtcgactgcttcaccaacccggccgccgccaccacactcaccctgccggcgcccggcgccaacctctcggcggcctccggcctgcagcagcttagcatcagggcgaacccggcgctgtccggcacgatgccgccggcgctggccagcctccgtgccctccaggtgctcaccatctcccagaacggcctcgtccgcggcgagatcccgcagggcatcggggacctcacctcgctggtgcgcctcgacctcagctacaactcgctctcgggacccgtgccgagccagattggccagctcaagagcttggtcggtttggacctcagctataactcgctgtctggcgccatcccgagccggatcggcgagctgcggcagctgcagaagctcgacctcagctccaacaacctcaccggcggcatcccggacgccgtcgccaacctgacctcgctcaccttcttggcgctcagcaacaatggcctgactggccatttccctccaggcatctccgggctccgaaacctgcagtacctgatcatggacaacaacccaatgggagtcccgctgccttccgagctcggcagcctcgcccgtctgcaagaactccggctggccggctccggctactcgggcccgataccggaggcgttcggccagttggcgagcctgacgacgctttcgctgcaggacaataacctgacggggccgatcccggcggcgctgagccggttgggcaggatgtaccacctgaacctgagcaacaacgcgcttggcggggccgtgccgttcgacggcgcgttcctgcgccggctgggcgggaacctcgacctgagcggcaactccgggctgtgcctggacgaccggagcgtcctgcgggacggaggggtcggcgtcggcgcctgccgaggcggcggcgacggtgacaccccgtcgtcatcgccgcgtactagctcggggagcagagctccgggaagaggtgtgcttacgacgactggttccctgttatgcctgcccagccctgcgtgcgtggccgtgtgctgcctttttgccttgatgaacgagcacgctctttattgattggactcttgtgatcgtactaccattaggccctgtttattgtaggcattgtgcgttgcaatgtttaggcccagtcgccatcgggtggctcccggctcctccgtgttcactgatgtgaagaaacttttctaccctctcaaaatacggcctcgtttagatacactcaaaaacccaaaactttacaagatttcacgtcacatcgaattttgtggcacatgcatgaaatattaaatatagataaaaaaataactaattgtacaatttatctataaatcacgagacgaatcttttaagcttagttactctataaatagacaatatttgtcaaataaaaataaaaatattatagtgtcaaaatctaaaaactttttgcatctaaacaaagcctaggaacgagtgagcaactagacctaaaaccgggttcctacttttgatttaggtgatctcctattttttgaagcttaattttcttttgcttcaactccaacagtaacacctaa

SEQ ID NO: 3462 - DNA, 5458 bp, Sorghum bicolor
atttggttgcataaagtaatgtcaacgcaaatggaaaatttccggcgccgccgctggaacgacaagggaattgttgataggccatggtaacaggatgggctggagtggaacggtttgccgatcaattaagacataatcgacatactgaaccatgggattaataaccctgctaccggatcctattggtacggtgttgaaacagacattgcgatcgattcacgtccacaaatgattgaaccaagcagcacctaagggagtggaattagttggtggaatgagaacatgggaatgcaatgctagtcagcaggctgcagtaagatatgaagagatctctagctagggtgcacttgcacactatggatgatctggaaagctgtgggccggagcactcaagactgagctttagcaactacgagcagtgtccaaacgaaatacagaacgtgagcaaaagagctaaccatgcatcgaactgcatcagttctcttttagtgaggtcatgtcattttcaacttcacaggaaaagcataaaaacaaaataaaccaataatttattcaacttcacaggaaaagcataaaacaaaataaaccaataatttattagaattttggcaattgaagaaaatagaagtatgtagcctagctatgcgaagcataatatttacgttgtgctagatattgacttgcacaagaatattttggtgtatgtaaaatcttatttttctggttaccaactcttcgagcaagagaaattagtggcgatcacatctgcactaagctcagtctcactgagaagtttcatggtgttgtctttaaaactgccataatatcgatctatatagaataaaataaaacttgaataaaacgtataagagagaatgatagaaagaaaactttccatacggttcaacctattgataaaattcctccaaaagtactataaaacaagtgtcattccgaaggaatttcgtatgatttgtagcaattcaatcttttgctccaaaagggttcataggaaaatttcctataggatttcgattctctagaattcctccatctgttctcctttagggttattaaaagaataatatatatgttaaaacgtaatacatcgatctacttcaccctcgacacccttctacattattctctctcgacacatgttttcagcagttctctttagactagttaaatgactttcgttttttttttggaacatgacaagttatgtattcgcgaagccacaaatggaaaatatacgccatgcatgtggcacttaaatagatgtgctcatgccgtacctgtggaagaatctactaattctctacattaactgctaggttgactttactaggatatatgatcacataaaatatatatttgctacatctgtacgattttatcaagaagctataagatgcatataattttctctcgtacaataagagggtattgacccggtgctttatagacacttttctttggcaaataatctgttactggggctgggcttaggatgaataaatgaacagccaattactttcagaaaaaggtatatacatagatgcagtctaaatgtatggagccaaactgaagcagctaattgatcgacacgagaaccagctgttacagtgtatttgtctccctcgtcgtcgacctctcttctgcaagacatggaccaccaacatgcaaaacactggaagattcgatagatatgattccaggggacgactaacaataagaaatagctaatgaacaaagtttgaaatcctgtcaaacaagtagaagagcatcatttggaaagtggtgcagataagaatgtgctgaggctgtgttgaaaacgagaatcacatgtatgcacagcttcttgagcatcttctaggacactataaatagcccaaagaccttgtgatttattcaagcccattggaaggcctgatagctttcgtaggtcttagctactaacctactaccacatactctctcacactaaaatatagcatatggctaatgactctctgacgaggggacacataatcggggatgtcttagacccgtttactagctcagtgcctctaactgtcatgtatgatggcagaccggtgtttgatgggatggagtttcgggcgtcggcggtgtcggtgaaacctagagttgagattggaggtgatgattttcgagtggcctataccctagtaagccattactccgagatcgagtccatttggtggtaggccatgtatatggccaagatgtcgactacttctcttatagtccagggacaacagcaccaactgatgcccaggagctactttccaaactcttgtcaaagttcgtgatggctagctaaaacagtctcctcgtgcccagctcggtggactacatagattggctcatgctaataatagcatttacagtgagagagacactaacaaaaaaaatgcaggatttctcatcacagcccagccccaaaatgctcaggtttattttaattccctaacatgttgaccatgtgcttgtgttaatgtaaatatattaggttatggtggatcctgatgcgcctaatcccagcaaccctaccctacgggaatacttgcattggtaagttatagttcttgcacataatactatttgatcaactgcatataccgttctgcagaactgaaaattaatctcactgccttatcttttgataggatggtgaccgacatcccagcatcaactgatgatagctttggtgagcatcaacaacttgcattgtatatatatgcattataatatccctcctttgcaaaacctcacatcctaaaagttccctagaacttagtcatgccccttgcattgtgtgtaacgttagggccccttttggagggctctcctacttcggctgcaccagtcactctgtacaactagtgtagcatagaactgatacaatttatagcatcctaaaaaacaacatggagttggtgaagccatatttttttagctttgatcactggctcctagaagcttgtgctatagtgccaaaaaggtggagaagcccaaaaccgcatgaggatgtgccaaagaggcccttactcttttccatataaagattcatatatataaagaaatacttgtagaatgttaatgctaatgtgccaatgcaaagtcttgtcattgttagtattttttggtaagttattaatatattagtatatgtgtagtgcatatcttctatatgactctgcaaaatatgtagccccctcctcttaaaacctaaacaaaagaattccttttttgatagtttagtgtaatgcaatgtttatgttttctatcggtttgattctggtcaatgaaagtaatttaattagatttagtcatatatatgtttgcatcttcctgatttatatagaaaaatattattaaaggaagtgaacacttataagcacattctaattaagactttcaatcatatagtacaatatttgtatcaattaagcgaaaatattgcaaaggatcagaatttgctatttggctaacttgtatcccatttgtgtccatgtttttatattttagatccgtatctcgccatttgttagtgaacttttacattcatatataaatttacaagggtactttttactttcttgtctattatgtgactttatatcccctttgcaacaacattatccatctagatgcaacatatttttatgatgaaaataaaataggatacatgtgcttaattagtcaatggtggagggaaggggcggccaaaccctctcccctaagtgtaacttccattgatttttttcaacttgattgaacttagatatgtgaaaaggctggccaattatccacatttctggctctcccaccgcgcttagttatataggtgaaaagagtaaacatattgggcacatatataggtattttataattttctgtaattgtatatgcttcaacatatgcaaatgtaagattttttatccatagtctatcacataaataatatttgcactaccaattaaacggaaatattattgcaaaggaactagatgttttatatgttatcttacaaaacattcattctgtgttttagcattatagccagctctagtttttttattagtaaattgaacttttctaaaaacgtatgtattttatttagtttactctcctttgtcacactgtcctacatatgacttgagtggagccttttgcaagaaaaatctctctctctctctctctctctctctctctcccccctttctcaagtcatatatgtaactaataaaattattaaaattattcctttctcaagatatatatatatatatatatatatatatgtaggacagtgtgacttggtatatttaaggtgaaggcaattccaaaacaaggcaaaaagtgccatgttatatttataaaattattaaaattaatggagaacacatctttttattgctcttatacagatgttaaaattaaactggaatatgtaacttgtgtggtttgcctaaccaaatccaaagtaaaaaagcatggacatttaactggaatatatattgattgctcttatatataacagcagttaaagagcatggacattaatttagtgttttgttagtagcttggaatacactgatgttacctacaaatagaaacaaagtaaagttactactagtataaaatagaatgaaacgccacaaagattgtgtttctcatgatttcttttgaatgaaatggcaggccgagagctcataccatatgagaacccaagccccaccatgggcatccaccgtattgtcttggtgctctaccagcaactggggcggggcacggtgtttgcaccgcaagtgcgtcaaaacttcaacttgcgcaattttgcacgccgtttcaacctcggcaagcctgtggctgcgatgtacttcaactgccagcggcaaacaggcacaggtgggagaaggttcacttgagtaattttaaccttcccctcatgttcaaggtgtgaaggcaagcttgggcctacaagttacgtatgtgtgtttacctatgtatgagcttgagcctacaagttacgtatgtgtgcttacctacgtatggtcgtatcgtcatacagtaccgccaatagcacaagctagaaataagatgttgtatttcttgcgcatgtacactcccaggcactgtaggtgcggctggtgagccactgtaggggcctgccaaaccggcgctacaaatcagagatgatgtttgccttttaataatggcactagaagagaggttatcactgagtgtactgatgcgcgctgtgatattttgtcacacaccttggcaataaacatatgtgtactggctctcttttatttgactgtgaaccttactgaaaatttcgatgtaaattacgaaattcagtttaatttggtggatgcctactgtcaaaaaaaaaagtgacgacaatctttagttttcatgactt

SEQ ID NO: 3463 - DNA, 3461 bp, Sorghum bicolor
tcatccgcgagttaaaccttgcctcgatctcgtgtgatgattttctccaaaacccagagacggcctcaatgagttcaatgaaaattttagagagttaatttaaggcttgacttgatggagttttacgagagttttacagatattaaatatgctgatacagcattatattgatagagagaaaataaaattttcataagaatattcccaaaaatgttgataaaaacattaaatttattgatataacgtttggcgcgcacatctcccaagtttttctagtctctaacatctctgcagcacccttgcactatccaccttttctcttttttaattgtttctgatctccatgtcagctgatgatttctaccaagccttgtttactttggaaatattttgcaaaattgctacagtaactcttttgtttgtatgtgacaaatattgtccaatcatagactaactaggctcaaaagattcgtctcgtcaattccgaccaaactgtacaattagtttttattttcgtttatgtttaatactccatacatgtgtctaaaatttcgatgagacggggaatctgaaaaattttgcaaatttttttgggaactaaacaaggcccaattgttggcgacgtcctcagagagaatttcataaggatgaaagtcttctgctatgttttcaagatatactttctttatttctaaatacctatcgtttacgtttctcgagaaacaactttaattatatatatgtattaaaaatattaatatttgtggtacataattagtatcattaaaaagatctttgaatatagttttttaataaatttatttaaaaatataaatattgtacataatttctataaatcaagttaaatctgtgttgcgtacaccaattgtgataattaaataaggacggagaaagtagatatgttagggcactcccaatgcagaaactatcatagtttctatagatattaattatagtgccacctaagcattttgctgatgtgacaagatagttattgaagagagagcaaaaattatagaaaccggatctaagttagaaaccatgtctacacaaaatccaagacatgaattgatgtgattagtgagaatggagagagaatgaatatgattggataaagaattattctgtagataatccattggaccatggtttctacacgtactccctctctgtccctgaaagctgcaacttctagagttgtcctaagtcaaacttttaaaactttgactttcataagatactcattttatgtcataaatattgatgctcttttctataaaattggttaaagttaaaaaagtttgactgacatggattttagaaattgaagctttcagggacagagagagtagtatctatagaaattaataaagccatgtttagatgcagccaaatagccaaaacttttgaagaaatgagcattttttggaagaatggatctaaacaggagcttgtaaaacttgggctgtaaagatttggaatttgggaccttggaagcccaaaactgtgtaaacttgcttacgggcccgtgtcttatgtgttgcagaccaaaaaatttgaaaagcatctaaatacaatgtaaagtttacagcaaaaaattttaggatgtacagatttgggatctaaacaggccctaagtatagaaactttttagcattggaagtgtcctttgaatttgagacataaaacccttcaaaaactagcctaagaaagactttaatgctgtgcaattgcatgcatgccagcagagccgaacagccggatcagttctgcgattttgccttctggcctcttgtactttgcgaggttctttcacctttccaaacatatacgagtagcagagtaagtatgtttatatttaatcatctttgataatgcttgtttcttactgcctgatctgatactgatcgagaatagtcctcactgcctgtatctacctcgtgttctaggtggagtaaaagatgactgggaaaaagaccatggcctcctctgctgctggcacttcaaagaagccgaggaagacgaagaaagcgaccaaggccaaggacgtgccggtggtggtgttggaggatgaggaagacgcagctctgactctatccgtggaggagaaggacaccctggagtgcgacatctgctgcttacccttcgagtctcaagttttcatggcaagttcatatgaccatgcatgtactattttctagtatatacatacatatgtccttattcgctatcatcacatgcatacacaccggccgtttatactcgcgtgcgtacgccagtgcaagaacgggcattctgggtgtgccaactgttgcctccgcacgagcggcaagtgctggagctgccccgagccgatgggcatccgctgccgtccgctcgagaagctcctggcggcggcgaccactgcctgcaagttcaggaagaacggctgcaacaaggccgtccgctacacggagaagctgaggcacgaggagaccctgcccgcgcgcgccgtacgactgccccatcggcggctgcacctacagcggcctgggtctccgccaccacgtcgcgcaggaccacggcggccccgacggcttcgccgccatcgtcggcggcctccggggcacggcggtgaccgtgcacagggacgcgccgttccgcgtgctgctgccgcgcgacagggacgaccgcgtgttcctgctgctcaacggccgcgacctgctgcaggggcgctctctgtccctgctctgcctcggcccgcgcccagagagcggcgtggagctggagtacgagatggaggtgggcggcgccgccgcgccgggggagctcgcgctgtcggcgtcgggcaccgtgccgtgcgcccggcggctcgaggggttccaggccaaggggtttctcttcgtgcctgatgcgtattggggctcctccggcaccgtctccgtcagagttcgtgtgtgatgtcgcgccccgtcttcttgtgatcaattgttcgtggaatcgtggtgtcgttgttagtaagtacactccgtacttgccatggtcgtgtacatttgggttccttaattatctaccatcgaaccatatccatatacgtgtaggtggacaataatcagttcattccctagtggtcgattgtttgtggtgtcgttaagtacatgctactccgtacttgccatgcattctcaatgttcatgtgtgttgcttatctaccgtcgcaccatacgtccatacgtgtaggtggaccattatcagttgatttcctagtggtcaattgttagtcgtggggtttggttttcagatttagagctattcgtaacgtgggtacatattagatgaaaattagtttctgcatatttatagtgtaatgcagagtgaagtggagccctattaaatagagccttagtttgcatccatatggcattagggccttgtttagttcttttttttgtgcaaaatgg

SEQ ID NO: 3464 - DNA, 11336 bp, Sorghum bicolor
ggatttatctactacaattcatgtttactatctctttttagtcagacgggaggggtcgcctctaatggaaatctcttacacaaaagttacagcaaatagaatcatttcaagagacaaagaaaataaacttgtttattatcttgtatgtgtctctaactctctactctctatagttcggctaacaaaccttgagagatactagttcaaccctaatgtcaaagttagtttctagctagttttttctagctaggttagatattcggtttagaacaaatttccaatgactagctgatttcctagtcaaccttccatatatagccatgattgaatattcggtggggattggatgtcatcctaggtgttgctctatggtctttggtgtttgctaacttgctaggatcatggctcaaatcagattgtacttcatagagacagtgacgaatctagaaaaatatttaagggagacttctgctaccttaagataacttcagccccttcttaaagagtatcaatgataaaaatttgtaggagaggctaagggggggctacgtgggttctacggccgtagggggggctggagccccaccagccccaccgttggctccgtcactgcatagagatgaccttgagagaaaaataagtccagttggccaagatcagtttgtagtattctggagaaacatggaaagaatattcactcttgatatgttataggttattattggtaaattgattcttcggtgcaaatgcgtgagaagctcacaagcaacatagaaggacataattcaaacattttttttcatctcgacaagctggtcacaagcataaacaaacatgatcatagtattgttcacaacaatgcggtggaatgccttaaattgtaggctagagatcaggaagttcgctggtgtcagtgatgattacatagtttgttttcataatgcttcatgtaatggatattggtgtgattatgagactggctaaatagttctttgaggcaacaataatagctctagcaaacatgagcaaatcggagttaaattccgtgatgttttaggacaaaaagtagcaactaaggatccataagaaaggtacatatggttcaaactttacacttacaagaggatcggagaactaaaattttgcaagggacttcacaatgatttttatctaactcaccaaagaattggaaactgcctagatctagtatcagtacaaattgcacgctaaggggatatgactggaagaaaaaaagaaaccaagaaacttggttaatgataacaatatgaagttcgtgcaggtgaatgtacctgacaaatatagtgaaataaaaacaaaatatttctgacaaaaggtctaattgttacattaaaaaaaaatatttgtgcgagtcatcttgttagttattcccatgaacgagaggcatgaatcataacgtacgctttgttcatttggcacataagttatgatagaaagtagtattcgttgatttgttgaatagctggcaaactcaagtaataaactttcagacgaaggatttttgagaacccaggggaagggatttgagctcgctcaaaattctaaagctagccgagccaaagcttcatgggcatggcccggaccccatttggccattccagctgagccgggagccaagctggacttgcgggaggagcccgagcgcccgagcgcgctgtggattcaactattcatgaccactcacgcgcgctctatgagcagctgggcccacaacccacaccatgcgtacatcacacacacacttacaggtggggccctctacctgaactattttcaccggcgcggtgacttcaccacccgtctccctcttcctcgtctcgccacccgagtctccacctatatatcggcccctgcggccgtgccggcgcgcctcgccctttcaagtttgcccatacaccaagggaggaacacacaccgaggaggccgcagcagggcagaccacacccgctcgcgtttcgggaatggcagtgctgctgcgcccggcggcgatcgccggaggtcggcaggtgtggccggtggcagaggacgatgagggggcgcgcgaggcggaggcggcgtcgcagcggctggtggaggcggtggcgcgcggcgacgcgagggaggccggcgagctgctcgcagcggggcgcgcggacgtgaactacgccggggtggtgtggctcagggcgcggcgcatcgcggaagcggaaccccaggagggcgccgccgccgaggcgcgggccgtgcacgaggagatccgcgccgacgtctcgccgctcttcctcgcctccggcaacggcgacgtcgcgctcgtccgcgccttgctcgtgagtgatcaatcctgctcctgttcccccccgcattccctccctgctctgttttctcgcgtcggaatttactgactacccgcatcacgattcacgcttgcttgtttttgcgtttttgttatgcttttgggccttgcgttttgggtcctacgcgtttaatcgttcacagagtaatccgaccccagatttggcatgctacgcaagttgcattttcgagctgttcgtgcgtagcgtcgtagcctcttccctgaaattttggggcgattttggtgccaatttgttttcaaatttgccgaccactgaagagcatgtgcttcattgcagcgttctaggctagccttttgccccgttattcgggccttgtttagttccaaaaaattttgcaaaacaggtactgtaccactttcgtttgtatttgacaaatattgtccaatcatgcactaactaggctcaaaagattcgtctcgtcaatttcgaccaaactatgtaataaatatttattttcgtctatatttaatacttcatgtacacatctaaagattcgatgtgacggagaatatgaaaagttttgcaaaatttttgggaagtaaacaaggcctcggtcttccttttaccggttggtgaaaagcgatacgcacggtattttcgaatggttttagcgggcgctgccattgttttatatataagtgccacaaaatcctacatcctcgcctcgtttgcgcttgctagaaaaaaggctggtatgtttatccacactgttgatccaagtacgagccaccaactcggttcgttctttgcgccaatcatagctctacctactgtgtaaatgcacgcgcaaatcccatttttgtagtgactacatcaatacaaggtggaaccaagagattttaccggacccacttcgaatattttggcctttgtataggccggagttatgagtacgggtttgttgtaggcagataaatgcaaagcagaatacatgatacctgtactctacttccctctcgattgcttggtcctttgcatactaggacttttagtttcgaaaaaatttcggatttcgatatcgtagcatttttgtttttatttgataaatattatctaatcatgaattaattacatttaaaagattcatctcgtgatttacaggtaaattgtgcaattagtttttattttcatctatatctaatgcttcatgcatgtattctaagatttgatatgacggtgaatcttgaaaagtttttagtttttagatgaaaacaaggccctagtatactagtgctggcagtatatgctacgtaggattcactttttgttgccctctgaagataagagatggattatagatcttagttaatagaaggattgctcattatgagacacatcttgcaaatggctgagaccaaattatgcggttcattactagcctaaaatcatttggagcctttaataactttgattaatcagttcagttccatttggagcccctgcaatgcaatgggaccaagcttttgctgcagctctttactgggtacggacggccgtcctcttccaaatcggcaaatggggcatgcagaggaagcggaagcttcgccggaacactcgagatccttggtgtcgtgttggcattggccgtggtgtcgacagaccacaaaataaggccaattactgacaaattctatataaaaaaaataaaatttctcgtcatttcaaattttaaaatacatctgtgaaacattaaatatagattaaaaataactaattatactatttatctataatttataagacgaatctgttaaacttaactagtctataattaaataatatttaataaatacaaacgaaagcactaaagtgtctatttttgcaaaaagatttataagtaaacaagacctaagctgcactacttggtttaagaatctgttcgcctgtttatttttttgatagtatttttttataataaattagcgaatattattttcaacggctaaatatgtatgtactggtatggtattgtatcagtctgccaaccaggtgccactgtagtagcagccaggttaattctactgtcagttaaaggaaggagcagtaacacgaacagtgaacacgcggggtccatccgcaagtaaaattatccccgccgtggcctacagttccaccgtgttgtcgcgtcaacgaactgggcacgcatggagatccataactgtaaactgcaggcgctggaaaaataaatcttgggggcagtagtactactaggccctagtagtaggagggttgggagacagtggtagatgggtttgacctgagcccggcaggaaggcgagccctgtttttgttaactcaccaacataatcagtaggagtagaaagcaaacccggccagtgtttgttaactaatgcaaccaagtacaacagctcaacactttggtagagaccaatatattcccctcgtgagcgcggtcgggtgtgggatcaccagtcacgtgccccccgcccggtctccgctgtccgctctcggtctagctccagcctccagccacgttccacgtctccttcgtgtgcgtgtgccgcgccgatcttgagctggtacgggatcctatggtacttcgccacctgcgcctcagaccctaatcaatcttaggttttaaccgcgttttactagaggatttactaatggtgaggcctagaaagtttgggactctctggggcgggcgagttgggacctcagtcctttcggccgtgccgtgtcgtggcacgggcgtccggcgcgcggtccggcttatccgccggccggcgtcatgggcggcgctcctggggggcgccattgattgggagtggatgccgctgctgccgcggcatgcgcccagcatctgccacgtactttcgctgccgcggcacggcgactgtgccgtcgtctcccctgataccactgtcgaaagtctaatgaatgcctctgccggtagcaggcgctcgcccatggccggccgtgcccgggcccttgtcccggaacgcgctgaagcatctccttcgttttctttggagctctggctcgtccggctagcatggcgtaaagtgcagcgccgtgtggcagtccatccttccccgtcctcttcgatcggccggacaatcatggcctgaaactcgcatgctgcgtgcccaggtggtgggacgatagtcttcgttacatgaaaccagccctctgaaaccgttcgtctgtcatcacgaatcacaacacttgatcagtttacagtccagtccatgcgccgtgtggccaggattacaccaacccgtgcgtgttcccagccggatctcatctcatccatgtatgccaggaagctcacatgcatgacctgcatctgaagccagatgctggtgcaccctgccggctgccgcccccaatgcgtccaagccgaaccagctgtgagctgtctgtatttcatcgcgccatgaaatgaggccatctcatccatgactccatgtccacctcccggccccaggccaggtagtaaggaccggtcgacgatgcttctcctcggctatctctgctgtattaaagacggcagcgcatgtgtcacagaagctcggcccagcgccgcggcaccgcagttgccagtgcaatgtattgggcgcgtggtacggagggaagctcgtccgtatcgtgccgtgtcctcttccctgccctgtagccatcagccccctcatctctgccaccggccgcggccagctgtatcccctgctcggctgctccccgttcctcctgggctgctctgccagtaacgcacgcacgcacctggcgcccatgcacagccgcgggcactccctcctgcctgcggccccgccccagccaccccagttcgtgtttcagggcgtggcctccgtgtactgtggcgcgccccagccgaatattgacgatggcacgaggaggacgctgcctgacgcctgtgaagaacatcaccccagttcaacagtgtgcgtgtttttttaaaaaaattcggtgtttactgtgtgttgctcgtgctagatcttggtgagatgtgaattcctggctgtttaccctggagcatccatccctaggacctgcttgtgatttgatgtctgatggttggatcacgacaccgatgcagcaactcttgtcgcccgattttgcgaatcgtacggcgtacgttgcaaaccatcgtttgcttgtgtggtggcaattcatttgctgtgccaaaatgcacaaggcagatgtgacctgcgaagccgacggagggtacacgatgttttccagcagttgcagcaatcctgaaagctagagaaccaggggtactactactgtgcaccgcgaggcggtgccaccaccagccacgcatgaggatttcatgagtagcgatcgccctgcagaattttgaccagattccctgcttccaggaggcggccccctcctgtctcttgcgtaaatgaattccagccatggagcaaccaccactgctccggttatttccagtgacctgacgcggccactcctttggtggtccgcacagcaccgacctgacccagtgaccggacatagtagtagtaacagcgacatttgttacccggacagctgttgtgcagtgcaggtcccgatgctcattttgtcacgccctgttcgatactactattgcttcttacaatgtactaccactagatctcgagccctgaattcgtgtatattcagtgtctgtagtaggtcaaggagagtaaagagaaggaatactaccactagtaaaaaaacccagaaatgtagaaccaatcagttaggtgaaataagcataagagaaaaatgtaatgcgatcattgatctcaaattgtttcacgagcctcggtagcggttttaaggtcctgttcttcagcattttacaacgagaatgccactgacattgtgttccattggattcttgaacttttgctcaagaatacaactctgtcacaactcacacgttatctgatggttcactgttctcacttggcgtgacactcgtgcaggcaaagggagcggacgtgaacggcaaggtgttccggggctacccgacgacggctgcggcacgggaggggtgcgcagaggtggccgagctgcttgtgcgtgcgggtgcgtcgcagccggcctgcgaggaggccgtcgtggaggctgcgctgcagggccaggccgcgctcgcggccatcttcatgcgctcggacctcgtccgcccccgcgttgccgtccacgcgctcgtgtccgccgcggcgcgcggcttcgtcgacgtcgtcgacacgctcatcaaggtactggaccttcgggtcttccttacttggtacaagtgctctacgtggttgcactcgcgtccagtttcagaaactatacaaaaagagctaggccttgtttaggccttgtttagttccaaaaaattttgcaaaacaggtactgtagcactttcgtttgtttgtgacaaatattgtccaatcatggattaactaggctcaaaagattcatctcatcaattccgaccaaactatgcaattagtttttatttttatctatatttaatactccatgcatgcgtctaaagattcgatgtgacgggcaatctgaaaaattttgcaaaattttttgggaagtaaacaaggccttagttcaccccaaaaagcaaaaagttttcaagattctccgtcacatcgaatcttgcggtacatgcatgaagcattaaatataaatgaaagcaaaaactaattatacagtttagctgtaaatcgcgagacgaatcttttgatcctagttagtccataattgaataatatttgtcacaaacaaatgaaagtgctacagtaccgaaatccgaaatcttttaaaaaaaaacaaggccctagtgttaatatcgtatactactatacaacattgtcgtattccacgtgcaaggcccagtatgtgcattgttggcccaagacgttgggttgccgtatgggcttttgcatcacgaaactgcgcaagctgaacggtgaacagagctgaggcagtcgtttagtcccacctcgtcagctgagctgcgccgtgaccaatttatagcggtgtgcgctagccgtagtgttgtgttcgtagaaaggagagacggttggcatctcccctgacagggacgggaacagtcttcggactttcctctagcacattgcggttaaggctacccacttcggtggatcttacccaatttttttttccagttctaattaattttcttttgcttatagaaacctactttaccaaaaaatggtttcttttgctagaaacttactttatcaaaaaaaaatgttagaaaattactttagcaatcagtatcattttattaaaatacgtcaatggaactcaatttttctttttttgcttacaaactttagcaatcaatatcagttagttacaacaggtgaatgaaactttagctctcagtttgttagaaacttactttagcttttttttctaagaaacttagtttagcaatcattaccagtttgttacaatattatgaaacttttttttcacttacaaaccttctttagaaatcaatatcagtttgttatagtctgtgaatgaaactttagctatcagtataattttttacacttatactaccactatcagtttgttataatgtgtaaatggatttcacgatcgctgtttcaaacaagatctcgagccctgaattcgtctgcttccctcaaacgcagtgtggagctgatccaaacgcgaccgctcgggtgctcctgcgctcgctgaagccatccctgcatgccaacgtcgactgcacggcgctctttgccgcaatcgtgagccgtcaagtcgctgtggtccgccatctacttcaggtgcgcatcatctgtcaacagcagccacaaaatacaactcatatccaggaatgggcgcttgacaccatctaccaactcatgttcaggccggcgtgaagagggacacgaaggtgaggctgggagcatggtcctgggacgcgtccaccggcgaggagctgcgcgtcggcgccggactcgccgagccttacgacgcggtatggtgcgccgtggagtactacgagtccacgggctccatcctgcgcatgctcctccgtagcgggtacacgtcggccactgcacacctcggccgcacgctcctccaccacgccatcctctgtggcagtgccggtgccgtccagaccttgctggcgtccggtgcagactccgaagctcccgtgaagacgtccaggagcaacaggtccaggccggttcacctggccgtgcgcctgggccagccggagatcctgcggatgctggtcgacaggggctgcgacgtgaacgcgagggcggacgccggcgacaccgccgccatcctctgttcgcgccacaaacgcgaggactgcctcggagttctcgtgtccgccggcgcagacgtcgcgctgttaaactcggctggcgactccccgtcctccgtggcctcctctgggggatggaagaccggcttcgaaagggctgtcattggcgcaattcggtccgggaccatcccacgctcgagcgatcggaacgtgttctcgccgctgatgttcggcgcgctgtgcggcgacgcgaccgcgatggaagtgctgctcgctcagtcagacgtggacgtggacgagcaggatctggacgggtgctcgcccataatggctgctgccaagatgggcaacgtcgaggccttccgtgccctcgtattcgccggcgccaacgtgaagctgagcaacaagcgcggcgagacggccattgggctggcgcagcagagcaagaagagggacctcttcgagcaggtcatgctcgagttcgcgctggagaagggcatgcctggaggcttctacgcgcttcactgcgcctcccgtcgcggcgacaccgcggcggtgcggcacctcgccagcacgggcggcgacgtgaatatccccgacggcgacggctacaccccgctgatgctcgcggccagggaaggccacgcgggcgtgtgtgagcttctcatctcctacggcgctcgctgcgacctccgcacgccgcgcggcgagacggcgctctccctggcgcgggcagcgctggccacggcggggttcaacaaggccgaggacgtgatcatggacgagctgggccggcaggcggtcctccagggcgcgcacgtcaggaagcacaccaagggcgggcgcgggaggcctcatggcaagtccctgcgcatggtcgctgcggcgggcgtgctcaggtggggcgggtcgaaccggcgcaacgtgatctgccgggaggccgaggtcggtggcagctcggcgttccagaggcacaggcagaggaagggagacgcgtatgagcacgggctgttccgtgtggtgactgcgacagggagggaggtgcacttcgtgtgccagggcggcgaggaggccgcggagctgtgggtgaggggcatcagggccgtgacaagggcggcgtttggcaagagaggcaaggagtgagtgacgcgtggctgctctctctctccgttaggctctgtaggtttgcagcgagcgcgtgcttgtaaagagttgtagcgggcgtagagccgtagcgtagaggggctgtgtggtttggtgtggtgtgcagctgcgctggtcttcagctcgaaggctttggctgctgggtttggcttgccatgatggtttttggttcaggggcatggggttgtgttagtgtgtatatagcctgggtgttgtctcggctaagttactttagctaactggcttgtagtgcgtttctatctgaactatcagtctcctttgagaaacttcgccaatttgagttattatatgagttctaagttctgacacgaagcaaaagagaaaaacacttcccggagaagctcaaaagacacttcctggggaagttcaaaaacagctaggccttcggcaccacttgcaacttattgtgttaaatagaaacaggaaataagaaacaacttgtttgagtagaagctgag

SEQ ID NO: 3465 - DNA, 7463 bp, Sorghum bicolor
ttcgatgtaatgaaatctgaaatttttttggaaactaaggccttgtttagttcacacccaaaatcatttttttaagattctttatcacatcaaattttgtgtcacatgcacgtggcattaaatatagacgaaaataaaaatttaattgtatagtttgtctttaaatcgtgagatgaatcgtttaaatttatagtccataattggagaatatttgccaaataaaaacaaaatactacagtaactaaaaccaaaatatttttaaaattaaataagtcctcatttcgccattgcagtagtaaaggtagtccacgtcttccttcccggaccatttttgttcgcgcgtgcatgctgctgacatgcaccagcacggatcatgcactcagcgtcgtcgtcagcagtttcagcaggtagcatgctctctctatctttaaataaatagaggtcttaggccttgtttagttcaccccgaaaacaaaaaaaaaattcaaaattttccgtcacattaaatcttgaaggacatgcatgaaacattagatatagacgaaaataaaaactaattgcacagtttgcctataaatcacgagatgaatcttttaaactctatgatttgataatatttgtcaaataaaaacgaaaataatacaatgccgaaatctgattttttttcggaactaaacaagcccttactttttaagatgtcaaatatatttaaatttaactaaaaaatatatcaaatgatattaatatttatatctataaataaatatattataaaaatatatttaatgctcaatctaataatatatattaataaatatcaatatatatttggttaaatttaaaaatatttaacggaaaataagatgtgtatttatttttggagcgagcgagtagctagacgacggtgggaatcgagacgccgaatccaaatcggaatcgggaaggtcgaatcgcgccgtagtgacgccagcagcgacggacgcacgcacggccggccggggttggttgcgtttgcggcggcgattgagagatccgatcccccgaaaacgagctcgcgctgcaattgcagtttgagaagccactccttcgaattttatctcgagcccacaaggtcgtcggcgtcggcgtccactgttgcgtgccggcactaacaagcatcaagcatctctgatcacttacctcaactagctaaaaaagtttgctactattgataccgatttttacgagaaaaatatattattttattataaaaaataatgctgataagtctaagcgaacaattatgttgccagtggcgccaccgcagaggatcctcggcccccggcaccatcgtcttcgtcatcagtgatgattccgtagtcactggccttggcctcactgcacgcaggaagaatcgtgtgagccgagcactccccacttttacgaattaattaacccagaaatcgcaggatcattgcgttccttccaccactaaggccttgtttagttaaaaaaattcgaatttcgctactgtagcagtttcgtttttatttgacaaatattatacaatcatgaactaactagtatcaaaagattcgtctcgtgatttacagtgtaattagtcgtctatatttaatgcttcatacatgtgtcgtaagattcgatgtgacggagaatcttgaaaactttttggatttcggagtgaagtaaacaaggcctaaaagaaaaaaaaagtgtcccagcactagtagtaaaatcaccggccgcgcccacacgtcagagacgaagacgccgccgcacccgcacctccccttcccctctccctccccgctcgccgccgccccggcggcttcttgcttcctgctgccgaatcgccgatgccgctcccgcgatttgatgggggccgcgcgcacttcaacgcgccgctgctgacgcgacgctgacgcccgggccccaccacaccgctttactatataactactccagcacgcgctgccccatcccggcctccccttactccatcccgcacccgcagttgtactgcgggcggaagcagccgcacacgcagaggcggcggcagcagtggacgccgaccaaccctaccctagcttccgggtgccggcgcggcgaggtgagtagtggctcagttccacgcctggcgtatcggattccgcgatttcccgctgacttcccttccattttttttttgtgtgtgtgtgtggtggatttttggcaggttcgtaggcggttggattcgatggcggtggtgtcgcggctggcagtcgcgcgggtgtcgtcggacggcgcggcgcgccccgcggcggcaggggggaggaggacgaggactgcgctcgcgggggttcggttcccgccggccgccaggacggggaggacgaggcgcggcggggccgtcgcggctagcccccccacggaggaggcggtgcagatgacggagccgctcaccaaggacgacctcgtcgcctacctcgtctccgggtgcaagcccaaggagaattggaggtcagaagctgtccatatgttgcttttcttattttttattttattttttggttcgatactagtggcagtgctggaatgtttgacgtggacgcgtaattcttttttgttgtttgatatgatatacatatggtgcgttcttatagccaacagcgctgtctagctctaaaattgaggttactttcaattgccccccgggggtgccgaacgtttgagatgggttagtaatgccttgtgccttgtaatgatgagccgggatccggctctagtgcgtactgtgtactaggatggattcattagtgtgatgatcacttggctaccatttcatcctgtaattgtgttcaagttatttgagtaccaacaatttggtctcgtatttattgaagctgtctttaaattttcgttttaaaaaaaggaaaatatattttgagcatcgacaatttgatctggtatttatttgaagctgtccctgtattttttttttaaaaaagaaggaatatatatttcagttggttgttcattttatcctcaaagtgcatgtctgtccctttacagaattggcacggagcatgaaaagtttggtttcgaagtcgacacgttacgccctataaaatacgatcagattcgtgacatactgaatgggctcgctgagcgatttgattgggacaagataatggaaggagacaatgttatcggcctcaagcaggtacggttccatttgctcctttcccttttgcatgaatgtggccgctatatatcatccaccaacaattgaaattttatggaaagggcgttatcatccatcaacaattgaaattggatgcaaagggcgttgcccatcctttcgatgggtcactctcactcatatgctttagttgacacagcttaacagaaagttgtgcaggtttttctgatggctctagtttatctttgtaacctgtctgatttgtatgggatgtagggaaagcaaagcatctcactagaacctggaggccaatttgaacttagtggcgctcctctcgaaacattacatcaaacttgtgctgaggtcaattcacatctttatcaggtaacttctcttactgacattgtattccttgtagagcatcttacggaaactatgatcttagcttgtctgtgtttttgtttgacattttataacactgaccattcttttgccagagatgatacaatagcaaacttgtattgcaaaccaaatgttaactgacacccctgcctgcgtaccatgataattctgttgagaactatatctttaactcgagcatcttattggagttcattttgtagtttttttaacatgctgagttgctgacttgggtctcatgggaaaatcttcaaatgcatggcaccacattgtattgtttctgcaagactcatgcatttcagtgcaattagggtatgacctcaaagtttgcctgttcttgcaggtcaaagcagttggagaggaaatgggaataggatttcttgggcttggctttcagccgaaatgggcactgagtgatataccaataatgccaaaggtaattctgtcctttatccttgtaaacttcttttttaactttgtttttgttcctggactgttaacaactgctcgccagtcacctccacccatgatacttgttatgacttttaagcatagtaatatagtattcttgatactaaaatagttacataagatgctatcactagaaatgctgtcttctggtacatttcccattgctgacacactagacttgctagttacccgtctaatgtgttgatcagttagaaaaaaagacagctcatactgtagccctgttcaaatatgccttaggcaatgactgcttctgtttcctgtaaaatctgacaaatcaatcattggtttgtagggaagatacgaaataatgaagaattacatgcctaaagttggtacccttggtcttgacatgatgttccggacatgtactgtgcaggtgagcatatttctatttctatgtgtggagtgccattttcagaataacagtactctttgtttgagctcatctaaaaaatacttgaaactctatctatgacataagttgattcatgaaagaagttaactgattattatgatagtcttgacagaagttcactcttctgtgtccaggttaatcttgacttcagttcagaacaggatatgataaggaaatttcgcgctggccttgcattgcagcctgtgggtatttttattgtcttgtcttctgtgataatttatttccttgttctcaaatcatgctggcttgttcatttaacagattgcaactgcaatatttgccaattctcccttcaaagaaggaaaaccaaatggatttctcagcttaaggaggtatttacttgatagccattcagggcatacataagttaatttcattatctccagttattaagacagttgatcttatgtgcagccatatctggacagatactgataacaaccgtgcagggatgctcccttttgtcttcgataactcatttgggtcagcattccttttgaactcccccgctcgtccaccttgagtgccattgattaattgcatcatttcctttaaagatattttccatgtgaaacaatcctgattatagtttctgtttggggtgcaggtttgagcaatatgtggattatgcattggatgttccaatgtattttgtgtatcgaaataaaaagtatattgactgcaccggaatgtcgtttcgggtctatttctatccttgatgtccttttacttctatagtactgtactgtaaagattttatatttttttaaccctccatttacaagacacagtgcttggttttcattcataaaactcatttgatttgtgtttattttgcaggattttatgcaaggaaagctcccacaggctcctggggagttgcctactcttaatgattgggagaaccatctaacaacaatttttcctgaggtttacccttttatctcttttacagaatggtatatctgtcattgctaggtatcgcaataactcttgtcctctgtattctgctcgcaggttagattaaaaagataccttgagatgagaggtgctgatggtggcccatggaggagattgtgtgcactgcctgcattttgggtttgtgacctgctttttttttttactttattttgtatttctgtgcactgcctctgacagccactagttaatatgaatatgggctctctatggtattagtttatttctagtttttgctagaagtttgattcagatttctgcttttatgcgagtctacaggttgggctgctgtacgatgaggaatcgttacaaagtattatagacatgacttttgattggacaaaggaggaaagagagatgctaagacggaaggtatctcaaaataattgtgcaccattctttccacacaatttggtttttctttttccttttcccccctttttgttggtggctcattttgggtctcaactctatagcctaccccaacttgcttgggactaaaaagatttttttgttgtttggcacaacggaaaatattcttgatagggaactaaagtttggtttgcctcacaactacaattgtcaaatagaactttaccatattcttgtgattagaaattgtctattatagataagaataaagtctagcagatttaattagttttgctgtgttacactgatcaggtacctgtgactggtctgaagacaccatttcgtgatggatatgtaagagatttagctgaggaagttctaaaactggccaaggttagtaaattagagtactttgctatgattaattattttcccccgaagtaaggccaagttgagagaaatgtttgtaataatgtttatgttgcgctaaccccagagtggactggaaagaagaggatacaaggaggttggtttccttagagaggttgacgaagtggtgagaacaggtaatgctattcagcatcctctcgtgactgaccatattttagctttgctgccaccaatcaatcaattgttctgtctctgaagatcctaatcaacttaccttgctacaggagtgacacctgctgagaggcttctgaatctgtacgagacgaagtggcaacgcaacgtagaccatgttttcgagcatttgttatactgatgacgccgccgccgccaacgctggacagagcttgtagatgtaccctaatacagaaactcatctgattcattcaacgcctgagtcggaagggctcagttcaggcacaggagcacgcacagctttggttagttgtttgacgggggaaccgctgcacgcctgcacagcccggtgatttgcttacaaataacttcgcttggaacggatcactgtgctttgacttcaccccctgtgtctccagggagatggaacaaaccactgtttgtaccggccctttttgttttttcttcagagatgaaaatgccgtatggaaaataagttccatcttctgtacgatgggaactgcttgctttttttttaccttcttttttttcattcaggattgttgggatgtttgtgcggggttaacatgctagagcagtttcacctacgataaataaactgatcgtttgatcagaaatatgcaaatgtgcaaaaaaaaaaaaaaaaaaaaaaaagctaacctgagacccattcatgggccacccaatctgatctgccccaaaaaaccaacccgatcctaacctgacctgacctgaagtttgatcagatctagacatacacgataactttgttttgacacatgtgctcgatatttttcttgggcctatttggaatgcacaaatcatgcaagaattctataggcaccacattccagatgtagttacgttgctgcaaaaattaatagaacgtcatatgaacgtttctacacgataaccatagtatgaattgatagaaattgtaatcaccaatgtgcatgcaaaattcgagtttgaacaacaact

SEQ ID NO: 3466 - DNA, 6552 bp, Sorghum bicolor; identical to SEQ ID NO: 3439

SEQ ID NO: 3467 - DNA, 3735 bp, Sorghum bicolor
tgttttttttgtcaaaattctcaaaatctcctgtccaacagtttggcaattgggcttggtatttatagcaagttgacaaattcttctcatttatttgcatttatgcacgtctagaataggcttggcatactgcatgcgcgcgcttttatagcaagctgacaacctgatgtttctttgttgatccccggaaccagtagatttttttaccaagtcaaaattgccaaacaatgtcctttttgttccctcccatatcattttgggagttgacaaataacaatatttgtcaaataaaatttgcaaaactgttagggttgctcgacattatatatccaaaaacctcaatatgcccactatatatggaacaggaacacctctccaattggctgtgttggtccgtacaatatttcctactctataaataggctagttctaataggtagattagatatatgccaaatatataggtttatgacttttttttttgagaacaggtccgctgattccttttttgttatgaggattagttttatggtcgatgtggcattaaattaataacgagagagatacattgccgtttgatgatataatgcactagaaataacctaagtgagtcactggtgtggcaataaaacatgcacagtgatggtgtggcaaatttccggccttcgctattaccgaattaacatctccagcagatcctcgcgaaaaaaatctcatccacaagctgagagcaacttggcattgaagaatggcgatgtgctatggcctttgccgagcaaaacgactgggccacggagcccttttttttcatgttgacagcggtgttttgtactttttgttgtctaacttgttaataataactatccgttaagcaaacaaatgcaagttcacaaacagcatcaagagaaaatatttgagtgatacgtacgggtagaaagataagaaatgcacgatcacacatatgatattgttaacaaacaattccagtgatacgtacggcgagaagattaagaaatgcacgttcacgcatcgaaaggaagaaatagcattggtaagtacatactcgatcatgctgcatgatggcagtatagcacgcaatgtgtactttttttcttaaaaaggaaagagtctgttacagcaaatttaaaaagcgatctagcagatacacatcttgacacgctttcaaaaaaagtatataaattacgaatatatatatatatatatatatatatatatctacatctatacgtgtagataaaatatatcatctactatcaaaactgagtctgaaaaataatgagaaagactgaagaaccttcagtatcatcctgtccaacaccgaggaccatgaaatactgaacaatactgaaacacgaatactgaacgatactgaaatctgttcagtatagtagtttggtgtagaactattctacacctatatatatatatatatatatatatatatatatatatatatatatatacacacacacacacacacacacacacacacacacaccaaattcccaaatatggatattcatgtgtgaacagaaaattatcgtggcagaggtattttcgtccaccgacagctaaagctaccgcagcatttttcaagaatgcccatctagcacatgcgcgagaactgacatgaagctcctacgaccatgagttccttgccattttagtttctctaatctatataatataaagccaatagacaatagtacagttgtgatcgcgttccgccgagtcagcagatcacatcagatcaaaatcagcgcgtccaagcgtgctgcccggcgtagctacagtgcacgggtgggagacgagccgggagccccctggccacaagtctccccggcgtgtcctccaccacaagctcgcctcgcctcgcctcgcgtcgcctcggcacctcacctcactgattgctccagttgcgtgctccctcaaccggcttatatgcgccactcgcccgccgctggtagatctcccctcgtcaccacagtcgtcagtggccgggccggccttatcttcttcgtcgtcctttgccctccctcaccgcaccggcctcgtcgttgttggccatgaagatccagtgcgacgcgtgcgagggcgcggcggccacggtggtgtgctgcgccgacgaggccgcgctgtgcgcgcgctgcgacgtcgagatccacgccgccaacaagctcgccagcaagcaccagcgcctcccgctcgaggcgctctccgccaggctcccccgctgcgacgtctgccaggtacgttaattacgcacgtacagcagcgcatgcacaagctagcggcatgcggcggcgacatgcgctaaccttgcttgctcgcgcgcgcgcggcctccgcatgcaggagaaagcggcgttcatcttctgcgtggaggaccgggcactcttctgccgggactgcgacgagcccatccacgtcccgggcacgctctccgggaaccaccagcgctacctggccaccggcatccgcgtggggttcgcctccgcctccgcctgcagcagcgacggcgcctgcgacgcgcacgactccgaccaccacgccccgcccaaggccaccgtcgagacgccgcaggcccaagccgccgtctccgccgccgcggcagcgcagcaggtgccctcgccgccgcagttcctgccgcagggctgggccgtcgacgacctcctgcagttctccgactacgagtccagcgacaaggcaagacgatagcgcaagctccccgccagtccatgtccgaccacccaccgggtcccgtctcatggtggtggtgttgttgttgtgtgtgtttgttttgcagctgcacaaggagtccccgctcgggttcaaggagctggagtggttcgccgacatcgacctcttccacgagcagcaggcgcccaaggccggcaggacgttggcggaggttccggagctcttcggatcccaggcggccaacgacgcggcgtactacaggccggccaaagccgctgcaggcgccggggtgcgccagagcaagaaggcccggatcgaggtcaccgacgacgaggactacctcatcgtccctgatctcggttaaatataagggcagaaagagcaggagttttgtttctttcttctcctgctgtgtaccacaagaattttactgtgtatgttgtgcatctttgactgtagcatctctcaattgtgaacatggtaagccactttgttgctatcctagtaccagactgagacactttgatgtttttaacataaacattttgcttcaaatagctgacactttcacttggggtaaagagagcacaagtgaaaagtactacaaacggtcctgagttctgaccaaagcttgttcaaatcaagaacaaaaccatgtgaaaagtcaatactttggatactagcagtacagtattttagaagtaccgggtaggtcctttacattacatggccaaaaaagcaactcgaatcctggtaaggtttggactcaagtagcggtgaacacaaatcctttgcgaaaaaacataacagggaacttcatgtaaaagaaaccgagggcaccacgctttgaatcatcagatattgctaccagcgtcttcatttcagccaccaaccatcttccatggttatacgacacctggtcaattgcatttagtatcaggaatagcctgttaatccctccttgccattggatggcgattcagatcagatatatatacacctactaaccccagaa

SEQ ID NO: 3468 - DNA, 3334 bp, Sorghum bicolor
gataaaaaagattgagctctttcctgaatcaccggggctaaaagcattacatacctcttagtcattgtgccaagcatgagttgtcgctaggtcgaggtcgttttataagttgtaaaaggtgctaatgtgtgtttattagaggaaaaaagagagccctgacctgatataaataaactagtcaaagttgcaaaaaaacagacctgttgagatttacctaccaatggtgcaattatatgcacttaccattggtcggaacaactacgagattccactaccctagctaggttcaatcaaatattatggcactggccaggagcagaaaattgtcaccaggccgtacttgactccacttctaccacttgggcatggtgccaagcaggcatgatggcaattgaccatagcagaagaatgcacagaactgtacttggctccaccacttatggaaaactataaagattttttaaatgctcaatcaagaagagcctaggaactttttataactgagttgacatctctgcactagacagcacccctacatgatgaagtggtggtggcactgcattctgttcctttattctctttagtgatttgttgtcatggcattccaaagaagagaataaacagatgtaattgtaaatcaactggtatcacagtttgagcaaagattccggcagcaactaaactcaaagcttctcttttccttaacagaaaaaggggcagctaaatgagggttgcctaaacaaataaaccagcaaagataaacatttgagggttgagaggcttccatgcggcatcttgtctcccagatcatgaaaaagaaatattagaaaacaggaggataagaatataggcaatttaaataaacgtcaaatcaagcatgccaaatggaattgataatttcaccaaaaaccaaattctaaagaactatattccttttttctcatttagatccagaaaagtcacacttccctattagactttttttttcatctagatttttttttcacgataaggtatgctcaccagaaatcagatactactacacgttttccagaatagctcataaaaaaatgcagagccaatacacaaatttgataaggtgattaagcatcatattctgcagagtgcaaaggcttccacgtcaacaacacagcaattttccaagccaatgaaaaaaatcccctttattttccttttttttctccgcaaaatgatacttcctaacttgccatgaacagctagatatgtcattttaagggaaaaaaaggtaaatgataaggtgcttgaattgtgctctccagaaaactgatggtaacgattttatgtaaaagctcacttttttctattccagaagggtacagagacaatggcacatgacaatttgataacatcattaagcaacaaattctgcaaagtaactgtcatacagaccctacatgtagatagggagaatgtttcccaataataccagatagtttagcactgtagtctttactggcccacttcctggaggtgtgttaacgttttataaagaattaaacatattggtctatcacatattttcttgtggactccacggtgacctgaaatactttgtttgagtcatgaaagaacaattttgcacatacgtagtcatcaaagagagaaaaatgctttatccctagaacatgaaagatgagacatgaagcattgcttgcatagatttgatctgtaaccgttccagaagatatgacatcctttgttggctttcttggaaaaagcagtacaaccctcctgttgccatttcagctgcatccacaccatacccaactaaaagacacacatgcctcacatcctctttttatcctacactcagcagcagcctcctaaccgctataaatagaggcttgtcctctaccaatgcccaataagaagctcactgcgtatcattgagtgcattcgcttgctccattcagtcagagcatttcttgtgcaaaatacaaatacctgtccctccaaccatgtctaggtctgtggagcctctcatagttgggcgggtgattggagaagttctcgactcctttaacccatgtgtgaagatgatagtgacctacaactcaaacaaacttgtattcaatggccatgagatctacccatcagctgttgtatctaaacctagggtagaggttcaagggggtgacttgcggtctttcttcacattggttagcagtcaaatgttccatcattgataaacattctacaaatgctattccttccttgatggccatggtcatcaaatttcaggttatgacggacccagatgtcccaggaccaagtgatccatatctaagggagcaccttcattggtaatattcagcatttcttaccttagtagtggtgtcaaataacatatattgctgaggaagatagaaccatacctttcatataacaaaattgcatgttttttagcatttcaatgagtaatctggctaaatggtatcctttacatttgcaggatcgtgactgatatacctgggacaacagatgcctcctttggtatgttcagctgatttaggcttagtctattccatgttttattgttctttgaattaataaccatgcatctttcaattgcagggcgagaggtcataagctacgagagcccaagaccaaacattggtatccacaggttcatttttgtgctcttcaagcagaagggtaggcaaactgtaactgtgccatcctccagagatcatttcaacactcggcagttcgctgaggaaaatgaccttggcctccctgtagctgctgtctacttcaatgcacagagagaaactgcagctaggagacgctgaaaattccagctcttattgtccacctgatgataaataagggccttctgatgttctttctaggaagtcaatgaacttattttacattaaattctcccaagtcctgagccctaccctataataaaccagatgcattttgctgattgtattaattagtactagaatgttttgtaagttggaagaatgagaattatgaatgattcatgcttgtggtaaatttttatgtgtaagataatctgtcactgaaagtcagagaccagggttggtggataccccccacagggaataaagttcatcttctgtttgcagctttggactatatgcactttttctaacaggcaaaatctcctggaacgaaaactgttggatcttgttgtctcaaattgtagaactattaagacaccctaactgcatttcactgctatattattaagagatgcatggatagaaaaacggagatatccaatttacccagaagattgcccactggacacatgaaaagt

SEQ ID NO: 3469 - DNA, 4052 bp, Sorghum bicolor
aagttagcatgcaatgcaagtatattgctacagagattagagtatgcaaattataggacatgcatgtacttggagatggttctgctatttctggaaacaagagcactaacctttgcctaatgaagagctcataattgaggatctccttttccctcaaaaggagtgttatgagcagagcactttgacacagggccactttgtggagtagtggagggaggcctagcccacttgagagtttagtttatgccctcctcttgcacccgcctgacaggaataatcaccaggagtggcaagttcgcgcaagtgcaatgctgtttagggcatgttcttttgcagcccatagctcagcagactggtgattcagcgtgcctcgcttttttacctcaagagaaaaagatgctcgtgggtgcagttgtgctgcagctttgagaatacccaagctcactctccagctgcaaaaagcaaaaataaaatatgggtttcaacgcaaaataaaatacatgtaaataaagggataatcaatggagagaattcacattaacgttgtatgattctttataaaaggatgggcaaagaatacaaccgaaagaactagcataatcaagctgccatctttgacaccattcctacactaactaccacacattatgtctctaagattttctgaagaaaataaaataaaatgcacgtttagtgaagattctttggtacactactaagaatgtcttcaattaactccacaatgcaagtttaaatacataaaaattcatacttattatcatttttgtaaacataaagtgtaatgtgatttgctgtttggtgcaatgtcatgggcagccaataggctgccaaggccgacgggctgatagttcggcccagttatctttataagtttaattatctttgtatttgcaatttatattagccccagataggttatttagcaaaagaggtgaagtagaagggacataaatatctgtagactctattgatataatcaagcaatgaattatgaagaaacaattctagtctccttcaatacccatccctataacatgcaaggtacacacatagacatagctaaatctccaaactggtttcacacatcattagtagggatgaaaacggtacggatatttttcgaccatattcgagaccaaattcgtttatagaggtttagatctgtccgtatccgagtccgaatatttaacatccgataccgtattcgtatccgaatatttaaatcgtatatttatgatgtcgatatccaatcatatcttatccgacatgattaacattatccgtattcgaatccgaatccgaccagaaatataaaaacaaatatgatatcggtgatatccgtttgtatccgatccgttttcatccctactcattagagaagtatagcatgtatatgggcataggtctcatatatatatatatatatatatatatatatatttcatagtgctcgcttgatctctaaaggatgtgatcagttgatctgtgttcaccagagaaactataataatatggatgtaacaaagagccttttcctattttgccaaatgtggattctaggcacttaattatttcggcctgaacgcccataaatcttctgaagagaataaatatctttgagatagatgtgaaaattggaatatattggataataaggaacttgtgtgccgcatgcaagtgcccctattctataatccagggtccacatcacacctggatgaaaatgactgggactatatagcaatcttaacataacatgttaatctatgataatagccaccgtacaagacgatagagacgctccaacctgaactttttaggaacttctgtttgaaaggtgtaatatatgatgatgatccatcccactcagctcggaatatatagctggccaaacagatagataaggctcgtgtcttgacgtctataaatagaggccaatgccctggcctcttggcaacacacacaaacacatataggaaactgaagctcctgcacatcaccatttaggaagcacaaaacaccaactgctggatcatcgtaggtcattaggttcagctgagatttgcttcaactgtactgttagacatgtcaagggtgttggagcctctcattgtggggaaagtgattggtgaggtgctggaccatttcaaccccacggtgaagatggtggtcacctacaactccaacaagcaggtcttcaacggacatgagttcttcccttccgcagtcaccgccaagccgcgtgttgaggtccaagggggtgacctcaggtccttcttcacattggtgatgactgaccctgatgttccaggacctagtgatccctacctgagggagcaccttcactggtaatttaatcaatgcaagatagtctatcttcaatcctaaataaagtgatcatagagaagaccaaataagagggtatcacctagctactatagtgtatagcttgactctcggccatgattagctagcgctcacttagattccggcatgcatatatatattttacaaagccgagttaggagtggcatgatggtcttagaaatgctcatattattatctcgaggcatttgtagaattaatatatatatgtagctaatcaggtgtgtttttttgttggaccacacactggcactggcaggattgttactgatattcctgggactactgatgcttcttttggtaagtctttttcttgtacatgttgctttagttcttgctagttttgaggtgaggagagtacagagccacagaagggtgaaaaatgggtaaaaaggtttatggtcatatatggtgtagtggtgtacaaatcaatcaccggttctttgtcttctccttcccctcgccactcctttttctcctccatctaatgcttgccatgcatatatacatgcagggagagaggtggtgagctacgagaccccaaagccaaacattggcatccacaggttcatctttgtgctgttccggcagaagcgccggcaggcggtgaacccgccgtcgtccaaggaccgcttcagcacccgccagttcgctgaggacaacgacctcggcctccccgtcgccgccgtctacttcaacgcacagcgcgagaccgccgcccgccggcgctaaccgtacggctgaacgtacgaaacaagaccaaccaacgaccctaagtacctgatcatcttgcaattagctgcgcaagccccctttttttttcctcttaagtcttaatgtatgtttgttcaaataaaaaggtagctaatcagctgcttgcctgtgaccccatgagctagcagctacaacctactactagtacttgctgcacattctagatgatttgtgaaggtgacaatatgattggtagtagggttgcaatgttgactgggcatagtgtgacaacttaagcaaaatataatggccatggaggactacgtgtcgagtggtgaaggggaagggagagcaacggccatgactcttgtattacattgcctactattctgtcatatatgctggagagtgctttgtttgtttgatcctctcactacacagcttgctgcttatttttgtaatgccatcatttgctcttccatttctctttatattatcccaaattcccacttttcaatgacaagacgtccatacatatatacatatatgtttatatatataccttgggtgtgatgttgctctcaccggccatatcgctagctgtgtaatatatgaagctgaaaacaagaatgcagcatctattcgaggcctcctttttgacgtcgtttcagtcgttttataatacacgatcttgcaatgctggtttcttaattgcatctgtgcatatatgccagatgggccgtctagccactaggatcacaagtgcaattatctgaataagtttatgaacaaatattcctttgaagaaagatattaattacctcattcgaagccatcagtctagtactcaatgtcatgtcaactagccttttcagctgttctcttgaacaatagcgataacctctttaatacctgatgacctttctcatttg

SEQ ID NO: 3470 - DNA, 3334 bp, Sorghum bicolor; identical to SEQ ID NO: 3468

SEQ ID NO: 3471 - DNA, 6479 bp, Sorghum bicolor
atgtatcacaacaaacggacctacccaaatcagttccttttcggcatggtccaagcctccaaaacccgaactgctgcatccgtcgggtacacatgaccaggtcatcctcgctaccatattaaggtgccccaactttttcgagctcgtgtaatggcgatgaaatatttggatcctacactaaactttagtagatgtttttaagctccgaatagatggtctatagtacagtctatagtctagtcaaccttaaaaaagaacattagttcatatgaccacacaagtaagctaaaataatctaaaatgaaccttaaaaaaggacattagttcatatgaccacacaagtaagctaaaataatttaaaatttagtcagtcaagtaaaatttagactatgatccaaacagatctttagttgtttaagaagaaaaaacaaattggcctttagttaactaagttggagtatttactagctccggttttatcaccgtagcacaattagggcctgtttagattgggaacgaaaatttttttggtgtcacatcggatatgtcggaaggatgtcgtgaggagtttttagaaattaataaaaaaacaaattacatagctcgtcaggaaactgcaagacaaatttattaagcataattaatctgtcattagcatatgtgggttactgtagcacttaaggctaatcatagagtaactaggcttaaaagattcgtctcgcgattattaactaaactgtgtaattagtttattttttatctacatttaatgttccatgtatgtgtctaaagattcgatgggatggatgaaaaaattttgtgtggcgaactaaacagggccttatatgatgcaaacagcatagatagatagcctttttctcattaattttagttattcttacttcattttttttgcaaatcaatttgtttcacggacttgttgatgcagtttaaattgttgtatcaccataaaatgtaatggtgtatgctatttaattagttctgactaatctcatgattgtattagaaatggactctccgttataatctaagttctagattatcataaaatcaaacggtgcatgttcctttatatttttttaattaacaatctcaacattattaggcatggtctaagccatgagatcatcataaatccatctctctttatttggattaatgtcatagttatatttggcagaaactatttagtttgatctaagcggttatatcatcataataaagtttttttaggtcctctttagctagcgtggtggcttttattaggtgtactccgtagactatttggttcaatctaaattgaaccggtctatgttcttttattattttttgattactctcttaatttcaaggcatcttggcgaaggtgatcatttgttttagcggcaaacactaagataacagtagatccgtttatcttaccctgattagaggtcaaggcaagtgaaacagaaacagtcaatgcaagtagttgggctttgcttgtgtcacaatccgcccaacaaatccgcctaaacttcagctgtgtttgcagtttgcactcatcaagctggaggaggcaccatctcgtttgttctcccgtacccactctgccgtgccgtgtggagtccccaccactcaagctcgggacggcctactccaccaaaagccaagggccccaaaaaggccaagcacaaaaagcgagagggcaaagcaagcttcacctccagcagcaggtggtgagctgcttctcctcgccccaagctcctctcctcccagtcccagatcccgcgcacccagcgccagatcagagatcagggcgcgccggcggtctccattgcccgcggatcctgcgatgcgagctgggccgagagggaggagcgagggagcgcgcgggtagctagtgaaggcggggcggccgggcgggggaaggaaggaaggagcagcgccggccggagcccggaggccggagcagacgtccgtccccccacccccggcggatgaggccgacgatgaaggcgcagcacggcaacgggcgcgggagcaggagccccttcctgacgtcctacgcgctcacgctcgccttcatcaccttcgtctccgtgctctacttcaaggacttctcctccacgctgcaccgccccttcctcaaccgcccgccgccgcacccgcacccgtacccgcaccgccgcccgtcgctccgcccccgccaccccgcctcctcggactcagacgcagtaagccaggccgggcgccgcgcggcggcagagcagctgccgttcgcggtgggcgcggcgccggcgggttgcgacgtcgcgcaaggggagtgggtgtacgacgaggcggcgcggccgtggtaccaggaggaggagtgcccctacatccagccgcagctcacgtgccaggcccacggccgccccgaccgggcgtaccagcactggcggtggcagccgcgcgggtgctcgctgcccaggtacgttttgccccctccccttcccctcgccgtgattccgggtgaacaagtggcggtaattctgatccggcagtgctgaattagttttaggcacttgatcgagaccggatcgagcgcgctcgtttcaaatttcttccctttgattgatgatgatgatgatatgtagttcttcctaaaaaggatcgccgttattttaatctaatctaaaaaaagaatgggaaaaaagagtcgacgatgacatgggatcgagacgcgtgcgaacggagccgacggaaaacggcgaggtttcgagtctcgccttgtcgcttgttggcacacgcttcgttttggacgatccaagcgcgcgcggccggtagcgagcgcgcggcacgcgggccgcggcgcaggcgccacgcgccaggcggcggacgcgcgagtcgccgggtgagcaggtagccagcctttaaacgccatgtatgcggacatgggcggtggggcgcgggcgcggcagggccatacggcgggaggggcgggacacggggtccatgcggcgccgcgtgcggctccggctgccgctggacgggcagacggcaacgtcggcaatgagatgccactatgccagctagatgcaaattgaatgttgatgtgggcagttcggcagttcgggaggtccggcctcagctccggcggtgcaccaccgccatgggaggcgcgagatgtcatgtgccgtcggcacggtccactcgatgatatgcagcctcgcatggtggctccagttgttgctgccctggcccggtacgggtttcttggttattgattgatgactcctagtcctggccctgcgacctgcgtgctgccgggcgagcaagggtgcaggctgtcacgtgggagcacgaggttcgagcaagcaggccacagagggaccggctggacagccggccgattagccgaacggtgtggtccgtctggcacggtggggacgtgcccgtgcgtacaggcgtacagccgagtcgtggctgcctccaattgcacgggcttggttacacgcttctttcccgtggacccggtctaaagattgtgcgacagtaccggtgcccgttttggtgcttcctgtgcggtttggtgctttgtttctatccaacctcattttctcagctttcaaaactcttattatgttattgattgatctgacccttgaggatcctggggttggtacagacgtatagtatgtgccaagttccatggaatttagtgtattttatggagacattttgttcataatagtcagcataattgatactcctacatatctagtattacataagtctacttggattgcaatactaggactaaaatctattacatttgtaggcgatgcatgttgtttactaaggtatttttaactgagatatctatacttgtaagtactaacagaggtatttttagatgtgaagatataggtcgcattaattgaaaaaaacaacatttggctacattagatgcagatagaggtcactgttgccagtgattagtgaatgggattcaggagtaaatatttgtagaacaatttaaggcattcttttgtcatagcaaatgtcttatatcactgctgcaatggggtacaatctgtttccaactgtcttatgcagtttttgtagtagttagcactcatctttgtgatgcacagtatcttaatggaaatgtcttttgttgcagcttcaatgcaactctaatgctagagatgttgcggggtaaacgaatgctgtttgttggagattctctgaaccgcgggcaatatgtatcattggtttgcctcctgcatcggatcatccctgagagctccaagtcaatggagacatttgattcccttacagttttcaaagcaaaggtattccctttgtatctttcaatgtaacgaatgaaaagcttagaaacagagtgaagcattggcgcatttctctaaatgtggtgcatcatttttctttgttcatgggaccaactgtgatcaccaaagatatctttgctaaactttctacccaggcatttttatattcttcccccctttttgtacagtaactttttattcttgatatgcatcaatgcatgtattcagtagtatcttcccttgggccttagaaaaagacccctagaggctagagctgttaagagggatacaaaaaactctggttcataaatgttatatatatatatatatatatatatatactggtaaaagaaaaaaaattatttgatccacacctttgcctttatctgttcttctgtagcttttggggtacatccttctttagtttcatccatgctgaaaaacttaatgtttgatgtttgctaggactataatgccaccattgagttttactgggctccctttctggctgagtcaaattctgatgatgctgttgtgcaccgtattgcggatcgaattgtaaggggaacatccattgagaaacatgccaaattttggaaggggtctgacatcttagtattcaatacctacctttggtggatgaccggacaaaagatgaaaattttgtaagtgtcttcctttaccatgtcaagttctttcaccgtctgcttcaagctgaaaatttcctcgtagctgaaaaaataggccgtggaattgatagtccgatgaaatcatgtctattttctgtagttggcatgaagtcccatatttcttatccttaaaacaccttttgcttttaggcaaaactcttttgaagataaaaacaaggacatcatagaaatggaaacagaggaagcctatggaatggtactgaatgctgtgctgaaatgggttgagagcaacatgaatcccaaaacttcaagagtattttttgtcactatgtcacccactcatacaaggtaagcatgccagcctgaatgcagtaacctctgtctatgttctagtttcaaacgaactgcacatatatatggcatggctacaattaatacaggtttattcttttgttaacaggagcaaagattggggtgatgatactgatgggaactgctacaaccagacaactcctatcaaggatttttcttactggggaccaggcaccagcaagggcctgatgcgagtcattggggaagtgttcggcgtgtccaagaccaagatccccgtgggggttgtgaacatcacccagctctctgaatacaggaaggacgcgcatactcagatttacaagaagcagtggaacccgctaaccccggagcagatcgcgaaccctaagagctatgcggactgcacgcattggtgcctcccagggctccaggacacatggaacgagctgctctactcaaagctctttttcccctgagctaaggttgattggagggttcgataacgccttgtctcatattcccttttgatggagtgcaagttgcacggtgaagttgggactgggagcatagcatagcatagcatttgggaggctggtacgctggagaattgttagcttgacacatcatataggtccgacattttgaagaaggcacacggtacacgggagatggaagctctgctgtagtagttgatttgatatatatgaggccggctgtctatactttgttggcaaagcttccacgtggcatggtattgttgatgtacgattcatttattgaacttgaacatgaggcttggaattgcaccaggtgatcttttgtgcctgatgtcgtgcgagttattttcccagaacgaactctgtttcatgatgatgatgtagtatataccgtaattctctgattcctttttctctgtaactctctgaatccttttctctgtgtttcctccctgtgctgtgcttacgccttacgctagcatcagatttgtctgataggctgaatgtttggagagctggccagcccaaagtgatgggccttgcggagtgggctggaacacaaaacaatgggtgttgcttttctgctgccgtcatgcattgggcaagccctagcatggtcaaccgtccttttctggctacctaacatagttttttcttacaacaaa

SEQ ID NO: 3472 - DNA, 3541 bp, Sorghum bicolor
ggtcaatggccaaattttggtcgggctacgataatatggtggagtgttgctaaaaaaagggtgtagtttatataaaaaaaaatgatctatggtggatggaagatcatctacggtctgaccgaactggccaatctagaaatgatctaatatggtggagtcttgctaaaaaaaggtggagtttatatatataaaaagatgatctatggtggatggaagatcatcgagtgttgccgatagatccaaaccgtgtgctcgtgctcgatatcatcgtcatcaccaaataaaacaggagaataatgtatcatcaagtaataataaatcagtggttattaaacacgatccatggttaacaagggccttgtttagtttcaaaatttttggcaaaataagtactataatatttttatttgtatttgacaaatattgtctaattatggactacctaggctcaaaaaattcgtctcataaattacagataaactatataattagttattatttttatttatatttaatactcaatatatgtgccgcaacatttgatatgtcaggtaatatgaaaaaagttttaattttttttttacctaaacaaggcccaagtcgccatccactgcccttggaggctcggaccaaccaccaaccagcgcggcgacgcgtccgccggctcccgtatcctccttccaatccagcccttgagctgcctcggcagtcgcagcacaaattcgcgtctgcatcgtcgtgctcgtgcctgccggcccctctctccttttgctttggcttttgctaccgcatcggcagcgctcttgctcgtcgttgaaatatccacaggggaaaagaaaacaaacattctcctccgcctcggccccaagctgcaaaccccctctgcgaagtctcccaccgccgcgcgccgatccggaccggaggcctcctgctctctacccacctcgcggcctcgccccgtggatctgcgcggcggccggcgggcgcgatggcggagccggagcgggagcagcagcgcccgctgctggaggtttgtgcctttcttttcatccaaacgtgcgtctccctcactcgctgggcctcccatacctgcgcccctgttcggaccatttcaaagtcgggaggaggagacgagcgccgattgggtcaacggataggagccccctacttccggtgctcttgatagatttgacagtcttggatagcagtgccgtctagtgtgtctgttcagttccctgatgtggttacccttgttttcttgcttcatgtgtacctatggaactaaccagatagtgccggttgattggcctggatgcttgtccataggaaaagcagtctgtgacagctttactctattgattaggatggattttgcaatagggattaaccacaaggtccttttatggacaccttactccaattaagactttatgcttagacataatggatatgtatatgtatggcaagagataattaatcagttacttgtgaattgcaacggtagcagaattagaaaaaaaatgcagatatgctgtttgtcataagcgaaacttgcaaatattatgttagatttagtattgagtgaagtaactgtagatatgggttggaagttatacttaggtttactttggcattgagtcctgtgggaaggatggttgagaaacaccatccatgtataaatccgatgcttttgctcatctgcaagtatggtattccttattggtgcataactgtagtatcacctgaagcattgtgttaatttccaccctccttttgttcaggtagagcaatccgtcacatccataccggaagatcatgaagccacatgttggggctgtgggctccggcttgtttttgcgagttattcacctatctataagtgtggctggtgtggagccattacgcaaattaaccagaccacaaggaaacctgatagtatatggttttcccactggaggcgcctacgggacagattctttgtgactgtgctcatcctcttcatgctctttgttatatgtatgttccccatctcttgctaccagcataatttataacttgtcacagttactcgtttatttcatgtagttctgctattgatatttatcaattttatttcttagtcagttgtttatttagcctgtaattttgtttaacacaggtggtggggtctgggcggtatatcctattgttttctcaatcagcaacttttgtggtatctttcactgcatggtaacagctgtgttggctgtatttaccatcacaagctattgcttggcctcttttaaatctgcaggcgcaccaataagcatacggtggggcagctatcccatggttgggaaaagtgatcttgacaactataccttttgtgcatactgtaataaaccaaagccccccagagcacatcactgccgatcttgtaaaatgtgtgtggtggacatggatcatcattgcccatttgtaagtatgatatctgcattctgctgcgttagtattttttgttgattgttagttggcttgtttattcattccccccttctgttcaagtgcagattggcaactgtgtgggagcatcaaaccatcaagtgtttgtcatttttcttatatctgtggttattagttgttcttatgctgctgggatgaccatatatgcgagttataagatatggccctctgttgattttccaaacctagcatcaaaccgtcactcaatgagtttttggaaaatattgttggagattattactacagttgcaggctctgccttcttcttgtcagcaaggggtctaattctggtatatctagcattcgctagtttatcagtcaatgctggtataggtgtattactgtgccagcagcttagttatatctatgaaggaaacacatatctcaaccatataagttcaccaaatcccttgcatggagagaggggttttcagaacattgttagattttttgggtgcccttatccaattgccagagttctgttgcgatactcaaacactggcaagttgcaggataattcagggtcaaaacttctttagaggtaataatgacgtgtagatcagtaaagtccatttttcatgttccttcttagtcgtgacctaataaataggttcatttacatgtaggtttcagtgatacacttttactgtcccagcaattcagacatgtatggaattagttgttccaattcaagatggtttctgttacccagaaccgtgatttgtgaacctcagttgaccaccaacagattagtttgaataactgaagccgttcagggacaaaatactcatgattatccatgttctagaggaagagcattagttgttcatggggatgtcactcacactgattaagtagaacaatttcggcagatgctgaaataccatgtggcctgcgcattcattgcctgcagacaatcataaggtgctgatggtcttgcaataaattgcagtatctgaaatctgcatcatcatcactgcctttttcaacagagtcgaagatcgaagcttcacgctgcagaagtggtcattatgattaa

SEQ ID NO: 3473 - DNA, 4137 bp, Sorghum bicolor
tctagccaagcaaaaaactacctgatctgcacaccaccgtcaccgtccaaatgaaccctgccaagcattgcgaacagattggagcaagctcttttcttgcatcaacagagttgttggtccatgcacccattggattggtaacaaaaggctagccttcacctaatcacacggcgacagtcgggtttaccatgcattattacacctcctcgtgacgtgtcgtacgacctttcccaacgcgttctagagtccagacctctcatttagtagtacaagacaacaaattccacctactcccacttatagaaactagctggaacagtaatgacagaacaagctgaaaggactctgtggacaaccactgcagcctcctcagccctgtggacaacgagacgaaagaaactgcttgcaccaaccaacgttaatgttctagttggactgcagtggttgtacgcagtacaaacaaactactgtagtagtagtagtagtatgcacaagggtgacagcaaaactttagacatgccaaacggttcagagatggcgacgaccctgatgcagatgatcggcgggaacattcttatcaggatgtgctcatcggaatcgatccactgaatggagagaaatgcagtagcagcagctttccaatgcatgatgatgagtggaatgttctctttttttttttactaaataactagaaaaaacggctatttctgaatcctatgcaccggaaatgcagtgaatgatcaggtgtggataatacaattcagtgcaacttcacttgccggttgctgtccctttcaacatggggaatcactactgtaccactaagcactgcgcttagaagctgcacaacgtttcctagcaagcatcggagtagcatatctacgttaagcctggcacgtagatcaatacagtggacacagggggggggggggggggggcccaaaatggcccccattcccaaagtaaagccgtggtgtttctagtgtaccagaaagtgcagaagattacaagcccggccatcactcatctcagcaggacaggacaggaatcccagcggccagcgttgttaatttgcgcgggaataatgcagggcaggcagcgtcgcgtcgagctcacgcgtctgtgtacgcccactgatctggtgggtgaatgaatgtgaaacgagaacatcttcgttcgagaaattctgcagagacaacagacaagaatcaaatttcctcacatggaaaagacgcataatgcactgcatataaggaaatttgtcattcgtgtcggcaaaaggaaattctacaggttaggaccggtccggtgactcagcatgcatggtctctggttctctgaaaacaaggaaagaaacttctgaattttcagtgcaaaacttctgaatttcttcagtcgagaccgattgacaaatgacaagcaacagtaatctcctctcctagatactgaaactagaattcagtaacccttcacaagttcacatttggttggagtatccaccatcgagtacacagctaataatgcagaaagacgttggggggtaatgacaccatgcatcatgaattgtgtgctccaccactaatcattcacactagaggcatgagcctccatctcactggaccaaatctgctgccagtacactcatacccagatatcaaacggctatataccattatcaaaacctgccaaagtttgttttcttcaccaccagatcatacttacggtaggtaaacaactcacgagggggggaaccaacgcagagaaccaactgggcccactcttcagtgagaaagggaagccaggcaggcatttactactggttgccaaattacagcatcaggagatgagcgaagcggagcaacagtacaccgggtgagtcatctcctggtcatccagcgagacgttggggtggtggaccttccgggggtggccggtgtgggtgccgctcgctagccttttgttgtcctataaaacgcggcggccgggcagcgcctctcctcgcaccaccgtcactcacacagcaccggtaccggagagagaggagaggagaggagaggagaggatgtcgtggttcgggcaccaccaccacaaccagccggctcccccggcgtcggggccgaaccaggtgttcaagatcttctgccgcgccaacgagaactactgcctggccgtccgcgacggcgccgtggtgctggccccgaccaaccccaaggacgagcaccagcactggtacaaggacatgcgcttcagcacccgggtcaaggacgaggaagggatgccggcgttcgcgctcgtcaacaaggccacggggctcgccatcaagcactccctcggccagtcccacccggtgagtgctctaggctctagatgtgtgctgcgttcgtcaacgatccatggcttgttggctgatgaatcgatccatccattccatggctgtgctgcatgtgcaggtgaagctcgcgcctttcaaccctgaccaggaggacgcgtcggtgctgtggacggagagcaaggacgtgggcaagggcttccgctgcatccgcatggtcaacaacacccgcctcaacttcgacgccttccacggcgacaaggaccacggtggcgtgcacgacggcaccggcgtcgtgctctgggagtggtgcaagggcgagaaccagagctggaagatcctgccgtggggacccgaggcgaacgccgcggcgggggccaacggcggcgtgcacaccgtgcgcgtcttctgcaaggccggcggcgaggactactgcctgacggtgcgcaacgggacggcgtgccttgcgcccaccaacccgcgggacgagtaccagcactggatcaaggacatgcggcacagcacccgggtgcgggacgaggaagggtacccggccttcgcgctggtgaacaaggtcaccggggaggcgctcaagcactccacggggcagggccaccccgtgaagctggtgccctacaacccggagtaccaggacgagtcggtgctctggaccgagagccgcgacgtcggcaacggattccgctgcgtccgcatggtcaacaacatctacctcaacttcgacgccttccatggcgacaaggcacacggcggcgtccacgacggcaccgagatcgtgctctggaagtggtgcgagggcgacaaccagcgctggaagatcctcccatggtgtaagtgtacatgtcttcctcttccacagttccacctagtactctgtacaaccaccattgatggcctgcccttacatcctttgaaattgttgttgttgcttgcgtttgcagagaccaaggatcttccaaaggagctactagctgctactcctacctaataataattctgctggctgcggcgatccccaaataaaagagaccgggtgcgatagcgatgcatcgcggacttccgagtggagtggtgttttcgtcagactgtcagtcactgtatctgtatggctagtgttccaacatttgtcagcccgttttcgagcaaggggagtgacagagtcaggagaagggccgggccataagctgctgcatgtcttatgtctgtactctgaatgaactctgtatgagatgagatctcatctcctttctcctaccgaatgaatgaaccatttggctttgctttgcttcacctgcattccgttttactgttgtgtgatctggacaaaactgctccagggaggcccagatacccactctctcttttaccccccaatccggcctgctggcaccaggatagcaccaagagagatgttcaccattagtacaaagaaaaacggtcaagtcttgtgctgtttacaattcttgaaattagtcgatttagatttcacaagttttagattaccccccaaaaaaaagacatggactacaaagatatgctactccgtttttctggcatggtatattagtgtatagtctagtctttcgttcttttcgtttctgggtatatttcattgagcaagaaaaattaagtagcgttggtactcaggcctagtttacttgacttttgaagttgtctagcttccatgtgccgccatcagaagtctaaaggacaatgacaagcacatatgggccatatgattcaggaggttcaaccaccaagatttaactatgtaatataataaatattga

SEQ ID NO: 3474 - DNA, 5958 bp, Sorghum bicolor
tttttatttttaagtatctcttttaccaaaccgttggaggagattttatctctttttctaaaagatcaagataggaagttgttttatcaaacttctagagatgctcttataatttgcgaactcttgtttgggtaggttcctatccaccagggttcaagtcattgatttgatgaaactcgtacttttttgtatttatttcatgatttaaaaaatacactatattttagaaaatgagtgattaataatgcacacttcccaaaaaaagtacactataatttagaaaagaagtaattattaatacacaccacaccctaactatttggatgactatgttgtcccgtgcttccttgacttggaccagtttaattgtgtggttaaactgaactcagaaaaaaaaaggtacagaaaataaataaaacatctgattgaataactctggtgaatgggaggatcggaaatgctagatgacttgaccgatttcgaaggtagcaaaatggccggtcgtgatatgctacatgtaccgtacgtaatatgaactatagtccctatctaggaaaatgaggcgtttttgttggcgtctgctatgtctatgtgtgcggaaggaagaaaactatgaccaaccgttcaagggaaatcccgcccgaatctatctgaaaatttcccgatgatggagagcctggctctagatgccggaccatatttcaaagatgcatttggtgatggcgaggcacggactatggcggtactacaagactttaaatctagtcagaatcttttgttttgctctcacagctattaagatatatagaatgttagaagtatatgatgtgtttgattctcgtaatatatctggcttggctggccagctaagccaggacaattcaaacctatagctcccacaatacaggagacagtttgtctgagcctaatttctctagatcatgtttggttgcatggttaattggaatatagtcacctcgtccttgagaaggtaaactcattcactggtgcacccatggcgaggaaggttgattggttggtagggaagcaagcccaatccgtctggtgaaggtcgattctgttatagtggaaaccgattcgacgatggtggtggcggtggaagacaattcggcactaccggcggaagctaaatcgatggaggcggtgaggaaggccgattctggtgtggtggagcctgatttgtcgacggtggtggctgtggaagccgattcggtgtcaaggatcagcggtgtcaaggacagaaaggctcaacggtgaagataggccgccagagatgcagagaccatagtcgaagatgagaaccgccatcaaagatgcggggagcaccgccggaggcatcgcggctcagcgcaagagggaggtgatgggattcttgtggaaaggcattgacagcttgtaagtgcattcgcctccgatgtaggttttgataattgatgacaatcaaattaggaactaacatgtctatcaagtgtaatctataggtgttagttcattgatggaatcaaacaaacacatttagcttaaaaattaaaacaatctataattagaaaaaaaattacgattaaaaagatgatgtaatttgattatttttatattaaatgagaaaagccaaagaataagcaatatcactacaagtcatatatcagataatatcaaaatttgcatctgcaaataagtatataataaaaatatattttatgtttaatttaatgatatatattactcataaaaattaatatatttttatatttatttagttaaatttaaaaaaaaattaacttctcgaaaccaaaccgcacaaggcgacaaagacccggtcacacctgagcccagagagagccgcgtggccacctgcgagtgggccctcgcccatctagagatttctaccacactctccactccactccactctcactcactccacctgcactcctacttgagaccggaccgtcaccggcgtccggcggcccgcagcaagcaggagcagcgtccaccggagcaagcgtgcacgcaacagacgacgcgccagccgccaaacggcagcaggtccggacgtccggtcaccttccgcgctctgcgctcgcaccctgacccaccaaccacccatggcgtccgcgccttccgcccccgcctccgccgccgtcaaggccgcggtcgtccccatcccaccggtccacccgccatcctccgtggcagtactggcgcggcgcgcgccgacgccggtgccggccgccctgcgcgccctgggcctgggcggcaacgcgcggcatggcgcggcgctggtggcgtccgccgcgctggatgacctgcgcccggccatcgacgagtaccccgagggcatcctgtccggggagtggcccggcaacttctccctcctcagctacgccgacctccgcgcctacctcgagtcccggatcgtcacctccgaccaggtacccgccgactcctctcccttttttctgtctctcttgatctggggacgattcggtatggattggttgttcttggctggcagatgagcccggcggcaaagctcggggacgtgatgtcgcgccccgtgcaggtggccacgccggggcagcgcctcgcggaggtcgatgccatcttcgccgcggagcagttctcgggcctgcctgtggtcgacgaggacggcaggtgcgttggggtgatctccaagaaggacaaggccaaggcgcccaatggggtcggttcactgactgttcctcgttgcctgtcacttctttttatgcctgttaattgcttaattgggatgttcctacacatatagaattatcaaatcatgaaaaacggggatggagaacctaattggaggaccacaatgttttattttttaaaaaaacccaggaaactgtgtggccagcatttagcagaaatactgtggatcaattttgtaaaagcatatcatcaattggctctctgcagtttagtttggccacattttcatctcgtttggtgtcattcccttgctcgatcgttcatcgtactcttagttgtactcgctccattttaaaattgaagtcgctcagacctttttttttcaagatacatagcttctactatgtatctagacataataatgtatatctactatgtatctagacataatactccctccgtctacgaaagagtcaatttctagagttgtcctaagtcaaactttttaaactttgaccaaatttttagaaaaaaatgctaagatttatagtatcaaattagtattattagattcatcatagaatatattttcatataatgtgcattttatattatagatgttgttactcttttctataaagttagtcaaactttaaaaagtttgactggcacggatcctaggaattgattctttcgtggacggagggagtaatgtatatctaagtgtgtaacaaacttatatatccaagaaatgccagaacgacttacaatttaggatggagcgagtagtatgtaatgtaagcataacagctgaaatacagcactactgttaggttctgaactcctgatttaatttccactcagtttgttatataaaacactactgagttatctgttatctcaactaacttggatgctagagctactgtgctacctgttgagagcatctgggctggaccagaaacatgaatatggaaccacaaagtaatccttggggatatgatcaaagtcaagatcaagggttgtcttgtacataaactctcttcctctatcttaattgaaagtcagacctcctgccattgcgttcaaaaaaaagatcaagggttgtagcatgtctgatgcttgctgtgtcagacatgctaaagtgagcaacatacagaaaagataaacaagtgatccaatcctaaaaattagagcttagtgaaaatttctggtccctaatagaattaactcaaacgggtagattgttcctccaacatgcgattttgcaatgattcggtcagtggttttaatgatatattttacaaattagcttacctgcttcaaaagttgctcagtcctgaaacatttaaagtattttctgaaaagcataaatataaatttagatgttagcctgtttgcagtcagatgctcagaatccaattgaattttctcttatcagaaatttctttttgttagtttgtttgatgcattttagagatgagagttcctcccatttggaataaatatttttttgtggggtttagcgcactcagttctttgactggtatctttaattctgttacatttataaacagctcagccccaggccttgtatgggcctagtagttgagaaacatttcctagtgggataaataaatatttttctttaatgaaatctgtgctcagagcatgttaataaataaagatgcagccatttctgatatcttcagtttgcaagctattgactaatttttcaaccttgttgtcaagatgcagatggagtcaactgtagttgaagtcatgtcatctcctgcgataaccctgacgcccgagaagacagtcttgggtaacctttactcccgtctaccctaacaacacttgaagtggttacaacaacttgctaacaggttgctgctggatatgtgagcagaggctgcagcactaatgcttaaggagaaggttcacaggataccggttgtgaatgaacagcaacaagtgatcggtaaggttttccagatcacttactgtttttttggactaggagtacatcaataatcgagcaactaaacttttcagcagtgcagttttactagctgccctggagaatattgttttgctttgttaagagctctgttttggttttggacttggtaaactttttaaaacatgcccttgacaagttaactgcaaactgtgagtctgtgacaataaggtttcactaaagcaatcacgatgcaatacaatgctaatggtctagctaactttaggtggaagctaaacgtagttgatctggattcaggaacctgttactgttatccagattttttttttttgattaactgaaaatacctagttgaaattaccacatgaggatacatttgcggtacataaactaagtgctagtttcttactctgattctacaagtgatgcccacgtgataacctttttaccttttcatgatggtaacaggaattgtgactcgctcggacgtattccaggcacttgaggccaacaacaacaaagcatgagagtgaggtcccctcccctgttaggcttgttctcgccagatgttgcccgttgtaaatatcagttgaactagtcggtaccccgtgttgccctaggtgcaagcgagaataacggtgggcatgtctactctgctgtgtgtatcatagtttgtgtgagtgtctgtaattcaaaaaaaaaaaactaaagttgcatgtcatcccatatatatggcactttctctgtcctacaaataattatatttctttgacttctatcactcatgtttgatcgttcatcttatttaaaaatttattttatcatgacttattttattgttagatatattcttataataatttatttattttattatttgtataaaaaaattaaataagacaaatggtcaaacattaatcgtagcagtcaaagaaatgtatttacttgtgggatgaagggagtagataataaggaaaaaatatagagacatgtaagatgatttttttttttggatgggctcgcgatccctgttgggactgggctggaaaactaatcaggcagggcgcaggcctcatgagcattgccgctgatccatcacagccaagcctggccgtgagtgccaacttcgtctagcagcccaattgaggcctaagcccaacaaatggttgatgcccatccggaagccggccctagccaagaactgcatctcgcatcccgcctccttccccagctccggccagccagtggatcggtctccgccggaacggccgaccaac

SEQ ID NO: 3475 - DNA, 6419 bp, Sorghum bicolor
gaagcagaaacttggtagtttttcatactgtaccaaatacttcattttttcttttagtgtaatcggcaccacacgcactagaggctttttcagatcaagccacaccctgacccgcaagtatggtgtaggattgatcttcccttcattcaccaccacgacaatcggatctccaactttctttgcaaccctatctgccaactccttcttcttcataagaccctcaggtactccctggatccacgcccaaactaggattttatctaacttataggacagcacattaaagaaaccatcatattcttccttcactatggccgctcctttaaagagccacggactgccatccatcaccctcgaccaatcaccaagacaatggagctgaactagaaacactacctttgcacgatgtgttgttatgtcatatgaacacttcataagtgcatgtatttataatctatatacatttaactgatatatcatatttcataggaatctaatctaaataaaaaaaaagttagcaataatcttcttatgttttaatataatactaaagtatattaagaggtaatattagagtaagataaggtttgactaatttctatttttattattaaataaatatgtctctaagctacatattattgtaaataataactatctaataccatagatgtcatggttatcaataaaataatgaaatttaaattttataaaaagaataaatataaatagatatgtaacattatgtcatcactttctatggccttttaatgtttttctcccgttgcaatgcacgggcatatttgctagtatagataaaaacaaaaactaattgcacagtttgcctgtaaattgcgagacgaatcttttaagtctaattattccatgattggataatgtttgtcaaataaaagcaaaagtattttggggccgatgttatggggccgatgtgtcattgagattgaggaagggggtataatagaggtattttgggccaaacaaaaatacaaatgccgcatgtgagccaagcgttgcggagaacatagaaagtagcatggtctacgtagatattaaatttttaatggtatggttccaaatggaccaatagtaatggtagatacatgtgtagtggaatggtttgaatttaacccatctaagtatctagatttctccacatcatttttttaaaattttgaccatcaatatataaaaatctataaaatttgacaacataagattaatcactataaaaaaacactttcgtaatatacagctcttttcatttgatgagacaatgaggtatactaaccatttcggctaatatactacgtagaatgatataaatttgcttaagcgaataaaccttgttcaccacgccaacctcaccatatgtaccaaagaattttgagacataaatgtcacggttcataaacaatgcatccaaataaaaatcatggctgggatatatatatttggacgatattttcttacaaaatattttattagaatcggaacttttttttattgaacgaaacaatgtcattggtttatgaccttgcggaagagttggtccatattcaagacaaagaaatattttaggttcatgaagaacttgtttcaggttcaaaaaaaagttctatgttagactagaagtgttttaacttcataagaaaattactctaactttactaaaattaattattttagattcacgagaaaaaaatgtttgaaggttcatgacaaaaaattctcgcttaatactaaaataaaaatgttccctgtagtcatttggaatgttctaagaaaaactattatttatagttccacgaaaaagcaagaaagaaaaataagaaaatgtgcagatttttcttttagcagaagaaaatgtggaaagaatggacggcccatgtccagcaggagatctctgccgttatgctctccgccggcccagcagctaccgactgggctattatttctccccgcgtggtaccgactaggctacatccgccgccgccgccgccgccgccagatgcgcaggtcttcgtcgtccccttctccggcaactagctcctaacaggtacgccccttctcttcactttctgctgtgcgaaaccgagcagaacctaagctatttggaatcggacctgatctaattgcaacgtgaattatttacttggtccgtccctggtctgtgcccgctgaactctgttcccattccaaagtcactccacctgcaattttatttttgatctgcgtgatattgtctaactgctttgatggaatgcatcggctgctgtagtggtaattaacaggactgtgaaaggagtaatacatatttttttctcaaagtttacgttcaaataaagatttaatctcaaagcaaatgcactgttgtgatgttcatgtattttttcttaggctgaaaaaaatcattgatacgcataagccgtcaggagtgcagtattatctgtaaaaatggcctggggtcaaggtgctaagaggtccatactagggcttctctttcgtgctcagcagcaaactgctcggccatactcttcttcagcattccagactcatcaattgagcactcatgttccccaagatggcgtgtttcttaggagattcagctctgaggtgtcttcttcagagcaaatgaaccttataaagcaactcagacaaaggacgagtgctccaatcaaagatgtcaaggcctccctagttgcctgcaactgggatattggttagctattctagctccatgccgtgtcatgatttagttggcttattatttgttaagttcacttttcctatttgagtttgttaatttctttcagatgctgcgcagaaggacctaaggaagagaggtgttgctcttgctgcaaaaaagtcttcacgcactgctgctgaaggtttgctagctatcgcacaagatgacaaaagggctgctgtagttgagcttaactgtgaaactgatttcgtggcaagaaatgatgttttccagtacctggttggtttcatttcccagcaacaattttatcttaagtatcagcagctgagctgttttgttgatctcttcttaaacctttcacacataaaatgcaagttacatttggagagacattaacaatttagatgcaatggtttttagattcatttcttcaagatgagtacatagtaattgcatacttacatttgttagtagcatggttttgtggtattggtgtgtgtgtttgtaagggctctttctcttttttcttattataatattaatgatatgcatatctcttgcgtgtttgagaaagaaaaagcaccactaaatcatttgttcatcacttgaaaagtaaatgccgatatctcttttagtggttgtgaagtacaaaggtagctggcacatttacgtgccaagaactatatgcatttttgcaggtgtaggcataccatgtaaacaacaatgttagtcatgcatgtaaaggaaagtttccactcatctgttgatcaagttgcagatatatcaacttcagttctgtagaaattgcatactttgagttatttatatagatctgtggctttattttaaaatatttttctattttgtcaccatgcaggcttcatcattggcaaagatggctttatctgctcagggtcccggtgaattgttcatgccttttggtcctgaacttttagaggtattattgcattatccctatgtgacatattcccagattcatgattttatacacaaatataatgctgctttgtatcatatattgtaactggtttcagtcatttctaagaaagcgtacatttctacaaccttgcagaacatgtctatcaatcttgatcatccgaacctcagcggggaaacaactgtccaaaatgctgttacagaagttgctgccatggttggggagaatgtgaaactcagaagaggcttcatgctgtccacaactgcacatggtgttgtttcatcttatatgcatacctgtccccagccaggtgatggaatctcagttttttttctttttcaagagtgtgtactctttattcttcagattttactgtatcccccctcctgcaccccccccccccccctccacggttggtgggtaaatttgattaatcatattactaagaaatttcctgctgattagggggcatgcttttacctgcttctcaccttttgtaatatcttcaccattctaaaactttttgacaactagaaaccacagtatgtttgtgtgtattcatgctaattctagtaaataatctattttcttaggtttgtcactgatggatttaaattcttttcctcttttatacttttattactggtatgcagttgcaatttctttgattttgatgataatgcagccatggatgtacactcatgataaattagaatttgaacacaactattatcttgaatgttctactaacactacaatcttttaaaaaggaggaaaatgaaatttcgtctgattgggataatgcttgtttgggtaactcctgaagtatgataattgaacatgttagtttggtcctaattgtttgttctactgggctgacttgtgttagtaatttgaaactctcctagtttgcaggctctttttggttgttttgatactttgctaaaaataagggcccctttttctttgttctttttccaacaggaattatgcatttgctgattcattcacttaactcctgagcattcggtttttgcttcaggtatgggtcggattgctggattggtcacactagaagcagaagatagcattactctccttgatgctgtcaaaagtgttgggtcatctattgcgatgcagattgttgcaacaaagccattattcttatcaaaagaactggtttctgcttccgctctagaaaatgagcgtgaaatacttcgaacacaggttgataccacacttcctccagcatgtttggttcataacaggacttatgccatactcaagttaggcatatttgacttttcttaggctgtgttttacttccatgaatgtcatgtcacgctttattagcgctgtgtcacatactcatgcatgtgatacaatcatttcttcatatggtcactttgtttgtgtcaagttgcttcagaaatgagatggcatgacaccatgtaacattgtaggccgaaagttcagggaaatcccaaatggctatggataaaatggtggaaggccgattgaggaagtactttgaagaagttgtgctcatggagcaaaaatatgttttaaatgacaacacaaacgtgaaggtaagtcaatagggttttttacttcttgattatgttgctgctctggattgtttctctgatagctttgggttctggtgtcattcttttcagaccgtgctgaatgacttgtcgaaagaggttggttctaaagtaacaatcggtaacttcatcagaatggaggttggagaagggattgagaggtacaatatatttgtcccatcccatgtcatctctatcgacaagtgggtttttgtttgtgatgtgtaaagtggcagttgatgaccacatgtttcttgcttggcagaactgaagccgctgatggttcagaggttgctgctggggctatgtagatttcaggcagagatggatcaaacgggatcattaggatctactcttctttaaagttagaggccatagtttttttccaataaaaattttgggctcccatctttgctccattggattgttacaggtgtataagctaggacggaactaatgtttaggcaagcaaggtagttagcgttctgggacctgcgaggctgcctagttggtttgtcgattcctagcttgtttgtttacacatttggttcaaccctcactgattgaattacagtttgtttggacgggtaaaatatcgaaatagagtgggaattaccccttgaactatttgcttttagtctggagaatactccgaatcgttaattagaggatgcgaagtgtgacccgtagtggttttttttcccccagttgatgggtgattataggtttgcctgttcgaatagttgtaatttgatgagattttgttggcatctagctggaatcaaagagaggaagggcgttgacaatattgtgtgattggctggtggcggaagatctgatgagtatacctgtccaatttccatgtagacatctggtggtcgacgaggcaccctagatccatgaaaactttagatcactttagttcctgagattagttaattgattgatgaattgatgacagatttatacaactgagtccagctgacagcgaaagaagatgcaatgctaattgataaagtggaacatcatttttttaacagtacttttcaatgaacaaataatatttttattttcacaacaaatcagtataggtagtagtataagccaaatttcactgaagtatata

SEQ ID NO: 3476 - DNA, 10500 bp, Sorghum bicolor
gtctctttggtagggttttcagtttaatttcattattgttggatatagccactctagccagggccagagatgaagctcttaaaagttggcttctttgacttcatcacataagcagtcattttgttgaaaatatgtagcttcatctttagcttaacgctacagcaactaaacaaaaatgctacactgttaaactttaactaccctaactaaacacactcttgtaccgcctgcacctgtagactgcagttgtttttgaaccagacgacaagacaaccagcttttgatccagacaacctgctagtatatgtgcaattcaactgttcaaagcaaccatgtttttgagtactgtgtatagtgttaaaaatctttatgcgactttgacgtagtaggtagtacgcacacatgttttttgattagtctatattcaatactttaaatattattataacattttcttttggcaagctaaacaagcctttggtactatacgcgttgttggcttcttctagaccaccagccgatggctagtcagtgatcaaatgcatgcaacagggacaggatcacagctggcattttgtcgtcggattcatcggatgttcccggcggcggcggtgtgttgttcttggtcttggtccggtcgtcgtcggcgacctgctgtcgaggcgcagggttgatttccggcgagcaatgcaaatggaaaccaattgctaggtcgtcagcacttagcttgtgtttgccggcggcggcaacggcggccgtggtttgttagtcggagcacccaaagcttttgtctttggtatcctcgcagtcgcaggttgaagcagaaattttttatttttattttttctggatcggccatccatcgggtccaaagagctcatgggccaaccaatagtgtccgtcagtgttaaataaagcccatcagtagggctgacggcacccaccctccgtagcccatgggcctagcataatgggggtgtctcggcggcttgtattgtactcccttcaccatccaaaaaaacaacaggacctacaaacttaggccctgtttggttccaccaactaaattttagctagctaaactttagtcactttttagtagctaaagttccaaacacattgactaaaagagactaaaatagtttagttccaagtcacccaagagtagctaaaataattttagctagctaaaatttagttggtggaaccaaacagggccttagttaaatgtttaactaagtcaaacgatcccccccataaaaaaaaagtcaaacgatccccaatcactaaatttactataaaatatatttccataacaaatatatttgaagatacaaaggttggtattgtttctgagagggagaatatataagacataattttgaacatattttcaacagatatataacttttttttcataaaaaaacagatatttaacttttttacagaccagtaaacagatcccccacatcagaaccgtatacaatgtcctaccctgatttacatgcgagttactgcaccgacaagcaatccatcatggagcaaaaccacagctgctcatgttagtgataaaaagtatagttagccggttacttctgactcatcttttgtttgatatctctgctagatgttttactttacaacatatcggccactgataacaagcacactgtttgttacaccttccagcaatacgtgcattttcatcgatgattattgcaagagctagaattgctggtaccagtatcctatgaacaactgtgggttcatcttcaaactattttttgagtctgaatggactgctttcttctggttcatcttcaaagtctgaatggaccacgataggcaggcgagcgcaagagaggtggcgaggggccaatgggattagggatcctgcctacccgattttgggacgtcggattggggatctgacggtagcaagcagctgtttgcccctaacaaaaccccgcccctcctcttcgtccccgccgccggcccttccgattttgtccgctccaagttccccgaccagctcgttcctccgccgtcgccccccccatccgaagcaggaaacacccgtccccgatcgagaagcgagcgacaggcgaaggttcctcggaccaccgactggctaccctctaacggcccgcgcagcagagcagccggacctcccgccgccgccgacatgggcgggggccgcgcccaggtgaacaaggcccacaagagccgcttcgcgtccaaggcctcccgccacgcgcacaagataggtgagtacaggcggtctctctcgtccctgtttcctccccactttcctcgattaatgtctcatctcactgtttgcatctgcttccagacaaggtcaggagcggcaagtcagagaccagccatcgcgccgccgtcaagggtgcccgtgccgcgcgcatccagcagagcaaggcggtcagtcttcaatgccgcaccgtgcacatatgttttctgttcctcttttttgtgtgtgtgtgctgtagtaggggtttttatcagttcatgtatgattattctgaggtgtgctgcaacaggaactgagttcatattagtcttgttgcataggattggtatgtgcttagattaggcagggtgtttttagcttgctttgagcttacatacagttaattgggaggttgcagcctttggggttttttttagcttcctttgagcttacggttattgggaggttgcagcttttggggtttatgaaaggtctttttcttttgagcacagttattcgtttattgcatgcccggtatccaggttggttgaattgctaacctgtttagcttttatatcttgggcttactgtcctttgcctccctagccagaataaaatgtcctcagttattttgaaggaaggatgattgaaaacttaggtcgacttttcaagtttccattaccttttttttccagtaacttactagtgttaaaaggtggaggctcaggtaacttattgtttacaaggtgcgtttgttaaaatgcctcagtttttttgctcacatgtggatgcacaagtgtcctcaaataatgccttgccaatcatgtgccgtatgcaacttatcttgtgatttcctcatccttgtttatagttttcaataacctgctgtgtaaaatgttttcccgtgggtgcagatacgtgataaaaaacgtgctgctttgctgaaggagaaacgttcatcaaatggaccttcaagcgcaccacgtgtcattgttagtattctttgcttctgcacctggatcctacttggttactcttgttgtttgtgtggtaataccataggtatttccttaagttgattggtaattatttattgcaggttcttgttggcctttcttcatcagcaaatgttggatcactagccaaagatcttcttgcactagcggaaggcagtgatgggaaactgaaatcatctaccgttgcttctcctacttataagtttcgaaccacggtaagttcaaaatgaatattgttctgatgttttgagtgcagccactattaattcaaaatgacgctagtgttgactgttgagattttttggtgtcataatgcctcgttgcatatgtatccatcactatacatttgactattactctaccattttctgtacgtgtttatagttgggttatacattgtactctatgtctctatctcaggttctagtgattcactattcgcttattaaccataaatgttttgttaaattatttgtttccaattattcaatctagataatcaatttcatgtatagaattttcatatttcataatatctgtgaaggtactgcaagcaccatatggtgatcttaccacatgcatggaactggcaaaggtacacatttccaaccaaactcattttgttgtggtttatggtcttctataatttcttagctctaacctggaatctgcaaatgttcctgtcctacataggttgctgatttgttagcattcgtactaccagccaattcattctactgtggtgattcgaacggtccaattgacgagtttggttctcaatgtctgtctgtatttagagccatgggcttacctagtacagctgttttcatccgtgtaagttccagtcatgagcatttctcattaaggtattgttatacgatttctggtgatttacctgttctagttacataatcaggatcttccagcggataataaaagtaggcaggaattgaagaaagcagcaacttctttcctttctgcagagctgcctgaggactgcaagttttacttagcaggcacaaaggatgatttgcataaggttagtattcttttgaatattgaatattagaccatctggttatcttcacggttgttctttcgaactctctgttttgattatgttttcttaaaatatccagttcatgtggcatttcaaggagcagcacctttcatcgccacattggagaagccagaggccttatgttatgtctgagcaggttttattacttgctattgctatgtacactatactgctttactagaacagttgctaatttgtattggccaaatatgaaattttgccaaaaaagaagtaaattgatgttccattcttggtgtactatactacttttatataataactggtggtactgctgcttcaggtcttcataaatcctgatgaaaatacgggattgtgcacattgctcgtgtctggatatctgcgggcccacaatctttcggtgaatcagcttgtatgtgatctatgcttatttttttcttagctgtttttttggaaatattatttcttagctattttgtcatttccttttctaataataccttctccattcaaaaggtacatgtttcaggtgctggtgattttcagttaggccaaattgatgtcctcaaggatccatgtcctcttagtgagcggaaaagctctgatgtaatggaaactgaagataatggaattcaggtttgttgtatacaggactttaaagcctttgaaattgaataatgttaatgtaattatgctagacacatttcgttatgctaatgtcatattttaacacatttttaaccttccggtttgtttcagattgttaacacctttgttccagacccttcgagtcaggaacccttacttgttgaaaatgtgccagatcctcttgccggggagcaggtgagtatttttccaatcctgcaccatgagttgtaattttgacaagcattggttttgtgctttattggctatatttgctgtaccattataaatggcgtctgtacaaatagttctcttatctgtagattttcattaactgtactgttctatcctccacagcatttcaactgtgatcacccattcatattttctgttagaacatttgtgcttttgcaagtaaaaagatgaaaactttatttaatctttttaaagtggtagtttgtattaatatttgtatttgattagacttggccaacggaagaagatatggaggaggctgacataaacaacaaacagagaaaattggtaaagaggaagcttccccgaggcacttcagagtaccaggtttgcaattctattggagtttgaaatacctcttctttaaattgattatatttacttcatttactaatcctcaaatgctattgccaggctgcttggattgttgatgacacagatgatgaagataacgactctgataatgacaaccaggctggttctggaatggtcattgatgagcaaggtcactcagaccaaggaagtgatggttcggatatagatgcagtgtctcactttacagagaagttcgatggagaaactgttggggatactgagatggcagtaagtttccttgtcctcatttgatgggctttatgcattttaatcacttggttgcaatatcgcagttcagtgtttcactagtaatcagttgtatgttatgctttgtttgtgggcccgcaggactcaaatgatgaccacagtttcttacattagccaggcattattagattagaaagctagagaatcttttaagcatatagattggtaccaaaccagtccataccatttgggtggaaactacactacatcatgagaggttgtctaccaataaagggcaagaaggaattagaaggggaaactcatattgtccagtcccaagccactggtcctcttcccactctccacttttctcttccatcctattttctgtcggaccccaaacacatcatagtaacaagacaggtactgttgcaatgccaggatcatggatgactagtggtcacatttgatggagtggctcaatggtagtgtgagccagttcctagcctcatttaagattgcagaggagaggaacaagactgaaagagattttgctgactcagtgttgtagcatcagaaccattttgatgtttggccaaaactttgtgcctttggtccctaagtttcttgaattcttgccctgggtataaaatcgtactcttgaaaaagtcgtgtttgtgttttcggggtgcgcggagttgctaaatagaccttattcttcatttcttatcaacttgttatccctgtaccttttttatctgtaaattcaacttattatccctgtacctttttatctgtaaattctgaggtttcaatcctctcccattttgaattaagcaatcacagaattccttttgggtgcatggaaatattaagcgatctcaaaaaaaaaagtgaagtgacagttgcacatttgcaggatgaagaaaatttgactaaagaccagatagaggcagagattaagaaaatcaaagaagctaatgctgatgatgaaggtatcggtttctattaccttgaatgagtttcctttttcacattagctatgctggggtagtgtttcaatggaggtgttgtctgaaaatgatatacagctttggttaagcttgaggctaagcaaagattcttgtatgacttgtccaagtcaatatcagttcccatgccctcttagcttctgtaaattttatcagcttttacattttggtaagtgattgacaagagattacatgcatatctcatataatgttgcagaatttcccgatgaggtggagacaccattagatgtcccagcaaagaagcggtttgcaaaatacagaggactaaagtcatttaggacatcatcctgggatcctaaggttcctatcatttaattatcacatgttactttaaatttaaaaatgtagctaattgttgccattttagtagagatatattcattttgtgcgactggtcttatctcatcctgttggctgtaggaatcattgccaccggactatgcaagaatatttgcatttgataattttacacgaacacaaaagcatgtctttgctaaaattgccgagttagatggaggcatgaaggattgtgctcaagtgggatcatatgtaaggctttatgtgaaaaatgttcccactgatatagcatccaaactttgtcaaccatcaagaagaatacctgtggttgtttctggtcttcttcaacatgagtccaaaatgtcagttcttcacttcaggtactcatccttactaatcagtaaattttatctgccccaattttctggccttattgcacatcttaatgtgtgaaactcgattttcatgtcagaatagcctatgatgtattgccttttaatttgtttgctcttagcttgtgagttctggtgccctaagtatcctaagggcactcacaatgcagactctatcatagagtctaaagttatttattacctcgaataatgtggacttggagtctaaataagacttggagtcttattttttctacctctttcttcaataaatatgctgccacatcagcaaaataccataaatagtatgtaattaattgtcttggactctgtgatagagtcttgcattgtgagtgccctaatgaattacatacggtcattccaagaataatatggcattcaacacaatgttggtatgtcgctctattaagataagaggccagccatcctaatagagggactaggtgggcttccggcccattgtatgtggatgctatttagtttgcttaaaaaagtttgctggccaacgcatgctaggcctttttgaggatgttttgtttttggttccatgttttcttttggatcttggagtgaatgttgatgttggtgtagacgtaatgcagatgtaagcaagctataatatacttttaaaatacaagcgaatatagatgattaaatgcctaaatggtttcaacttgtgtccttatctggtgaaagtaatattgctgctgtatgctgcttgagcttagcattcctcttttctttttttctttttcttttgcagcataaagaaacatgactcatacgaagctcctatcaaatctaaggagcctttgattttcaatgttggattccggcaatttacagcaaggtaatggaagttcaattttttttactattaggagatactccctccatcccgaattgtaagtcattccaagaatcttgatctcaagtttgaccaaatttatacgataagataataacatttatgataccaacgaagtaccattaggttctttattaattatagtttcatactatatctatttgatgtcataaatctttgtaattttttctataattttggtcaaacttgaaatgctttaattctcaaagattcttggaacaacttataatttgggatggagggagtatatatttctcttttcttttgtttcacaatgccccttggaagatatctcactgctcttttgtatcttataggccattgttttcatccgacaacatcaactgcaataaacataaaatggaaagatttctacaccatgggcggttttctgttgcctctgtatatgctccaatttctttccctccacttcctctaatagttctgaagaacagagatggcgagcaacctgccattgctgctataggttcactaaaaagtgtggatccagatcggatcattctgaagaaaattgttttgactgggtaagcttgggtgcatccatcttcacaaggaaattactttttgcagaattcaacattctttttatttttggaggggtttggttttccacttggacgcaatcagtgctatatttttaattcatgttttgctgaattttccagtttatggaaacaggttatttcaccttaaggctcttatttagatctcagctaatctggttgatgagccatgacctgtgggtcagagctaatatagtcgcacattggacatgttattatgcaggtatccacagagagtctcaaaactgaaagcaatcgtgcgttacatgttccacaatcctgacgatgtaaaatggttcaaggcaagtacttatgtgccattttgccattgacatcttttttattcatgttcaatgccaataacacttattttgcagcctgttgagttgtggacaaaacatggacgtcggggccgcatcaaggagactgttggtactcatggtgtgttggttgaccattcaatccttttggcagcttagattagattcagttattcatatccctgtttctgtaccttttgctaacgttttctttcctgaccaggtgccatgaaatgcatattcaatagcagcattcagcagcatgatacagtgtgcatgagcttgtacaaacgcgcttacccgaaatggcctgaacagctctaccacgtataagattgccttggacattttgcttgtatctggtttgtacctgtaccagcaggcagcaggctatccaggaggagtatggacgtaccaacacgggaatgaaaccttcctggagctggcgtgctgtgtagcccatgtacttttaggattattaggaaattgttttggcattggccctcttagctaggagggcgaattttgatagtgtgattattaccgctggattatcatgttttgtttgttctgtggactaaaacgatgacattttatacgtctattcaatagtaaaaaatagttttatttggctctcgaactgtggttgtgtgttctcttttagtccacttggatgtgttaacctccgaaaatgtgccacacgaagatgctttaaggaattttgccaaatttatgcaactaatttacttccattgatcataagtcgcccgagcacgacgtcgcacgccgtggcggtctcaaggaccagaacacctagacttctgcagcctaccaaatgaagtggagcgcggtgccgttgtttcagagaggaaggccgaggagcccctccatcttccaacacgaggcgccttgcattggtcttatctgggagttctgtgcgccggcgtctgcttgtcaccgcacggcagtccgctccgcctccggtgagccacaccgtgctgtggagacgggagttgttgctgcacaacacaagtgcagaggctgccatgttctcttgtgaagagaaccagcaattggcccgcgcaaatagcgtgggtagctagccatttttttttgtactatgttatattttaaaata

SEQ ID NO: 3477 - DNA, 7773 bp, Sorghum bicolor
gtattttcatttgtatttgataattattgtctaattatggattaattagactcaaaagattcgtattataaattacaggtaaactatataattagttattttttatctatatttaatactttatatatgtgccgtaagatttaatgtgacgagaaatcttgaaaactttgtaaaatttttcaggaacaaaggccctgtttggttgagtctattaaactttatcatcaatcacatcgaatatttagacacatacataaagtattaaatataaactatttacgaaagctattataattttttgagtttagagaaacgccgtcacagttcgtcaattggatatgtggcgcccgtacagccgctccccctcgtgcccaagccaccaccactctgcttgcgtgcaggtcgccgtgggcgagtgcttgtccgccacagcccacaggcatgttcgggccttgtagtttccaaaaaattttacaaaattttttagattctccgtcacatcgaatctttaaacgtatgcatggagtattaaatatagacgaaaataaaaactaattgcacagtttagtcggacaaatcttttaaggctagttagttcatgattggacaatatttatcacaaacaaacgaaagtgctacaatgtcgatttctcaaaattttttggaactaaacaaggccctcgatctaaggccttgtttagttccaaaaaattttcaagattccccgtcgctcgaatctttggtcgcatgcatggagtattaaatatagacgaaaataaaaactaattgcacagtttacctgtaatttgtgagatgaatcttttgagcctagttactatatgattgcacaatgcttgtcaaataaaaacgaaagtgctacagtagccaaaaaccaaaaattttgcgaactaaacaggaaagaggggacaccgaaaattgacgtgtccgtatgtctttctgtctgccagacgtagaaaatggtatgagtgcagtagagagaaaattataatagtagatctctaaatagatgaattgtaatggcgtttctcaaaactcgaagaattatgataacttagataaaaaaactcaattttaagtctaattaatctatgattggacaccaattaccaaataaaataaaaatgctatagtacctatgcagaagagtttcatccctataaatttataaaactctctactaacataccctctctgttttagtatataaggcgtaaccactttttgttcatatctcataatataagacgtgctctctcacaaacagaaatacagtaccgtgaaaagagaattaaatgtgttcttggtccttgaaccagaagtgattacggcttatatattgggacggaaagagtaaaactgttatcatctctcttcattaatataatgtcatatcaacatattcaattcccataaaactctattaaactctattaaaactgaccttaaattttaacacctcaactaaacgggaccatatctagtgcaaaccataacctccgtgaaaacctgtgcaaaccatgacaaaaaagtcatctaaattcaccaaaaaaatcacacatgtagatgatatgatgatacacaaccttgtaaaatatcttatccaaactcgaattaatttgtgagatataaaaataataaatttctagcaaattctgtggacacctttctgtcttgaaatttgttatttttatatctcacaaacaaagttgagtttggacaagatattttacaatgttgtgtattatcaaatcatctacatgtgtgatttttttgatgaatttagataacttttttgtcatagtttgcacaggttttcacgaaggttgtggtttgcactagatatgttcccaactaaacacccctaaaacagcccctcaaaggttctgcagttacgtgggcgtgggcccttgtagaccttttctttggaagcggtagaggggcaccgattcgaacgatccagtcgctccagtccaatctcagcaaggaagatgtgggggaagggaaagaagcgtttcggcggcggcggcgagccggcggccaagcggcaggccgccggggacgaaggcccctccgaacccgccgaagacggtacggtcgtagccgaggtagggaccgccccgggcataccttgtttcgagacagaaccctaggggctagaaccctaacccattggatcgttctgatggcgctcgttcagatatcgaagaacaagaaggtgtctgttaggaactggaaaggcagggtcttcgttgacctccgcgagttctacgtcaaggacggcaagtctctccccacccgcaaaggtaccaccagcgacttctgcccctctcattcctgttgtactgttcctatgggtaatgggtgttttttttccctggctgcgtctggcatccgagtagcgcgctccaggtcaaggtatcctgcaccattgttagcacagatggatttagtttagtgctggagactatggactactcaagcccttggttttgttctagaaatacatgtgcggctttgcggcgcccacaattgagctggccagtccaggatacacatatactttgtgatccacatggattgccagcctagtataaaattcttatagtcactaacctctaatcaatcaaaattagtttactgttcgttgtttctatatgtatgaaccacatgttttaaaatgtagatgtaccttgatagaaaagaccaggatatggtataagcggcatgtggctccaattcctttggttaagtgcaataattcatccttgagctgaaattaaaatcaagggtatcagtagatgaatatgtgtttacccttttaagcaatggataaaagattataaatagaacacttgaaaggaaccataccacttcatatttcaaaaggttgagatccttccttttgtcactctcattctgcctatggtgtcatcatttgccttttctctaatcatgtctatggtatatggtgtcaccatttgcaaaaccattcccatttacccatcagcagttactgcaataacattgtaaggatccaaaacaatgaacaacaataatgtcagaccttagcaggaagcctcttgctcagggaggactgctctcaccatacacccatctcagtagccgctacaccttaggacaaaaacatacttgacactattagtgatactttcaattaatctcttcaatatcaatagttgtctgtgaaatttctcctgtactgtaaaaatatgtaattagaaaattgttcctaattaccaatgcaatgcaatattgtaatgaactgcatatccaatggaaagaagtgcctgttatatcagtcttaatctgatcagataccccaggaaatcaccccatatgtggctcaggcacaagatggatgtcagatcattccctatataggatagaatgttgtgttttgattagtcacagcctgcattctgagggggccttggtcctgtatttgggaggttttgatgttgtgctgtgttgctctttctgtggggtaggtgtgttttgttttggttagtttggttgggtccatgatgactgatcccttggtgatcagagtcatggacagctttttcggtatttcatatctcgctgttacgttacattctgaactgtgtaatttcgttatgtacgtaatgcaattcagttttgaccgttgtgggaaaaaaaaggtaccccaggaaatatacatttttgtcaagcatgtggtagatatatacctttttcgatcttgattcttgattccttcgcttgtgctatgagatggctcagtttaaccaagaatctgtggtaggcaatcacttcacgtaaccggaatttgtgaaatacttacattcatgcaattattactatatgaacccaatgctgcagacacataggcatactagacaaggataaacaagaagaatttggttgaactgaccacaaaaatttaaaatagaatagttatatgtctataacgaataactgtatctaggttctgtacattcctagaataaattgaatggtttgtcagatgcacactctattactctgttttgacagcagtcaactccatcagtgctgcctagctgtgggaggcaagtgaggagtgaatatgcattggatgagctcatgcattgcatagaacaggtaatatcagtaaaaatgtatgagttatggacgagtgaagatgatttgcatctacatattgagatgaaaagtaaaatgtccaatcaaacacatatacaacaagtgagatttggatctgttacctggtgagatgtttgtcgcagtcttggcctccagcttcaagtgcagtggaggatgaatccagcaaaaatgctggcaatggatgcttactctcacagggattgattgtttgcttggaagctgcagtagagaaggtcgggtggaaggagatgtgagaagtggaagagactggcgcaggagctgttgctatttggactgcagcccaggctggtccgtagctatgcagtgcatcattttttcgaacaggccatgtgcatgcgaggtgtgctatgcctgcgcactgccggcacacccagagctgtctggtggtgtggagagcccactgccgagaagaggatagctgccgttgcaggtggacctcctgtagctgctgcctgaggtgcctgtgctgcatgacatcttaggccgcgcagagcacctcacagcctcatgtagaagaccaatgcaatggctgcgaggtgatgagggccatgatgctaccctcgatgatgcggcagggagagccactgtgttgccactcttcccaaggtccccacaccttccatgagcccgttcaaccgccctgtgtcaccacgtcgcttagtcatcgcatgatttgccaaggcggctgtgagctctgcagctcggtggcctctgcacagactccacactgtcggcgttccacgccacacgctacatgtggctgtgccgtggggaagtaggtggacgcacaggggagcagcagcaggtgaggcacaggcagggacctggggagcgggataggaatttgcggcccacaaaggttcacggtggttcaggtcaaccacgaagctggtaggagatctgaagtgacttgcattggacagatcagattgcttgatttcacgatccaacggttaaggggggtaacaagcggcgtggccctattaaagatgggatgaatggcttccttctaacctaactgcttctgtgctcagagattttagctttattcgatttttgccatgtatttagaccattatgtgaactttaagcatacgtacgaataatagaatgaacatagcactggaaaaaatagtaatgctacagaacttatcgaggtagaatctacgcctttaatctgcacataacattttctgttactgttatgcaagtttctgacaacaagcttttgctcttcatcatttgaatttgagaacatgcacttagccaagtgatgaagtaagagcatctccaagggttttacatttgaggtttgcatttgagtaatttgccaaaaaactccaaaagaggtatccaacggttttgcatttggagtttgcaatttgggcaacttggcaaatgggggagcaaacttggcaaaaataccaagctgtgaacgactttgcaaacccgatcgcgcgagcaaagtcacgggagaccttctatttttatcctttgccaagtccaaatgtcaattcccttggagatgacctatttttatcctttgcattttgttatgggagttcgcaaataacaacaaatgccaagtcaatttgccaaagcctttggagatgctcaggattgtttatatgcatatcatggttgatagttatgaacaactgttgagtactctaattatcatggtgtgtttatttggaaattatcatatttggagctgacattcttttttaagaccatggcttcaacggtaagagtattaattgcatggtaagcttagacatgcttaacttctggatgaattctattacaatatggacatcagcatatgggagaaaaattaattttcttgattcaaatgtggtgtcatatttaatatttcctagagatgatggtatatattctctacttattatcagtaatataatttcatctcttcttttcctttccaggtatatcactccagttagatcaggtcagtggtgttttcactttttttttacatatgttgtatgattcttagaatttatatgcatacaggaagcttgatttcatgaaaatctagatcttagtatattttcgagtggccctatgaaaatttatttgacaagcattgccattcttttatggccatgaaaatattctcagcacatgggagttctatgctattctatagtccaacaaatttatcactattaatctgaataataattagtaccaatatccatctgtcaggtatccaggaacataattcgatgtagttattctgttatctttgcagtgagttgccatgatcaaggcacacaaatatgccatcataataatttttagctgctgttgtactcttggcaatgtacatgacattgccattctccctagcttttttttttggttactgatgccttgtttagatccgaaatttttttggattttggcactgtagcattttcgtttttatttgacaaacattgtccaatcataaagtaactaggcttaaaagattcatctcgcgatttacagacaaactgtgtaattaatttttattttcatctatatttaatgcttcatacatgttccgcaagatttgatgtgacagagaatcttgaaaagtttttggtttttgggtgtactaaacaaggcctgaagcaacaagttttcattcctgttggtatttacatctgcagtggaagatattgagggacaatatcaaagccatagatgaggccatcaaggagaacacatgatgggagccgccaagcagtcacgtttgggcaaacttttgcctctcgtctgacgcctgatgcatggaagtagtgtcaagactggtttttgttgcccatatgctgccgtgtgccatgttgcttttgtgcacttgaccacctgctgttgtaggtggccgcatggtcgaaaggtttggtttctgcctcgtcgtatgtaaaccttggatgtcagaacttgtcactattatcttgtagttgtagccaaaaccagtttggtaggagtgcagaactaagatttggtgtaaaaatgattcggtttcttacttgctttattatgcgattaatatgccaacaagcattgctgtttgggattgtagttggcgtgctggtcggacggttgcaggctcgaagtaaaaccttggcaatcattcttgggccaaggcctatttgcttcgattgggaaaggaaaaactacctatatatcagtgtggaaaaactacctatatatcagtgtcgtctgacttcctttccctaactctaaaattgaatattttagcccaggtatatataactcgtaaaagcttagaaccgttaaattactttaatgtcctggttagaagtggttttcaatacaattttttctgtagttaaaaaaaaatgggtaaatgcttgataaaattgataagatttttaaaacattaaaaaaatatctctaagcttctaagaccctataagaaaatcctagggatgtattaggaaacgataaaccccaataaattatttagagttcctaaaagtatatttaaaaatatatttagggtgtgtttggcataactcctaatgaggggct

SEQ ID NO: 3478 - DNA, 5154 bp, Sorghum bicolor
cccaatcgacttccctcttggtatacgtggggttattatgttgatcctctctctagcacattaattttataagagcacaaaaaatttaggccttatttagttcaaaaaaattttgcaaaatttttcagattctccgtcacatcgaatctttagacgcatgcatggagtattaaatatagacgaaaataaaaactaattacatagtttggtcgaaattgatgagatgaatcttttgagcctagttaatccatgattggacaatatttgtcacaaacaaacgaaagtgctacagtacctattttgcaaaaatttttggaactaaacaaggccttaatgtctagaagtggctctattgagcccacagttcaacgtgaaaaccctcggttcaacctagctctgaccaatttacaaactaaatgatcaaactcttgattcaaccgaaccaggacaagaatgttagataaaacttaagcattcttgctttgcaaagagtcctatcaataagcttggatgatctgcgtccccccccccctcctccgaaatttagatcctttccacaaaataattatttttggtttcaaagcttaattattattttaaattttagtggattctcggtcgacacacgacttgggccatgaagatatatttattctgactgtgacaatgcatactcctacatgaatctggccttgtttagactatctccaacaatcgtcacccaaaatacaagacccatttgtcctttgggtagcgctacaggtaaaaggttccatacctatttttagtcttctccaacaacaagacctaaaagacaacactctctgcaaatgggtctcgaggagagaggatacccaaatttgggttatgcctcccctgatacccaaaataggttttgtgtataagtactctgttggaggctataggtattgtgttggaaacctattttgagtttgggttcccaaatgcatatgctattggagacagccttagttggcaaaaattttggattttgggtactgtagcattttcgtttgtttgtggtaaatattgtccaatcatagacgaattagggtctaaagattcatctcgtgatttacaggcaaactgtataattagtttatgttttcgtctaaatttaatactccatgtatgtgccgcaagattcgatgtgacggaaaatcttgaaacttttttacaaactaaacaaggttctaattacagatattcgcaagaaaagaatctaattacagaaggcagggatagagtactgtttttttattgctagactaaggccttgtttagttctgaaaagcgaaaagttttcggtattgtagcacttttcgtttgtttgtgacaaatattatctaatcatggactaactaggatcaaaagattcgtctcgtgatttacagctaaactgtataattagtttttgttttcgtctatatttaatgttttatgcatgtaccacaagattcgatgtgatggagaatcttgaaaaaattttggttttcaggacgaactaaacaaggcctaacaaagggtgggctgcatcatttcattttaaataattgcgtcgacggtcgatatatggggaatttcgcctggtatccaaggcgccttccccactcgcggcatttctctggccgcaggctgaactacagagtttagttccacaagctacaaagttcggctcgccattggcttgcaagatggagaagtttttttttttgacaaggcttgcaagatggagaagtgagccgtggacgcagctccccacttctcatcgccctctttttataatttgtggcgatctttggggtggtgggcggaggattttctaactggatggtgaagtttgtctggtgaaaaggacgggcgcggcgaatccgtccatcgatccaacgctgtgcgcgcgttggaggagggacctgccacggcccccacctgcagcgagagactatagatagatgccttcctctctcatcacctgatggctgatgcctgccttcgttcgcggccgccttcgcctgccgctactactactactactagttcccctctctcgctcgcttcccctctctcgcccgcttcctccctccccctccccttcccttcccttcccttcaccactcccacttcccaaccctggatccaaatcccaagctatcccagaaccgaaaccgaggcgcgcaagcaattattcgctggctagctaggcctgtagctccgagatcatgaagcgcgagtaccaagacgccggcgggagcggcggcgacatgggctcctccaaggacaagatgatggtggcggcggcgggggcaggggagcaggaggaggagctggacgagatgctggcctcgctcggctacaaggtgcgttcgtcggatatggcggacgtcgcacagaagctggagcagctcgagatggccatggggatgggcggcgttggcggcgccggcgctaccgctgatgacggcttcatctcgcacctcgccacggacaccgtgcactacaatccctccgacctgtcgtcctggctcgagagcatgctgtccgagctcaacgcgcccccaccgccgctcccgcccgcgacgacgccgccggccccgaggctcgcgtccacctcgtccaccgtcacaagtggcgccgccgccggtgctggctacttcgatctcccgcccgccgtcgactcgtccagcagcacctacgccctgaagccgatcccctcgccggtggcggtggcgtcggccgacccgtcctccacggactccacgcgggagcccaagcggatgcggactggcggcggcagcacgtcgtcttcgtcttcctcgtcgtcatccatggatggcggccgcactaggagctccgtggtcgaggctgccccgcccgcgacgcaggcgcccgcggcggccaacgggcccgccgtgccggtggtggtgatggacacgcaggaggctgggatccggctcgtgcacgcgctgctggcgtgcgcggaggccgtgcagcaggagaacttctctgcggcggacgcgctggtcaagcagatccccatgctggcctcgtcgcagggcggtgccatgcgcaaggtcgccgcctacttcggcgaggcgcttgcccgccgcgtgtatcgcttccgcccgacgccggacacctccctcctcgacgccgccgtcgccgacttcctgcacgcgcacttctacgagtcctgcccctacctcaagttcgcccacttcaccgcgaaccaggcaatcctcgaggctttcgccggctgccgccgcgtccacgtcgtcgacttcggcatcaagcaggggctgcagtggccggctcttctccaggccctcgccctccgtcctggcggccccccatcgttccgactcaccggcgtcggcccaccgcagcacgacgagaccgacgccttgcaacaggtgggctggaaacttgctcagttcgcgcacaccatccgcgtcgacttccagtatcgtggcctcgtcgccgccacgctcgctgacctggagccgttcatgctgcaaccggagggggacgacaaggatgaggagcccgaggtgatcgccgtcaactcagtgttcgagctgcatcggctgctcgctcagcccggcgccctggagaaggtcctgggcacggtgcgcgcggtgcggccgaggatcgtgaccgtggtcgagcaggaggccaaccacaactccggcacattccttgaccgcttcacggagtccctgcactactactccaccatgttcgattctctcgagggcgccggctccggccaatccaccgatgcctctccggccgcggccggcggcacggaccaggtcatgtccgaggtgtacctgggccggcagatctgcaacgttgtggcatgtgagggcgcggagcgcacggagcgccacgagacgctgagtcagtggcgcggccgcctcgtcggctccgggttcgagcccgtgcacctgggctccaatgcctacaagcaggcgagcacgctgctggcactcttcaacggcggcgacgggtacagggtggaggagaaggacgggtgcctgaccctggggtggcatacgcgcccgctcatcgccacctcggcatggcgcctcgccgctccgtgatcatggggtggggttttggacgctgatcaaggcacacgtcccccggccccgggcatggcgcagcctccccgagctcgccggcgcagttgaagctgtagacgtcaatgaacgctgaatgaattgcagttattaggcgaccgggccacggttctcgccggcgtgatgagatggactggacactttgactccgaccggatcgggcctgtgttcgttcttgtttccgatccccctctcttcccgttgcttcaatccgtcaactatggtagcccgtagcccctattgttatgtttaaatgtctattattattattatgtgtaattcctcccaagcgctgatatccaataaggacgaaccggatttcgttagctcgaatgagaattttgtatacagtgcatccaatctgaactttagctatgttcatctgttcgaatgcttcttgcatcatcatgtacacgattcttggcctattcgtcctctgtaatgatgatgatcgtaatgctgtagcattccgtattgtgaattccctcatgtactcctcggattggaatttgcggaattgctttgcttttctaggagtatttagatttaccatctcatcagaaggacagataaggttgcttttgtgttgcccatcctttctgtgagaaatcctccagtctcgtagaggtagccatggccgatgtgtactgcggttgctaatgaaggaaacatctcgttactttgccttgcttgtatccctgcgcctgtatgccgtcctctgccggctgttcacgatctaaaaatactcatgggcgttcacatgggagctgcatcgcaagccagactgacgactgttcctgtgcaatattgaatggatgtttatctgctatgcaatcagtgcgcattattattaatcaatctcctctatctatcacataatcagagaaagtcaggtagaaccgtagaagcaggactagagctgtacagtaagccatgaccctactggtatgtgctttctcctccaagctttgacaggagaaagaagaacaat

SEQ ID NO: 3479 - DNA, 2863 bp, Sorghum bicolor
aagaatcccttcgggagggctcctccgcaacagctttgccgacgcagccgaagcactagagggcgaagcctaaaaacccccgccttttcctccatttgtgtgcaacagcttcaacgatgcagccgaagcactagggcaaagcctaaaaaacctcgtttttcctccatttgtgtaaaatggctacaaattttcttctacaagtgcataagtgtttttcgacctctagttctttggttccacctctagttctttggtgtggttctccagctccaatgctagagctatcagacgaacctgtcaaacacggtccacgtagcagctcttataattattttgtttttattaaacataaaattggttgattttcttttttttttaagataaaggaacaaatattctgctattattacaccaaattagatcaaaaccaagcatatccaacttaaactcaattctagcattattccctatgtaccactatttccaacagaccttcatttaccccatactccatactccctccaggttagtaaaaagagtcgttctaaacaagatttgagtcaaaatgttgagaatataaatcacaaataacttttaagttgttgattttggaaatataaaaaccacataaatagatttgtcttaaaatatatacttttataaaaatatacatatatcactttccaataaatatttttataaaaatgaaaagttagagttatgctttgaacatcatgtcatgtccaaaatgatttctttttaccaatctggagagagtactttgctagatcataaacataactccagtatagtactttgatgagtaatatatctatttaaaaaaagtgagtaacgggcattaactcagccgttaacgatcttaacttgttttggggtattattacccaagtaaacatatttaacgagttcaagatccaaaatttgatcgtaaatatgctttactcaaagaatctgataatagcattgataattattagtctatgtaaaatcccagcaattgctagtcaaagtgaaattgtggttgctggctgaatacaagagcaacagtagaatatgctagaagtaacagagcgagtgcatgtatggccacgccccgaacagccgatcagtcataattaattgtacttttctggctacataataagaatatttttctctcataatagcccgttccttagattgattattatgtagctgaaaaagtacgaccgcttctaactgggttttagctgataataaactaacattagcatcggcagttcagcaacagcatcagtgggctgaaacgattgatcgagacatatataaacagggggaatccatatccgaaaggagtatatactagctaattgcgtccttggaatttggacgcaaatccccgaatttgcttgcgaatcgagggtgtctcacctgtctgactgacgacctgcctgcctctgcctcacactcacccgtcaccgaaaaagtatttggatggatcttgaagacgaccaacttggcctccagtctgtcgatgtcgtcctgcatccacccaggtgcaccacacctagacctgggaatgggaacaccaccgaaggtacgtacgtagtcctcggtctttaatctccagctgctgcctgctactgctacaccagcgttcgaatctgcatacattgcatccggccttcccaaatcttcctcgtctgtcctcagagcaatcccaggtcaatctctgcagccacatcagtatctccattctcggccaccgcgccactcgaatcaaggcaagaatcgccttcgcttgattccaacaaagccattaccaggcgatcgagaggcaataagcaagaatcacctagcttctatatgtgccgccgcctcccagctcctccagcacttcagtttcagtctcagggttgcagttgcagttgcagtcggcggcagcagagaggtgagcgaggtgaccaagccgccggtcgagcgagcgagcgagtccgtgcatggcggaggagaggaagcaggcgggctcccgctggcccgccggaggcagcggcggcgggcgaatgcgcgacgccgagggtggcagtggcaagatgcggggccggcaggcaacaaaggcaaggcccgtagtactggcgccgccgggccaggggtacttcacggcggggctggcggcgctgttcctctgcctcaccgcgctgctggtgttcctgccgctcgtgctgcccccgctgccgccgccgccgtatcttctgctgctcgtgccggtgggcctcatggccgtactgctggctctggtggcgctcgtgccgtccgacggccgggccgccaccgccgccgtcgcgtcgtcgtgcgtgtgctgaaacacgggcgacgcgtcgcacgtgcacgtgcgctagacacgcggagagtgtgtactgtaagaatgtgggcgtttaacattttctttctctctctctctctttttgttaacttgattgatataaggaatagcaatttcctcttttttatttctttggttcgaaaatttcagttgttaatccttagccagtctagctgttttcatgctctatgaagaaacacgggggtagtagtatactcacttggtcccaaaataaatatcatttttatttattgagaaatcaaacacttttagttttaaccaattatatctaaataattaatatttataataagtaaataaataatattattagatacgacgttgaatatatttttataataaatttatttaaaggtataacattatacgcattttttcataaatttaattaaatctacctctattttatacggagggagcagctagcacgccacctcgtccctgcctccctggactgct

SEQ ID NO: 3480 - DNA, 6597 bp, Sorghum bicolor
tggagggagtaccaaattaacttaatgttgtgacttgtggtgtctattgtacatcgtaccccctctattctaaattattagacgctttggcatttctagattcataccttttatcatgtatatatatctagatacatgtagcaaaagtaaaactagagggatagctataaatcatgtatctcaaaaacatttatcgtaataatgtgggatggtaggattataaatcattatttggatagttgtttcaataaaaaaaatctctctatttatctctctacactctaacaacttctctatctttgaggaggaagaaatcaagaatagaagatgggaatatttaaaggtctagtcgaagaagttatcctagagattttttttcaccaaaatctatcaataaagaagatataaagaggctcttgaagttgctctaagaagagattattggtcaaaaggcaacagagttggtggtgccaagaaagagggagtgagaaaaaataggagacagtggtaaggaagggctagagatgtgaagtcattggtgtcaacacctactacctacaactaaagttatcgagaaaccaaaaagataaaaaaaaagtcacatataatgtcttaaatttcatagttatttgcctttagcgtaagcagtgcgagtgagatgacgtgtttttaaactgttttgtgaaaagtgtctcaacacttcttaaatggactcatctatacatagagccctctcatgataatataagcaatagagaactctctctctctctctctctcttcttttcctcaacgtgttcacctgtgagttctcacccaccacctcctcatctgtgagttcacaccactcataccctcttttcctcaacatgttcacccccaaccctatcccaccaccaaccttcccccttaccggtgtcgcctccggtgcctatgagagctacccttttacctcttccatctcatttctctccttaccacaactgaatcttgctcccacaccctcattgtcgctgaactcgtcgcccttgcgactacgactgttgctaattcctgcaacaatgttgggagccctctgcccctatcccttgtgtccccactttcactgccacccctcctgatctatgtgctacatctgacacagtgggacacgcccgccatggaacatcccaactagcgtcctccatagttctcgtggtcgccgccatggcaggacgcccccgccactagccttcctaactagtctcctccataattgcctacagtcccacccatagtacaccctatcatcgttgttggtctagaagccccccactctccctcaaagctccctttaaatcttgcaatgacaaaaatcctttctataatctgaatccaaaaccctaaacctagatccaaaattctcaagagaagaggaagttgtcgttctggcgcttgctacaactacatcactctcggttcaatttattacttatttctctcttttttttcttggctttgtcggcgtctcctcctcttccatatcaggagagctctacgagaacctcttcatttagctttttagggcacgttttgaaccacaaccaacacgcgccacacgtgcgacatgccgaaactgccaaaccctcccgccgcacatggcaaaatgtttgccgcacgccgcagctcgccaactgtcttacaaccgtttcgtctgccgcactcgcttactgtgtggtcacgactatggcggcaacggctgtggcggaaccaaacacacccttaattctcaaatgtgaaaaccaaacatttttcaggtttgctgaatgaaagctgatcgccaaggttttggaatttgatttgacgagttgaaagagggacgtggtcaactgaaagttccccgtgcgtgagatgaaagcgccggaggagtttttaataaaagaaaaggaagaagaaaaaaagagaagaaaaatgggaacaagcacatgtgggggtttgccttttgctcttttctcgcacacgcattcggagttttctgacgagacgaccaacgccacacggagacgagacgacggaggagacagtagactcgctgaaggcaggcaaagctgctgtatataaagctcgctcacggctcaccgctggtgaccgcacagccagcagctccgtccgcctccgcccgtcggaactcggagaaggcctgcctaccccagctgcccttcctactcccttcccctcgccgtcctcctcccgccgccgtctcgcatcgccgccccgcctcgctcccgtcgttcctggccgccggggggcttccttcttctctgtcgctggctacgcgcgtgacgagggagggaggaggagccgtagcgcgtggatccagggccagcggcgtccatcccgcgtgacaagggacaaggagacggtgagatctactctcttttttttttccagcttctccatctctcgcagctctctctctctctctctctctctctctctcagcgcgttttgcggagattcgtcggtagcgacggcggggtagtcccaggctcggcggcggcgggcggcggcgtcagcggctccccctcgctttgcgccctcgacaaggctggagccagcagccgctgctccaccgaggcggtcgcgccgatgacccaaagctaagcgttacctgtccgcttagtgccgctttttggaaccctgctttggattggataggtagctcgtccgtggcgtggcacacggtgtatcatttggggggattcatcgctgcaattgagagctcagcgaaatgatcgcttcaccgcagaagcaactgcaggtttggcagggctgaggaaagagccggagcgaacacggacgttagccttttttggattgcacgagctggcgtgtgtgggaatggcatgattgtgagctgtctgtgggcatgagggaagaagaaaaggtgacccctttggtgctggactgctgctactgtggaggagcagcggtgcatgagatgcatgtgatgcggcaacaaattttaatgtagccacgattgagagatgaatctgaagtgactaatgtggtttcaggctcaggaattccttcttgttttcagaaagaagggtgattgcaagtattcgtccagtggtgcaatgacccaccccaaaggtggctggtggatgcttaatctaatactagtagtagatttccaaccaatgtgccataattattgtctctagctaaggtggcacgaaacctgtggcgtattaagaattgtcaaggctgtccatgcagaatgagctgtcctttgatcagcttcatagcaagtggtgactatgagtagttagtaccttcctgctagatatattttaatctacctgggagcagttgggagacaacaaagaatacagaaatacctccatatttgaagttttccttttgcataaattgtttgcaacatgtgggtcaatttggttgctgtgcacctttgttagtctcacatttggttcgtagttggagaacatgaatgcggaaggaactacaggggagaggggatggagagaatctatacatggccctgtttacaccatggaattgatgcgatgagtgcatgtcatagatatcaattacttatggaattggttgctcgatttctaaccgattttgttttctttatttcttgttttctgactgattctatatctccgcttcttctaatacaaaggtgtttgattccaacttccaggttttgtctttgggtagaacatgtcgtgctttgcatgctgcggtgatgaagatacccaagtaccagacaccaggactcaatacccaggacaccatccagcaagtaagagcatggaccctttttttgttgttgttgtaatcctttgcagagcaccatttctcataccatatatttatcttttgatgcttggtcaatatttttctgataaactccaactgacctgcagggacagatgcataccgccctgctgatcaacctcccaagggtcctcagcctgtgaaaatgcagccaattgcagtccctgctattcctgtagatgagattcgggaggtgactaagggttttggtgatgaagccttgattggtgagggctcctttggcagagtatacttcggtgttttgagaaatggtaggagcgccgcggtcaaaaagttggattctaataagcagccagaccaagaattcttggcgcaggtctgtgtttccctgtttatgaaatgcagcgcatcttttttagtctgtggtttgatgtcattctgaaattggtcttcaggtgtctatggtatcaaggctgaagcatgaaaatgttgttgagttgcttggttactgtgctgatgggacactccgcgtccttgcttatgagtttgctactatgggttctcttcatgatatgcttcatggtattgtcttgtgctatctttttttctctatcttttgcatgagttgtactgtctcatggtccaagtaaaaaaagaaaggaataatttcttatatgcaacggactaaaccttaaatcccgatatgccactgactgtgggggtcccatgtgccagtgatggcatatcatggattttgagttttctcggtgacatataaggaaattacccaaaaagaaaccatgcttaacacatgcggaatatgtctctttacaggaaggaaaggtgttaaaggggctcaacccggtccagtcttatcatggtcacaacgtgtgaagatagctgtgggggcagcaaaaggcctcgagtatcttcatgagaaagcacaaccccatatcatacacagagatattaagtctagcaatgttcttctttttgatgatgatgtagctaagatagctgactttgatttgtcaaaccaagctcctgacatggcagctcggcttcactcaactagggttcttggaactttcggatatcatgctcctgagtatgtcctgatttccttttccattgctctacagacctttggagataattaagcttaacataagtttacattttttttgggtcaggtatgcaatgactgggcaactcagctctaagagcgatgtatatagtttcggagttgttcttcttgagctattgactggaaggaaacctgtcgaccatacattaccaaggggacagcagagtcttgtgacttgggtaagttccatctacacatgccagttgttataagataaaattgacttgtatttttctgttgggtgaatcaaatcaatgacttattcaacactggcaggctacaccaagacttagcgaagacaaggttagacaatgtgttgactcaagacttggaggggactatcctccgaaagctgttgcaaaggtaccatgaacaacctttcttctcgaactatgcatgactttttaagttggctttattaactgtttaagtgtcaaagaaagctggttaataaagaacaaaagtgatggttgtagaagaatagattagtaaactgtcttctgttatttgaaatgtctaattcttatgttgcgctcatagaatttgacctgctactgaacattgttctcaaagcatatttgcattcagtatcaaattattatgctaagctttgatcctttgctgctggtgctatcaagtgttagctcttgagttcatgtattttttggtgatgatccattctaaaggttttaaccctgtttgtgctcctgtttttgaaacagtttgcagctgttgccgccttgtgtgttcaatacgaagcagacttccggccaaacatgagcattgttgtcaaggcgctacaacccctgctgaatgcgcatgcgcgggcgactaacccaggagaaaatgctgggtcataagctttgcttctctcccccgcctcttgtatgatagataagtaagatatatgagtcgtcgatgtcgttcttgcggacatgtggctggcagcgtgtaacatttgtgattattcttcccctgagttgtaaacaagattcttgtatcccccacaatatttgattctttctatcggttgcaagatgacctgtttattggtgctgttttttctttaagagatacctaagaaaaacttgcaagctttattactcactctattcaaaattgtatgatgttttgacttttttagatatatagtttttgatatgttacttagatatacaatatgtctatattgtaaaaaaaaacagtgtatctaaataagtcaaaacgtcttacaatttagaaccgtggaagtatgacacacagaattcggtgctaaattgtttacaagttggagcaaatttatgtctacgctcggagcataactcacattgaccggaagcaactttcgtggataaaattggatttatttctcggactagaatgccttaaggtgaattgtcatatttcaatcaaatagagagccttcaccaacagtccaacaccatggaaggcctgtttgttttgtggcctggattgggagtcactcaggcaggtagatgtcccctaataactagtgctgaaaatcaacagcctgggtgatctacctaagctcaggcagtcatccaaacaggtcctacaagtcaagctgagcaaattgtgttgataaaaggaatttaataccttaatttctccaaacagaa

SEQ ID NO: 3481 - DNA, 7658 bp, Sorghum bicolor
ccttgtttccggaaataacgtactgtacgtttcttgtctgtgcgtaggcagaaaaacaagggcagtgatgtaaagtagtaccagtattgctgctaaaatgcaagtatgcaagtactggagtagcattcaagctgtacattaaaatactgccaaaaacgataagctggacggttggagtagaacggaaactgctaatgtttttttttctttttggcccggagataaacctcattttgcataagagtccccagaaatgtaagcacatgatctttgaaaaacaagatatacaagggccatgaaggaaaagaaagtacttctaaaacatgtatgggaatttagcgcgaggattcgatttatcaaaaccaaaaacagttggctagtgatgtcttggaaatttaaaatccagtaggcctctaggtagtgttcttttgaggatggaaaggaaacatggttaattgactcataacggtgcaatatggcaaagtttgagggcgaatctatattgtttgttgtggatggcacccagctcaaaccaaaacttttatatttttatgatactatattaccattggcatcccatatagtgttgagtcccctattttgctctaactccacctcagagcaaagtcccattcacaaaagtgttcatagaaggctcgagataaaatactagtgtagttggtaaccgtggttctatatgaatgcgtttgctacatgatatgttcttatccgataaccggaattttgtgagaacttcatttcacactgtgctaaatctgcacggcggtacacttgtacccacgtgtgtatgaatgcgtcgtgacgcgatatgctctcgaccaataaccgaagtttctagtaagaacctcattcacacgatcgttaaatctgcacaatgatagagtttgtaccccgtgcagatgaatgtgtctaaaatatagtttgttttggtttacattcacatctggtaacttgtggttctcattgaatgcgatgccacatagtatgttctcaaaccgataaccgaggttctgtgagaacctcatccacgtggtgctaaacctgcacgatgatacaatttgcactcgtgcgcggatcattgtgtgttaaaacatgctttgtttcggctcttccaaatgaggtaccgaccagaaacaagacgtttgaggcaaaattgattcaaactccatggacaacaaaccatacccaaagatatatcaaaaaccatacaactcattgttcatcgtggagtagtagattgtagaggaaagaaaatggactatgtgatgatcgcacctttgtcacttttccccttagaaaaggggaaatgatagaaaggaaaaagagaaaacgcatttcctggataagcccttgaggaaaaggccttgtttacttccaaaaagttttgcaaaatagcaatagtagcgctttcgtttgtatttgacaaatattgtccaattatagactaactaggctcaaaagattcgtcttgtcaattccgaccaaactgtgcaattaatttttattttcatctatatttaatacttcatgcatacgtctaaagattcgatgtgacagaaaatctgaaaaattttgcaaaatttttgggtaactaaacaaggcccaagctttctcgattaacttacaagtgatgaatgagtgatctggggacgagtgtacgaggaccgcgtccacgaaatccccaacacggcatcacgcccacgtcagcgcttgtgccttgccgctgtccgtcctcatcgcactcgcatactcgcacaaaacgaaaacccgcaccggacgaacaagtttctccggccgacatatgggaccatcttttttgaccccacctgtcagtaaagttacccggataacgcggcgtaactttgatctcccccccccctcgcgtgtccctcgtttaccagtggaacatttttggggtcggactccacacgcaagcctcgccaaagtttttaaaacccccgagcttgaagaaaaaacacaggtaaaaaatatatatataagagagagaaaactctctctcgcttcccgtcggaggggagcggtggccgagctgtcacggcggcggcgtaagctgagcgaggtcctggcggcgttgtcagctcacgaggcggcgcagtggtaacctgcgtgcccgcggttttggctcccgagaggcgcgggtcgggcgtcggcgggatggcggcgtcgctgaggtggtggtggtcggcggtggtattgttggtggtggtcggcgtgagcccggttgtcgccaacacggagggtatgcgtatgacactgctgcttcatgtaatttgtggtttattttcttcaaggttcgatgagtagtccacagcggagcgaatttccttctaggggggataatggctgaaaatctgggggtggtgtccggaaaactagtgtttgttagttctacaagcctctgttgatgggcggggactgaacaggggatgaaacgatagcctatggttcccatttccagcgctttgactgattggagtgattgctttgggggccggggtgtttgtctcgcctagtgttttgtcattttgtaccatgcggcaatgtttgtatgacgggcgttgttttgttacatctggaaagggtggttgacacaaacctggaaggcaattcgttctggagcaaatgcagtctatgcacacaagtgtagattctgctttctactcatgtcagcgtctagaactattttgggcctcaaggttccaaaaggagttttctacgttaactatgaatgggcaggaaggattgttcgctgtgttaaaattgtttcttttaagttctttctgtgaaggtgcatatgcaaggcttatttttttttctgatgcaaagctttggtctttgattcactgctacacagtaaattttcattccatttcgccattgaatctgaactaagatgattgtttttgtttatttggctaaagatagcattagtagccatggaagctggaggaaagaaattctgattactgaaccttgtctgtttgggttgggagatggggagatcagtatacttagtaataattgcctcattaatttgttcaggcatcttagatatggactgatatattaacggtacgttgttaacgaacaacctgtacttgctacctaaataaagctgtgccatttagaatgaactgaagctacataacgaaaaaaaaactgaatgcgtacgttactttcttaaaaccgagcatcctacggacgtgtgaagtaattgcgaataattggaaaacatggcttaatcattaagagtgcattgttcacatagtgtgtttttaccatattctacacgtgtggaaagaaaccgtgttgtcttaaatgctagtgatttttttccatggtggatctatccttgaagtggatagtaacgcttaggtatgtactcgtgattaaaagattacactaccatggtaaccgaacccctataagagtaattactagtctagatgctagtcatattgcgcgttgaatccatgatgcttgacacttgatatgctcttttaccattggaaaaggtattgtctgccaaaataaaagatgggtttaaccacatataagaacattaatatcttaacggcatattaatgaaggggaaaacctatgcatcctcttaaatttctaatgggtagattattgcttattgtgatgatacctcaatggcaggtgatgctctttacagcctacggcaaagcctgaaagataacaacaatgtgctgcagagttgggatccaactctggttaatccatgtacatggttccatgttacttgtaaccctgataacagtgtcatcagactgtaagttgatcaaagatgtttttgtttattctccctttgaggtgaaagactgaccatttgaatatgtactgtctttcttttgctagtgatcttggaaatgcacaactatcaggtccgttggtgccacagcttgggcaattgaaaaatatgcaatatctgtaagtttccacatccatgattttgataattgagctaatagtttcatgatgccatataggtgcatctttgaattccaatattggtttagcatcattgcttagttttggagcttccgaaacatgtgtgcatgcttttgggtgcattgtgtctccttttgtctgacgcccaacagttctcacttctcttactttttcttaccgtatatattttccaataaatattgtaccctacaatacataggtcgccttcgtgttgaagttatgtttcatcattttgcaacagagaactttacagtaacaacataagtgggccaataccacctgaactggggaacttaactaacctggtcagtttggatttgtacctcaacaacttcactggaggcattcctgacaccttgggccaactatcaaagttgcggtttctgtaagttaattcaattgccctggttacagaagtgacatgttcatctggcattgcccatcaatatatgttgatcctgttagtgtaaattatctgattgttattcggtcatgatttatctgacaatggtgtggagaaatagaaagttcttacataacagtaatatatgtatgatgtgcccaacaataggtttgcacaaagttatcctccaaatgcactcttcactttgtgttagtagatactaaggttttcataacatcgatcattcacttatccatttgtgtctttttcttttatttttaaaatgaaaggcaaaacccattgtctagttactttttacattatctttaagcttatctattgactattggaatgattgtaacatttttatttctttggatatctacttgcaaggacagccgtcttaataacaacagtctttctggccaaattccgaaaacgctgaccaatatcaacactctccaagttctgtaagttacctgttgcccttttatacatcattacagctgttcaggatgttagataacagcaaaaagtgttttgacaatcttgcagggatctctcaaacaacaatctctcaggaggggtgccatcaagtggttcattttctctgtttacacctataaggtaatttctggatgaatttggatgcttaattgcatcttgtgatgcagttcttctgccagttgaaaacaaaaacctgtgtcttctgatgttgacaattctaacctttttgtcacagttttgctaacaacccaaatctttgtggccctggtactacaaagccttgtcctggggctcctccattttctccaccccctccatacaatcccccatcaccagcttcatcaaaaggtacggtgattggctgtatattctgtcatatcatgttactgtttgagatatgcataagggcgaagcactgacatgatcaaactatggtacatgacatatcctaactttgttaattctgttccctcaggcgtgtccagcactggagcaattgctggaggcgttgcggctggcactgcatttctgattgctgtgcctgctattggatacgcattgtggcggaggcgaaaacctgaagagcaattctttgatgtccctggtcggtattatataccactgtgcggttgttgtcatctgtgctattcatttcatttttatgctctcctttcgattcaggtgaggaggatcctgaagttcacctaggacaactcaagaggttttcactgagagagcttcaagttgccacagataattttaacaataggaatgtcctaggaagaggtggttttggaaaggtgtacaaagggagactgtcggatggttcactggtagcggtgaagagattaaaggaggaacgcacccctggcggagagctccagttccaaacagaagttgaattgattagcatggcagtgcacaggaatctgcttcggctccgtggattctgcatgactccaacagagcggttgcttgtatatccatacatggctaatgggagtgtcgcgtcgcgccttcgaggtaccttattctttctcactactcaaagcttttcatctgcatttaattgaaaacaaagtgctagaaatttgtgtcaaaagcatgtaaaccatttttacttttgtttttctttgttttctgtagtccaactttagtttgcatatttctgatttcattcctgatgctttgattttgtatagaacgcacggaaaatgatccccctcttgaatgggaaacaagggccaggatcgcgctgggatcagccagaggtctctcctacttgcacgaccactgtgatcccaagatcattcaccgcgacgtgaaagccgccaacatcctgttggacgaagactttgaagccgtggtgggtgactttggcctcgccaagctcatggattacaaggacacccacgtgacgaccgctgtccgtgggacgatcggccacatcgcccccgagtatctctccaccggaaagtcctctgagaagacggacgtcttcggctatgggatcatgctcctggaactcatcactgggcagagggcgttcgacctcgctcgtctcgcgaatgatgacgacgtcatgctccttgactgggtaagtagagcactgccaccatgagctggcattcgctaaatgcttcaaacttgtgaaaggaaagaaatgaagaagctggtgtttattgttgtggttgcaggtgaaggcgctgctgaaggagaagaagctggagcagctggtggacccggacctgcagggccggtacgcggaccaggaggtggagtcgctgatccaggtggcgctgctgtgcacacaggggtccccaatggagcggcccaagatgtcagaggtggtgcggatgctggagggcgacgggctggcggagcgttgggagcagtggcagaaggtggaggtgatgcggcaggaggcggagctcgccccgcgccacaacgactggatcgtcgactccacctacaacctcagggccgtcgaactgtccggcccgaggtaggcgatggctgatgcggcggaggtagatgatcgtcgtcgtgaaaatccgttgtctgtgaatatgacggcaggtagtttttgttggttggtcctggatgatagctgcgaaaattgtagctggaattctgtacctgtggttctcacctgaccctctgtaagttttggtttttttctgatattaattagagagcagtatgacaccagcctctgttgagctcagtagtttaatggtagtagctgctcttcgttttgcgatggcgtccatagcagccagcacgtcgttgtggtggctgcgcttgctccgaacagcggggtgacgagcgtacgagttagagggcagtggcctgccgactgtgactgtatcgtgctcggcggcaggcatagcgcagcactgctgcggtgggcgcgcgcgcgctcaggctgtcaggcacgcatcggtggtagaccccgttcagccgctcaccgataaacaagtccactgctactacacatcatccatgctcaggctacacctgaacgtgctcggtttagctgtaattttttttttcctaatgtatggcggggcaggacctaggactaggaggaataatgcagcgtcgtttccccagaaatggaccatgcaattagcaacagcgtcttgcagcgcaggcagtcatcacaagacacagcctacaggctacagatcctgttcgcagcgtgaga

SEQ ID NO: 3482 - DNA, 8831 bp, Sorghum bicolor
tgcatgtagctctcctcatccactcatctcaaaatatctaccgcatggctctccttgcccactctctcccctgctacttgctctctcattcgcttctctcttctctctctctcagaaatccaccgcagccttccatggtcccaacctgggagacctcgacttagtgcggtgccttcccccatctccctcctcaaccgaagctcgagcacgcaatagggggggtctgtggaggcggcgtcctctacccatctcaagctcgatgtgcgtcctccaccctagcgtgtcgtcccccacctcgacgccggccatggtggctttcccgtggtggatccatgtagtactggccttcccatagtggatacatggagcacgatgcagatcctgtagagtggtggtctcctccacccaataggcgatggcagcccatcccccatcccatccatggaggcggctcaatctgcacccccgacggcgcccccaacccatgtgcctcccctctttccctttatctcgcggatacaatggattttgtagtgttgcaatcgtctattagagatgttttagtagtctattcgagatgtttcagtagtagttcttttgttgttgcaataatatgtttcttactgtttcaacttcttcatcccaatgttgttgtagtattgctttctttgtgatgttgcagtatgtttcagttgcttcaatctcatgtctgcagtaggtgtttcatgttgttgcatcagtttgttcggtgttgttgtaataacatgttcattgtatttcaactggttcaacttatttattgaagcactttgttcagtgttattgcataacatattcatggtgtttcaactggttcaacttatttgctgcaacaatttgttcggtgttgttgcaataacatgttcatgttgtttcagttgtcgtttcatcatattgttacagcgccaagcagggggttgggggtgggccgtgggagtgagctagcgatggatggaggtgctggggaccgacgaggtgggggggatctcgtgggtgtggagagcggaggcggttcctttcatcttcgtgtgggggcgggtgcagtcgggttcccatatctacttttttttatatatttttttctttctcggtgcggggcgagtgggggcgtgatttctacaaaggcttggcgtccggacgctagcggctagcgttcagatcggacgtccggacgatagcagtaccgttttttactttattccaactcatatctttgtgagaggagaagaaaaacagcttcactcgtaaagctgttttagcaataagtgtttgcaaaaaaaacagctcacaaatgcttatgaaactattgtgagctgtaccaaacatgtcctaaaccatgaataatttttaagccgttgagtttagaaatttaaaaaacatataaataaatttgtcttaaaattaattttataaaaatatacataaatcattttgataaaatatttttataaaaataaaaagttaaaattagattttagaccatattagtgttctcgctttgttttataggtacagagtatatgtgaacgcgtctctggcatacgccagcggtctctgtgaactggaaccaacgttgatcccaccagcctctcttccagttccagggatagtaccacggaagaaagtggccacaggccacagctggaaataaatccactgacaggttggccttcacagcagaccccacctgtcattcagcagtccaccacgaaggcacgccgccggagccgggggtcaggatgactcaggtctcaggccgtcaggcgcacgcgctaaccacgcacggtcggcgatggaaagtccacgggcgcccaccactgacaggcctaccccaatggcctcgcgcgcacactgacatgtgggtgtcggtgcggcggcggccccacctatcgtttggctgccatccggctgggcgtctggccgaaatgaacgaaacccttcgttttccggcgacagcccgcaccgcacctgctcggcacggccccgctatataacaacttgccgctcttccgccgccacgtgctcgctgcccgccgccgcgccgcattcgcattcgcatcgccgcaccgcgctgccgaggctggctttgcttacttactagacggacgaggagtggattggagtaactagcagcaaccctagcccggcaggccccgtcgcgaaaccctaggcttcgccggcggcggtcgccggagatggcctcctcgccgccgcgcgccccgcggcggtttcttttcgacctcaacgtcgcgcaggaggaggtcgaggaggaggagcccatggagacggaggtgcttgaggaggagggagcccctgccccggtggcgcagcccgaggaggctgtcggcgaggaggtcgctgagcaggtggtcgagcacgcggtgcctaccgtggaggaggaggagcctgtggaggaggtgatcatggaggaggagccttcggaggaggtgatcatggaggaggatgaatctgctacggcgccggcgggggaggtgattggggaggggaaggggaggaaaaagaggatagactacgaggtcttcgtgtccgggcttccgcgggacgccgctgaggaggacgtggcgaaggcgctggcggaggccggagatgtcgaggaggtgcgcctcgtgcgggatccagcggaccagcggctgaacaagggcttcgcttttgtccgtttcgccgccgcctggcaggcgcgatgggcggccaacgacctccgcgaggctacggtattacatcgaatcttaccaccgcgatatatagatttgcatcgattgctagcttggtgaacttgggcaagctggttggggaaagctgtgaattaactgatgtcgaattgattgagtcttttgctgatttccagaggcgtttcattttatgctagcggttggggaatgggcttgattcatttttacttcagaaactgataaagttaggaatttgaaattttttattgctaactactttgagattagatgcgtttgtttttggattgttgctatcctggatttagattaatggacgtgaaatcaggtactctgagttagcaatttggaatctagagctcaatgtgcggctttctcaactctcaagtacaagtgtacagcaccctgtttgtcaaggcggtactctgagttagcaatttggaatctagagctcaatatgcggctttctcaactctcaagtacaagaccctgtttgtcaaggcatgatactgtaggagatcacaaagactatgctcttagaaaaatgaaatatggtgaattcaatgtagtactttagtgcatgtacatcagtagcacctttttgtagttcctagccacttctattctcggtgctaagaatctaacttataatatatttttattgctaaagtgaagttagcactggttgaaacacttagcattgatggcatttgttgccatgctgacatccctgctagtttacctcaaagaaaaaatagacatccctgctagttcattccatctcgtctagcttctcgccagcacccttgggtattattgctcttagagtggaatattattatgtttctgcattgtcatttaactttttaagttctataaaagatcatattatctgaatggttgacattttttaatgttctggttatctggtatgaacatatattgatggtgtattggtgttggtcaaggtctagtttgactgacaccttttgacacaatttcatatactgctacggtgttacttgaatgaactagtcaactgcatttatcctgcacagctagaattatctataatttaatgtgcgtagtaagtagtgaacaaaaatatgaaaaaggaatgatgttggaaatgactttggttttaaagaaccatgggttcatttatccattccagaggcaaataagcaaaaggaatgcctccacttgaggctagatcagtaaaaaggataacttttgtgtttgtagccggttatgacttatgagcactgctgacatggtaaaagctcactccttttatcatctattcagtttgagttagtaacctgctaagtagcaagtgtaatactaaggaagaaaaagaggatatcatgtacttaaataaatatgaattcaatagttcaatactctgccaacatgtgcagaaggccagcctgcatttaaatttagttattgttcatgatctgaactactattccactaatagtaatgctaggaaaattaaaggggctaactatggaaatcctagtttcgtccttgtctagggtctagttcacatagaagtatcctaatttagcatctttttaaatatgatgagaggtagcagtatgattgctcaacttttatagccataaacatccatgcactctttgatgcatgcgctgcgaatatttgtgcaactgttcaagtccaagttgtggcatgttttaaaggttcacctagtcgtccaggcgagaaaattttctgggtgtccgggtcgcctagctatgtgggcatattgcgtcctcttttctcgttaggcgtccgaggcctcaccaaggaggctgtggcggttgccttactcgcaagcgtgtttagcgaaaagcgcccgcgcgggaaagaaatcaccccttccgccgttccctatttgcgcgcggaaaccacgcggggaatactggaatagagagggattgagggaagataggggaagactgaggaaatatatggcacgtgctggctctgttcttccctgtgcgcttgcagtgagttgccaccgacgcatccccgtgccctgtctgtgtgcctggattgctttgatttcatgccgtccacctgtctgtggcgcgcagctttgatttcgcgctatctgcgcggacccagggcaaggataagtggtgggctgcttggcctgcctcctcgttggccagaagctctgctctgtttttcacttttgccagctcgagcctggcttcctatcaggccggattgagccaagtatgtctctgctctctctttcttcctgtcatctcaaagggtgaaggtttcctgtgccctgctgttgcttgtctacttcctttctttcttagtgctttgttttatagatgctatcctcttcctatggttctttctctgcctctcctctgtttgttatttattctatggatatagatgtggaatgaaacagctattgagagatgagagatttccgatttgatattttgctattttagatgcatattgaaagtgctattgagagatgagagattcgatttgctattttatgtggtgcactggtactcaagtagcactacttactatggtattacatgctaagaattgaccatattgaggtatgatttgcttctagattttagtggtgttatatattaatatttttaaaatatggcgtcgcctaggcgattgccttattcgccggcggctggaaggctcacctcgcgtcctcgcctcaccttattgccttggagacattggtaatcatgatgtttaaacaaactattcactgaattgtcagcgagagtgcacatcccattttggttatgtttaattatccctctgaaagtttgttgaatatgatgtatccatttctctctcaagtgcaactggaacagcttcaattacatataagcaatttggtgaatagtctcgactatatatttcttcactggtacaagcatacaaggcttgcatttttcctactatatgtccattttcctgctaaactattttaagtaatatttccttttcattgtgaatttgctattgtaatgcatgcttgtatccatatattatgaatgtgcctacattggtttactaaatgatcaggtaacatttatttactggtacttaaatttccagattaagggaaaagcttgtggaatatgcaagaacagtgaaaatgagactcttcatgtccgaaatatatgctttgattggtcaaaggatgatgtaaggtttcttgcttatttggtataatgtatgttaaagtatgattttgttttatataacagttgatccctttttttcagttagctgagaaactggaacctttcaagttggaaaacttggatagaattaatctaattgagcacccagaaaaaaagggtaaaaacagaggctatgcatttcttgacttcaggactcatgtagatgctgtggcagcttttgtgaaactacagaaaagagatctgtatcttggaactgattttagagcgcacatatcattttcaaacactctgtcacaagacgatgagatcatggaaaaggtacagtaacaaaacatctataccttgtaagaacttgttgcaagcacagcatatattacattatccttcttgccttttacaatgtcttcaattttgtcatgcaatgcaggtgaaatctgttttcttggatgggttaccacctcactgggatgaagacaaagtgagagaaatgttcgggaaatttggtgaaattgatagcatacaactggctagaaatatgtacacagcaaaacgaaaagattttggttttattggctttacaacaagacagtcagctttagactgcattaagatggtcaataaagatggtgttggcgaaggtagtggaaaggtaaccactttagtgagccatttatttggtctgttgccatttcttaccatctgatccaaatgtctaaccagtaaccactatgtttgaatttacaggttctcataaaagctagtttgcaaaggccaaggcatgctttcaaaaagaattcctggcaaggctctagttccttgttaggcgtcagaagaggatttgtagataaaagttatagtggtagaggacaccactcagacagatataggcattatagtcctgaaaggcgttcatatttagataatcattctcgccgccaccgctctattgatgttgaagaaaggcatacttctatgcgaggatacagagcttactatagaagggattctccagttcatggttcgtttccaaagtatacaaccaaattaacttgtttccatcttcctttctctctctgcgtgaattaacagttattttgtatgactggtgtagcctcaaactataaatatggacggtcacatccagagacaagaatcagggaagaatatgatgagagacgatacactagtaaatatccaaaacacaggcaggcaatgcatgaaaccatggagcgggatgcatactgcaggaacaaatatggacattcataccaggagagggcacatagaacttgcccttgcccagaatgtaacttgagtggtcaaaattgcagttaccccaatggcgaggaattttctgcaatcagcggttgtgagcaggcatactacaagacagtaagtgcaaaagttccgttgcaagtattttattgccatcagctagatgtttattgtcatatcgttgctgcttctgtttcttaggaccgtgatctgacgccttcaacttctcaagtagcatctcattgtgaggattcttgctgcaaggtggtatataagcattacgtcatataatttctactttgttttggcttatgctaactattggagcttacatttcttagggccagcagttgatgcctaaaagttcttctgtgatgtgtgattgtgacgaatgctatgctgtaagttggatttatcattttctttgacattgagttttgttgaagcatggcatctcagcttcttataatcaaaacttgcattcttcagaatcaagagtcaacaccaagtccaagtgagcatgccagaaaaagatccaatcttccagtgcctcttcatcatcggcttgccaaacattctaatgagcatgggaggtatgtatcatgaaataaaatgtgcatcttttcctgctgctcgctcctattttccttctaatttccaagctgtaacagtatttcatgtttgctggcaggcatgtggatgatgcacattctgcttttgaggtggagtacaccgtcagggaaagccgaagtcggtatctctcttccaaagatgctccaagtactcactccaggaagcaccataggtcagcaagataagctgttaagtctcacaagatagagaaaatctagtagcggctcgcttctgatacttcgtagcatgtgatcgatagcatttgttaccccggccctgcttgcgtggctgacaccctgttgcggggaggaaactgcttgaaggacagcagtataccgtcccaagttataaccagatattttgccttgtctcggttctatgtattcgcgttcgatccctcgaaatgtgatgctgaactggtttgggtgcgcaaacctagaaattgatcttacagtagacaagtctcgttgtctggatattttaaagcttggagagcagctggcctaacaaaatatgtgatggaaacgtaccgagtggagctcataaacaacttgcttgagcaacgaaaatgttcctaaacaacctgcaaagagtcatttaaaacttgggaacaagaacttcctaccatttgtttaatgataccaattttttttttcgaggggtgcttgcaagagagaaatggcgacaattagccgccgagatggatcaacaatgatggtctgttaattacatctccttgccgagagagtctccaacacgtccctgtacttatagtggcttccttgatggaaagtgatccgggatccgacatcttagcccccatttttctacattcatccaaatccactgagaaacaaatggaccgataggagagtcacgatcacatcctggattagtgattaggcttaatattaaccgtagatctgattctgagattactatttactcatgtaaa

SEQ ID NO: 3483 - DNA, 3085 bp, Sorghum bicolor
gcggtgttctggaccggactggactggtaaacgccgatggattggatggacatggattaggtcgcctcgcggttcgtcctggccgagagctccatgctcatagcaccgtaccgtctcctgccgtgaagaaatggtcgccgcactttcgattcgtcaagatatgcacgtacactcacggaatgaatagtcaagactggatatgcatgtgtgcaagcgacgtacgcgtatgtacgtagacacagtgacacaagttggtcgatggtgaacaagtactcttaactaaccatacgcgaatgccgactgatatatgcctcttcttcacgaaactgccaggcgggtaaggtgacgtcacatgtaatacgttcccggccgtgcacgtatagggccttgtttagttcacccgaaatccaaaaagttttcaagattcttcgtcacatcgaatctttcggcacatgtatgaagcattaaatatagacgaaaacaaaaactaattatacagtttgtctgtaaatcgcgagacgaatcttttgatcttagttagttcatgattagacaatatttgttaaataaaaacgaaagtgttatagtagcgaaatccgaaaatttttcgaaactaaacaaggcctagatcaccctgctctataggccatgtttagattgaagatgaaatttttttatgtcacatcggatgtgtcggaaggatgtcaggaggggtttttagaaactaataaaaaaacaaattacatagctcgtcagcaaactgcaagacaaatctattaagtataattaatctgtcattagcacatgtgggttactgtggcacttaaggctaatcatggagtaactaggcttaaaagattcgtctcacgatttccaaccaaactgtgtaattagtttattttttatgtacatttaatgttctatgcatgtgtccaaagattcgatgggatggatgaaaaatttttgggtgagaaaataaacagtgcctaaagtgcgcagataaaggagactgcgggcgggtccagagtcagccggtcgcgtaggatcgagttcctggcctgcgacgccgccatgcccaggaagatggagccaaagtctgaacgagctaggtcttgtttagttcaatccgaaattcaaaaaaatttcaagattctccgtcacatcgaatcttgcgacacatgcataaagcattaaatatagacgaaaataaaaattaattacacagtttgtctataaatcgcgagacgaatcttttgatcctagttagtttataattgaataatatttgtcaaataaaaacaaaagtgttacagtagcgaaattcaaattttttcggaactaaataaggccctactattgtgcaacgaaaagcttgtgggcgcgtggcaaagcacgcaactcctaggccttgtttagtttcaaaaaattttgcaaaataggaatagtaccactttcgtttgtatttgataaatattatccaatcatgtattaactagacttaaaagattcatctcgtcaattccgattaaactgtgcaataagtttttatttttatctatatttaatacttcatgcatgcgtctaaagatttgatgtgacagggaatctgaaaaattttgtaaaattttttgggaactaaacaagccctaattaaccatgtgttccgatccgaggcgcgcgccacgggtggcgacgaccaagtgtgatacgtacgagtacgagtgcgaccgcgtcacgtttcttcgtgtccaagtctcatcacatccaagcggccgcttggcctgctggccttccagttcgcaagccctgacgtgaacgcctctatcatctcacacagatacccctgtccagtcatcatcacacacacacacacaagcaagcgcgctcgggccggtttatatatgaacacgtacgtgcgcgtaagtgtggaatttttagttggctgcttattacaataatataaagctggagaatcggcaaacgtcggttgatctccctcgatggtcatgacgcttacgagacacgaagcggaggagagcaaggagatggagggcctccgggcgcacgccgaggcgctgctcacgctgtcggcgcccgcgtcgtcgtcgtcgttgggcaccggcggcacgccgccggcgccgtcctcggccgcggcccgcagggccatggcggccgagggcgtgttcgagtgcaagacgtgcagcaagcgcttcccgtcgttccaggcgctcggcgggcaccgcaccagccacacgcggctgcaggcgaggatgctcagcgacccagcggcggccgcggccgcggccgagagggacagggcgcgggtgcacgagtgcgccgtctgcggcctcgagttctccatgggccaggcgctcggcgggcacatgcgccgccacaggggcgaggcgccgccagccgcgcacgacgacgaccccgcgcaggcgcagccggaccgggacatgccggacctcaacttgccgccgctggacgacggcagcggcggcggtagcggcgatggccaaggtccacaacagtcggattatgatcgcggctcggagcctcagctgcttaatctgcttgtatagcgtagcgtgcgcaaacgggtgcttgcgtggtgattcggagttgtaaatgattggtgacctaaattttggaacttgaacatgaaacggaattcttcgatgactagcttagtttagtttcacaggttgttcctggatttagtttttttccttttcctttgtaaagctattggtcggctaaattcatttgtttgtaggtaaaattgtgaatatatatagtacgtattatctacctccttgttgcgtcgatgctcaattggtggatggggatggagctctcaaatctcatttcaaccattattataaataattgttggtactaccaaaggggaatcagtaataatcgttgatggaatcacaagttaatgacacccttcaagtaaattatatcaatgatttttgaggaagtaagttatatcaataatgatttgcttgcaccactctttacgggagaagaggtgatggatgtgattttatagatggagcatcacaaaagtacttca

SEQ ID NO: 3484 - DNA, 7530 bp, Sorghum bicolor
tcactaaacacatgtactttgattaccattaacacttttgttccgataagcatatatagtaaaagtataaactcggactgcggggaataatagcatacatcccttgaaaattttacactaaggccttgtttagtgctaaatttttttttacaaaatagataccgtagtattttcgtttgtatttgataaatattgttcaatcatagactaactagaaccttgtttagttcactccaaaaaaccaaaaacttttcaagattccccgtcacatcgaatcttgcggcacgtgcatagataatgaaatatagtcaaaaataaaaactaattaaatagtgcatagataatgaatcttgcggcaccgccgtgcgcgtgcacggccagcatggagggcggcgtggcgggcagccggctgacctgggcacgggatgcggatgcggcgagcgtgcgcagctgatgcggctagagtttgttgcttccttctgcccctatccggtacttgtaccatacattcttttgaatgatgcaattctcatatggtttcactaaaccttaaccaaccaaaagtcctggtgcacctttatttggaaaaatgttctatatcacttaaatttttgctattaaaactcagacctaaaatatctaagggtatgtttgggagggattcttcaaactgtttccttagaaatagaagaaattatcaaacaaaaactaacaacaaggagagaaattggataatccctaccaacgatatgtgatctagattctcgtgaaacactctgcagaacaattctatgataaatcataatcagcttatgagaccatttggctaataggctactagattcttagaaaaaaatgtttttttttataaaaaaacatatacctaaaaatctgcttaaaaatcagaacttttaggcaaagtacaacataaacataacccaactgaactcgttgtacttaaaaatgattaactggaaaaacacgttggagagaagcccttgagatggcctagagaattctggcgaaactagccggtggctatttcgattcgatgaaggaaaggtgaaacgtttcaactcagaatccccgcgccgcaatcgcgcttgttaccgttcatcgtgtttctcgtgagaaagaggtctgattgtagcatcaaattaaactctctatctcacaacagagaatcagttcctcacacaaaagtgtctcttcaagaatcaaccaagacacaatcggccggggagctaggccttgtttagttcccaaaaaattttgcaaattttttcagatttcccgtcacatcgaatctttagacgcatgcatggagtattaaatatagatgaaaataaaaactaattgcatagtttggtcggaattgatgagacggatcttttgagcctagttaatccatgattggacaatatttttcacaaacaaacgaaaatgctacagtctctgttttgcaaaatattttggaactaaacaaggccctaataaagtcaacacaagagaaaccccatagctcaagtcaagtgtctccaagggtataccgtaggcaggcaggagaagctagctgagcaagaagaagcatcaaccaaaacagtaagagaagatattttctctcagcacaccatagcttagcatggcaaaagtatcatcatctgccaccgcagcacatccatggcatttttttttctagacctcgtgtttttattcctactactgctaggaggtggctgggtggggtggagaaatgacaaatccagcaggcagccacacccaccaaatcggacgatgcagggtgcccaaatcaggaaggattttaaggttaaccggctgccaccggccaccgccggtgacccctccgatccttgtcaacaccccccaccccactctctcttctcttctcttccatccatccatccatctatatattacccgcctctttttctccctccctccgccccacctccttcttcttcctcagctccgtcgccccccgccaccgccgcgcccgcccgccgcgccggagctcgatctccgaaacgccctcggccgccttacctgtaaaagccccacctttagctagctacctcttcttcccctagctttgctagctagctagagaaggaaggaaacggtagctgacagacagttgattggtggtccggggtacggtgtgttcttcagtcgtgaagcgaccgtacagtgggctagggcgttctctccgggttgcgtgcaggatggtcgtcaaggatcgggagtgaggaggagggcagctctgctcgtggtcgtggaggctaaatgtaccgcaagaacgactcggcactctcctgcttctacctcttcctcctctggttcttcttcttgaaatagaccaccagctcgccaggtagctactagctctagcagtagcagcccagttgcttgcgattggggatcggtcgtcgccgcccgggctctcctctcagctcgtttgtttgcaagtcgttggaagctagctagctagacgagggagatggagctggatctgaacgtggccgaggtggcgccggagaagccggcggcggcgatggaggcgagcgactcggggtcgtcggagtcgtcggtgctgaacgcggaggcggcgtccgcgagcgccggggccgccgcgccggcggaggaaggctccagctcgacgccggccgtgctcgagttcagcatcctcaggagcgacagcgacgcggccggcgcggacgacgacgacgacgccacgccgtcgccgcctcctcaccatcaccagcatcaccaccaccagcaccaccaccagcagcagctcgtcacccgagagctcttcccggccggcaccggcccgccgctcccgtcgccgcagcattgggccgagctcggcttcttccgcgccgacccgccgcgcccgcatcagcagcagccggacatcaggatcctgccgcacccgcaccagcacccgcacgccaccccgcccgtggctcccccgccgccggtgcagccacagccggccaagaagagccgccgcgggccgcgctcccgcagctcgcagtaccgcggcgtcaccttctaccgccgcaccggccgctgggagtcccacatctggtcagtacaactacacccatcgccgccgtcatcctttcacctaccaaccaatcgcttcttctgacacaaacgtttcctctcctcttcctgttcctccgaaaatgcagggattgcggaaagcaggtgtacttaggtgagcaaacagatttttcaactctaatttgtactagtaatcttgtattaaatttttttagagttggattcttgtattaatttcccgttaattatttcctgatcgatctcgaatggtctaaccgattcagtgatctggctctggctaatacaggtggattcgacactgctcatgctgctgcaaggtacgcacgcacagaattctgctctgaagtctgatccccgtactgaattctgcatcatatccactcctatctgaccggattaatcactcactctttggaattggaactttgcagggcgtacgatcgagcggcgatcaagttccgcggcgtcgacgccgacataaacttcaatctcagtgactacgaggacgacatgaagcaggtcggtcgatcgatcgatctagatgaatgttcttgcaacatcgactgaaacatctgcagctgctgaatatatatggctgtcctgtttggtgctccagcagatgaagagcctatccaaggaggagttcgtgcacgtcctgcggcggcagagcaccggcttctccagaggcagctccaagtacagaggagtcaccctgcacaagtgcggccgctgggaggcgcgcatggggcagttcctcggcaagaagtaagaacactttatttgcagactgaattatcttaccagatttaattttctcgacatcgctatatacttcctgcaaatgcatgctttgcctttcctcgctctgttagttcatgcttaagtcttgatcgagttcgtttagtagtactagtttatgtattgttcagtaatatagtataggttagatgcatgtatgtagcttgattagtggttgtttcaatcaaaagataaaaaggaattaatagagaaaaagggaagtggctagggaattcctcagtcctcaccggtgggaacgccatgcttgggtgcaggtacatatatcttgggctattcgacagcgaagtagaggctgcaaggttgttcatctttgattctgcaactcatatatgcaaacaaaaaaaaaagattttttctgtttttttatcatgtcttttgatttccaaagggttgagtaccgactcgattctcgtttctcttcttgtcattttaaaatccagggcttacgataaggccgcaatcaaatgcaatggtagagaggccgtgacgaatttcgagccaagcacatatgatggggagctgctgactgaagttagcactgaaggtagtagaacgttgataaccctttcttttctgcatataatcttcagatggcgttgataatttgctgataaacttattgaattgaaccaaggtattattgcataaaccgcttgaatttgtttttttttttgttgcttgtacagttgctgaagttgatctgaacttgagcatatctcaaccggcatctcagagccccaaaagagataagagctgcctaggcctgcagctccaccatggatcatttgagggctccgaatcgaaaaaaacaaaggcaagcgctaacgctaccttgacaagtatcaaaatcagtgaaattttcttctcgacttttattggctacctgatgcactattgcacaaaataatccaagtttcgctctcaccatgctagtgacgtaactaccttgcctcttgtggataagtccttttcatagtttacctccatcctgtttctacagctgttagtggcccggttttcatttgactacatataccaccctcacaagtcggaatcattaggaaaattattttatcgcatattaacaggtttctctttctgggtgatcacgacagttgagcaggacattttttttcctaccaaaaatgaattgtttaaggaattatagagtgtggacaacttgggagctgccgataattcaactgaaaatcttttgcttctgatgcagattgatactccctctgagctgtcgggccaccctcatcggttccctcttatgactgagcatccaccggcctggcctgctcaatctcaccccttcttcacaaatcatgaggttaggtgatactgaattactgaaatacaggcagttaaaaattacttagttcgctaaatcttacagttccaaggatttcaaaagtcaaaactagcatcacatggtttcgggtcaaattgttcgtgttgtgaaaataaatctgccatgcttgagtcttgaccatatgatgaacaaacagactgtgcagtgcagcctgaaggtgtactttcagatatcagatttttattaggttttttttttttttgacgagacagatttttattagttggtttcatccagttgcctttcttgtgtggctgtcaatgtagctcttgtcttacatcgcttgctcattttcttggattctagagtccacctgtttcctgtcgatttcagtgatgttaatgcgctgcacgatttttcttataggatgttgaatatcttgagttggcctaatatgggaataatagtactagcagctttatgaatacagagtacgtacatgtgtttgattttttccttcaaaaggaacgtcctagctagactggtgagtggtgacacttcaacgttaggctaatcaaatcatcggtcaactatgcctgccgcctgcacccaagaacttttcaataatgttccttttcatgtattgtctgttatatataaagtgtggctatttttgaaaccttccttgaaaatgaaaacaaaagatgatgacttgggcatttgccatcttttgtattggtacagtcattgaactagtagaagtactaagtttgctgtttttttcaaacaaaacattatttaatttaccaatcaaccggggtagtttcttcaaattgataaactctgaacctttcatgattcagctaactttaaggtcgttctcacaaatgtcttttctgattctattggacggaaagttgagcttgacgttttctgtccaactgaactgatggaaacactaatttggaacaagttccaacttaattgaaagccagatcgagctcctgcccatttactgttatcagtaaacatatatgctgaatgaacttctgttgcaccatgcagagtacatcatcgagagaccttaacaggaggcctgaggggggtgctcctagctgggcatggaaggtgacagcagctcctcctcacaccctgccattgccgctgttctcttcgtcatcgtcatccgctgcagcatcatcaggattctccaataccgccacgacagctgccccatcggcctccctccggttcgatgcaccgccatcgtcgtcatcgagccatcatcatcgccgctgagaatcaagaagccacactgtaaatctgctgggaagctggcatttttcccccctctgggcgttgcaactttttcggttttgcgccggctggggtggtttcttgtagtggatcgattggattcttcataactgtatttgcacactgtcatactgcccaagtgaaaatgctcctctctttacactacacagtacacacactgctgctcttggagctactgttgctgctagagattgactaacttaagcatctgagatactttgattgatctatatatacattgtgtagagaatatatcattgctgaaactattgacagaagtatatacaggtttgttccaggtcactcaccactagcttggtaatttgtaatctctgctacaagggttcttttatagctacgtcatgtaattctcttaatcttaatgaaacatgggctatattcccccatcgcggaaaattaacagaagtattatatacagttttcataaggcttcagagaccccctctacatgtggacaaagttctggatgattaatattccagttcctactttctttggctgtcgattcggttcttgtcgttcttgcttgctttgaaccaaattgcactgcgtactgacaagaaccgaatgcacacagttaacgagaggaaggccgaatggacggtgacgcatttggtgcaaggatatatgctactttctcggttctaaatcgttggttgttctgaattttctgaatatatgacttttgctatgtatctagatatatatatttttttgcgaacagtctagatataatgttatatctagttattacataacaaaaacaagaaaaaccagaacaacttctagagcaaattaaagtgagtagctcataactgtattgttagaagtattccattttgtcaaaaaaaatactgtattagaagtaaccacacatgatttcttttccggactggcataactgttgactttggtcattttgg

SEQ ID NO: 3485 - DNA, 4447 bp, Sorghum bicolor
tggatttcataccttctcacgatgccactacacattcctcacccacgtggttctttttgcttgtcttataagtcgtatttttctgccaaccagcagtgtaacagtatttttagacatgattttttagataagcgaacaagcgcgattggcgttgctaatggctagtagcctggtagttatcaatgaaggtggaggccgggcatatattatgcctctcttgcctttcttattttgtcctcttaatgtttttgttatgattacatatatgttcacattagatgtggagctcttctaaacaagtttgtggaagcccagctccatggtaaagctattccacggtaaatctagtgctctagatctatttttccatagtttagagctctcttaaacaagctcataagaccatctccaacagctcccctatccccaatccaacgaccatattgggcgagttggctcaaaatctcagctccaacagatcccccttcccatccccgtaaattggtgatcaccaaaaacaagcccaactcccctcaaataaaggggaagatgcaactccctcaatactataggtgcacgcgcaactgtcactgtccggatttttcttccgcctgtgcgtacctcggagctcgccgtcgagcatggcttgccgcttgctgcctgccgcctgagcgcccgtggttgccgccatcgctcgtggaggtgccatggaggggtggcgaccgtccagccaaagaaatcgaggaaggactgcatgtcgaggactcaaggaggacgtcagatccgaaatgaggagttggaagtgcttgcatggcggacgtgaggaggagaggggaggccacgacaggcgggggtgctcaggccgtgctcatgcttgtgctctatgggtggggagcggcggacaatggtcgtgcgctggagtgaggaagaggaaaaaaaataatatgacaagtggacttttgtattagaggagattattggtgatctgttggagggatctcctccaacagtctaaaaagctatattggtaatcaccaatatcattctattaaggccttgtttagtttgcaaaattttttatttttagctactgtagcatttcgtttttatttgacaaacattgtccaatcacggagtaactaggctcaaaagattcatctcacaaattacaggtaaattatgcagttagtttttattttcgtttatatttaatgctctatgcatacgatcaaagattcgatgtgacgagaaatcttgaaattttttacgaactaaacaaggtctaagatttgagaatgaaatattggtgagctgttagagatgctctaacatgttcgatttctagtggttttatggtcgatccatttgttcgagtattccacgtgccatgggcactctttacttctttagtttaccccggacaggctgggaccaaaggcccaatcatgatcacggcccgatccaagctagctcattacttttatggcccgtatacggtgcacggttacgtacagtggaaaagcagggtgcgctcaagcatatctacactgacatgcgggcccgtcatgagcacatacggataactaccaccaagcaataaaggcatgtttcccagcacggatgacacgtgggcccgaaaacttcgaccactttcgctatagcgcgaaatggccgaactgaccctcgaagaagcacagcgcgggcggaagaaaacacaccgtggaaactcccgcctcccgccgaagataacccgaaccccacccacaaagcgactgacagcatgggcccgcggcaccaaacccacccaagccaacgaagcagcccccgtaggctagccagagatcacgtactcctagcgcaaagcagcagcatgcggtgcgccgcgcggccaatgggaggcgagcgctcggatcggtgacgtggcaaaaaatttcagatcccgcgcaaatgcccaccgccccttgcctttaaaagccgcccccttctggcctcctttcccctccactcgcttcaaagcaacgcagcaagttccgtgcacacatccaaaccggcaaaccctcgtcgcgatccggccccaaggtactgcgatttggaaatccagataaaattgttttgaattcgatgctgctggtatggattgttgctgatggttttattggaatttggttctgtaggtctcgagatgaaggcgagggcgaagtccagcggcggcgactccaggtactttccgatttcgcccccgcttccatccattctcgttgtttttttggttttggttttgacggggatttgtttgtttttgctgaaggctttcggtgaagaagggcaaggctcagaaggacccaaacaagcccaagaggcctccgagcgcgttcttcgtcttcatgtcagtttcatattctgtggcgtttctcttgtgtaccgccgttgttttgattttgttctgattcggttgggtctggatttttcagggaggagttcaggaaggactacaaggagaagcaccccaatgtgaagcaagtctctgtggtaagcgttgtttcatccatgattccatcattcgattcgaatattcgtggtgtgctggtatggaacttgcgtttctgatgtttgtgtctctgtgaatggcagattggcaaggcttgtggtgacaagtggaagtccctgtctgatgctgtgagtttgcttgctccccttgcccattttaatcgtttgagactgcagttcgttgcgatgtgctttgttcttaggaagacgatgaatgtcccgctctagtttcgtctggattgggtcccctgtgtttatctgtatatcgtatatcatgtggttacttgctgcagtgttagatctgttcaaattccatcgtatgttgaattcgaattttgggccgttttgttcatgatatcaattcaaatttcaccatgcctcatgttttggaattgtaactagtggctaagatactagacggttatttagacttcagatctgtgtactagccgctgcctagtgctatcctcctttggcactgactgttttggttcaatggattgttgatactcgatactattttgttcaattcggtgttgaaatctattcgtccatagaagaattttgttcgtccatatgtttgtgtccatttatgtctgaaactggtactgagatggaacaccctctgaggttgtgcgatttctgaaatgcaggagaaggctccctacgtctctaaggccgagaagctcaaggttgagtacaccaagaagatggacgcctacaacaacaagcaggtacatcatgttccactccactcacattgctcggcagtgcctagaaattcgtctgtatatgatgcactttatgagtcatgcgtcatctgtcgttgcagtctggaggccccacagcgtctggtgattctgacaagtccaagtctgaggtgaatgacgaggacgaggaggttcgtgagagcaaatcctcctgagtcctgactcttccttgccttccactgctggttttgttttgtgcatcccaaacctcactgacaccgtccatttgaaactggttttgcagggtgacgagtgatggatgacggatggagggagctctcgcctgcccaagtgcttgcagtcagtagggaaattctcatcgtcgtgggcctaaccgggcttttgctgctccttttagcctctggaagctgtctgtctgtctttctagatgcagtagactagtagtagtggccgctcgttctctgagttggtagtcgcaagtgttgtccgtccctgaagtgatgcagtttagctggtagtgtgttcgcttcttcggcacttgaccgcttgttggaatggcatgggatgtttagcctgcagtctgtacttacccacgagcatctatgatgcctctgttttaacaatctcagatctcaatagatgcctgttttaagtctcagatctaaatagatggtggtattaattgctgacctcaatatgtgctctcttgtttgcatctctccaagctatgtaatgctgattctgtgttgctctatgctcagcctgcgattgtgtacgatctgaatgcagttgattctgtgtttggtcgtcgattctgaatattgtgcaggcatggctagtttgctatataagagtactgttatcttgtctaatcgaggtgtacgatcattagaaaaactagttttttactgcttgggtttcaccctggtctaaccgtgtcgctggaatggccctgagagtactcctatctcgctctcttggaatttggaaagttggaatggttggaatggaggtcggaggtgtttgctaggatctggaacttggaatgtgcttgtcctgggctgtgcacgttctgcaaaagaacttgaagaacctgtgatgtactgtttagttgctgattcatcgaatatttagatatatttatagagtatattaaatcaattatttat

SEQ ID NO: 3486 - DNA, 6565 bp, Sorghum bicolor
tgaaatgctatgatataatcaaatggtgccaatttattttttagaaactctatgttttagagaaaatagtactataaatataattctttgatatggaaacttcaacatcttgattgtctttgttgtagggttaaactactgtttatgttatggtgtaggataaaatatataataaggactacagtttaaatttagcacatgcatggataacaaagttgtatcaacaattatcttaaaaagtgaaagtcaatgtaaagattcgtgcagtatgagctaatataacttaaaactatgatttcaactaaatactatttattattgggcaatattatggtactcctttgactattattaggagatacggagtaataccttaaataaatctgagtcaccattttttagccttttaaattaattagttaattaatctagaaaaagtacaaaatattctcaaatccctcttatgaaggtactcttatgatggtcatttttcacgcgcatggccgtatccttccttttgtgtgcctcaactataaaaatatattttactgtacatacatgaaaaatatcaacaatgttaataattgagccataaactttactgatctaataaaataagtacataaacaagtatacatatagttatttaggagtaccacaacaaagctctttattattatcattttattttagtacttaagcttaggcctctttttagagtttcgtcgtagggtcctgaattttcttggatggccctgctggctctttgcacaccctgcacccccgctggtcgatctaggacggtagttagcactccaaacattctttttctaaataaatataagtacacatgagatcaatacaataaatcgttggctctcaacctgtttcagtcgcctcaggctacatagagtcatgcttgcggcagccatctgaatttgccacacttaactccatgtgagttgtttcccgttctctgaagtgaagacatcctatcaatatcaatctcattaagctcatgatgaattaattaattaaaaagcatagcaaaaaaaatatacataaatcatatacccccgcatcacacgtggacaataatttagccggagcagttcgtacctactcatatgaagtagacacgtcttcacgtagttaacatgcatgaagatgatttggcatccatcattagcagtagcttcatatatacctgagccacacacccacacccacacttattagcaactaataaccggcaggatgcagctagcgaaaacctgatccttggctcgaactgcagaaaacctccgatggaaactccagaaactgcagaaacagtcagtaccaaaagctagctcggcgccaaatttatatagcagcggccgggcagaagcagaacagggaccggacctgaacgcgatgccaccatccattccatggacgccggacaggtgatgtggccaccttgttcacttgtgaactgttccagttcccgaggctaacagctttgcttcctttccgagtggagatgcacagccgggttcgcagcgtttctgtgtctctttatctgccaatcaattctgcgcgaataatgaacagatagaagcaaaaaaaaaaaaaaaaaaaacttcagcatcaccaggcgcgcgcggtagagcacgcatgcatggcgacaaacgccagttaggttggattccgtcaccaaaagcacgtacgtacgtgcgtccgcgccgcgcgtgcacaacgcgacgacgaggaggtgaggttcacacttcacaggtacgtactgcgctcttgctaccggcgtagctgcttccagtgcttgctatatatccgtcccctcacgcgtcgagtcctgcggacgccgtccactctgctccatcaccccacccacatgccacggcctcaccacctggcctggccggctgtccacgcgtagtcgtcgtcactagtcactactcacactcagtagcagcatccatcatccacgccatcgatcggccatgccagccgagctctcgccgcgcctggccgcggcctcgtcgtcgtcgccgtcgccgtcgccgtccccgtccccgtcccctcacggcgcgccgcggatcatcagagccggcgagcaagacgacagcaggctgcctccgcagacggcggccacgacgcgggggaagcgccggcgcggggcgtggcacccgcgcgcgagtagtagctgggggacggagtgggaccgcgcgtacctgctcgcctgcgcggcggggctcctggtcgacccgctcttcctgtacgccgtgtccgtcagcgcgccgctcatgtgcgtcttcctcgacggctggttcgcggccgcggtcaccgcgctccggtgcgccgtggacgccatgcacgccgccaacctgctgctgcagctccgggaagcgtgctcatcgccgaggcgggaagacacggacgaggagggggcgcagccggggcgcgacgacgcacgcggcgccggcggcgtgccgcaacgggggaggtccaagaagggggttttcttggacgtgctggtcatcctaccggtgatgcaggtgcgccgtcggtccctatccgtgcatggttctcgtgtcttctttgaaaactgaaatgctagtactttcatctgtctcttcttgggcaaaaacgatagaaaaggagaagaatttgttggtggacacatgatgaacgcaacggattttttttgtgctatctgaaagattgaaaatatatttatttctataacaaatactctgtactcatcatagttaaactttccggagcacgccattttagtatgaatttcctcggtaagcaacgttccattccatactccatactgacagattggaaaccttgtctaaaaaagggtcactgaaacaacggagaattttggagccttcgacattgtcaacgtccattagtccctcataaaccacactcctaccttccattccgtggcagcatgctgaatgcggcatcgcattttccccatcacattccgccgagcaaatgggctgcatgtgatccaagactttaccgtgtacatcgtcctgctggggacaccagcaacgaagagcattcaacccattttacattctgaagaacgaaacaaagatcactaacggattactcagaaaccttccaaccgaattgcctaagatgaagccacaggccagacttttcacatgctgccgaatgccgagcaaatagctgcatgtgatccgctgctcctcggagcactgggcacgtcccacctccgccatctttctggcgactgccgctctggcgctctgcatccagtaacgtgctgcgacctgggatgccgattatttccagcggttttagagggtcatttcaagcagcgatctgcgcacgtacgaaagccggtttcgttttatcggcgtggcgttgcaggatgcatgcatgggaccattgtgcttgcgcaattcagtagcctgcaatgcatgctggacgatgccagattgggcccgttcatcaatcgatgtgaaccaaccaacaatgcgttccatcaatcaatgcagatttaaacttctttccaacgaggcaaaatgatctatgtactgcactgcaccgcaccccacttggaactgtggaccgtggacgccggcggcctcgtcatcatcttttcagtggtactaccagtaccatgcatgtcagtgatgcatgcatgtccgcgtgaccatttttgtgcgttcgcaggtggtcgtctgggtggcgtcgccggcgatgatacgcgccgggtcgacgaccgccgtcatgaccgtgctgctggtggcgttcctgctcgagtacctgcccaagatctaccactccgtccgcgtcctgcgccggatgcaggacttctccggctacctcttcggcaccatctggtgggggatcgccctcaacctcatggcctacttcgtcgccgctcacgtgagtcgtcccgtccgtcctctctcgtttcaccatcgtcttctcctgcggcatactggctgatgtgtccgtcgaagctaaactattgctcctcgacgacgacgacgacgacgacggcttacacatttcggtgaactcgtctagctcgtcggtgcatggaagtcaatagcatcgatcgtactccttgcccaaccaccgcatcctcccaaggctaacaaaggcaaacgtgaccaggcattttgtcgtgaatgcacgagcatcttaccactaatggcttctcggcgaaagacgacgcctgcgatgccatgattctgtgacagctaggcatgccattcttggttgcaggcggtgggcgcgtgctggtacctgctcggcgcgcagcgggccaccaagtgcctgagggagcagtgcgcccaggccggcgggagcgggtgcgcgccgtgggcgctggcgtgcgcggagccgctctactacgggcgcggcgtgaccgtcggggcggacaggctcgcctgggccggcaacgccacggccaggggcacgtgcctcgacagcgccgacaactaccagtacggggcctaccagtggacggtcatgctggtggccaaccccagcagggtcgagaggattctgctccccatcttctggggactaatgactctcaggtgagaatgctggtcgcgcagactatcgcttcgttattggcccgatcgacgatgcatattatggatccatggtttcagtaacttggcctggctactgattgtgtgaatttgtttcactgcttctgctggtgctgctcagcacctttgggaatctggagagcacgacggagtggctggagatcgtgttcaacatcatcaccatcaccggcggactcattctcgtgacaatgctcatagggaacatcaaggtaataataaataacgaagcggtcacggtcactcaaaatagggatgagggggtgcatgcatgtcgtctcgctgtacgatcgtctttggctgacgatgctcgatgcatgcgacgcgaacggcacaggtgttcctgaacgcgacgacgtccaagaagcaggcgatgcacacgcggctgcggggcgtggagctgtggatgaagcgcaagaacctgcccaggagctaccggcaccgggtgcggcagtacgagcggcagcggtgggcggccacgcgcggcgtcgacgagtgccgcatcgtccgtgacctgccggaggggctccgccgggacatcaagtaccacctctgcctcggcctcgtgcgccaggtacgtagcaaacgcacgcaccgacaccgacgacggggcgtgacgtctcgtcagttttggccgtgcacgtactggtgcatcacgtgcccgtcgcgtaactgatgcggcaagcggcacaaccgcatgcaggtgccactgttccaacacatggacgacctggtgctcgagaacatctgcgacagggtcaagtccctcatattccccaaaggagaagttgtaagcgcaacgaccaaccaacatggctggcttggtttccctttactgtctgcaaattaattttggccaaaaaagaaaaaaaaaaccctccgagattatattgatctctgtttatgcctcgtcagattgtcagagaaggggacccagtgaagaggatgctgttcatcgtgcgcggccacctgcagagcagccaggtgctccgcaacggcgccgagagctgctgcatgctggggccgggcaacttcagcggcgacgagctgctgtcgtggtgcctgcgccggccgttcctggagcggctgccggcgtcgtcgtccacgctgacgacgctggagagcacggaggccttcgggctggacgccgcggacgtcaagtacgtcacgcagcacttccggtacaccttcaccaacgacaaggtgcggcgcagcgcgcgctactactcgcccgggtggcgcacgtgggcggccgtggcggtgcagctcgcgtggcgccggtacaagcaccgcaagacgctcgcgtcgctgtccttcatccgaccgcgccggccgctgtcgcggtgctcgtcgctcggcgaggagaagctccgcctctataccgcgctgctcacgtcgccaaagcccaaccaggacgacctgctgtgactgagacgcgacaggaggaagggcttctgttcagcgagttgaagcagaatggttctctagagggtcttcagctagcaagtgagtgaatggcagaaagaactcgagcattctagctccatgtgtacggacttactggttgagtcggcattgctactggtttagttgactggttttcttaaggtgcatgtgcagcagcctaataacagttactccatcccaaattataagacgttttataatttgggatggattgagtacatgtttacacgctaggggggaaatgcagcagattctcatcaggcatataggcaccaatataaaggtgataagaaacctagcaaaaatatatacttgaccaccagtggcaacataactcaaaactgacagaatcaaaacagataacatattgccctattgccctacatcaaaaacaaatgcatatgtccaaggcaaaacgaataacatctgaatcgctcagtgtgcatcacgaggtaacaaaa

SEQ ID NO: 3487 - DNA, 4127 bp, Sorghum bicolor
taattagatttaaaagatttatcttgcgatttataagtaaattatgtaattagtttttattttcgtctatatttagtacttcatgtatataatgtaagatttaatatgacgggaaatcttgaaatttttttggtttttgaagtgagctaaacaagaccaagtcaagagcagatcgtgactgtgtccaacgccctgggcttgtttatatttgtatatgataattattatttaattataagctcactaaatttaaaaatttgtctcacaaattatagataaactatacaattacttattttttatttatatttaatgttttatatatgtgtctaaaattttgatgtgtgtatcgatcgttttcttttatgcaatatcggaacaagatatttttgttagaatagtccagctttgattatgttagattaatctctttcagcgcttgatagaaacacattatgtatttatttatactcttctacttaatacaatggtacacaaattttttgcctattcgacaaaaaaaagaggagatcatgaaggctgccttagatttaatttgctcaggatctatcgtcaatgaattttcaaaggacggatgccttggtgtgatgatctaattagctgcagcatgttcatcttcgtgtagcttacgcaagtttgtagcgacagaataagatttttttttctggaaagtagtatatatgatcatactgaaaataatcttatccaaaggacgaacgtgtgttttatagcagagtaatcttatagtggtactaaaaagaaaagttttatgatcgaccagcttggacaatcagaacttgacagctcatgcgcacaaatgccccttattttcatggctggcaagtgcttgaactttgctctaatgcaatttagagagtctccaagagttcctttattcagtttcagccccatagagcaaaagttaaggtttatgtaacaaaaatcaccacctcgctattcaacatcctatattaagtggtattctaagttatcctctcttcctctcaaattttagatgtcatgccaccctactaagtatatttgagatagggtatttgttggagaaggtaaatatttatagaggattttttgttagaatatgagtatgtgaggatttaaggaaattaagtttaggagaactcctggagatggtcttatagaaaagcttagaagtgaagggtaattgtggtgttcttgttttccttgctgtgttgatcagcctcttagctgctcatgattgtaaggtcgacttaatactccctctatcttgaaatacaaggtactcctatatgaatattttaaaattatttcaaattataatgtattttgaatttttgaagccactatacgtttctgcatttcaaaccacatccatgcatgactttgaaacaccatttttgtctaaaatgattcatgcaattgctagttgcaattattgatatgcatgcataccttttcaaactatgagttacagaggaattaagaaattcaacaaccgaactaactaattagcgaggggcataatgagctgagttagtttttttttttgtcagacttgttatttagtctcaaaattatctgaacacgtcgaattttaagggagttacttgattcaaaattatttgaacacttcaaattttaagggagtacccttgattcgagaaaaaaaaagaaagcaatgaggccgacgatatgagacggagataaggataaaaaccgaatggaaatattctgaacgttttcgatcgttttagttattttctttattatatttaatgtttatatgttcaaagagaaaaattttgttactcggacattattggtcgttgatgcgcgcatgcattgaattccctcgccaactacccactgcgtcgtgaattcacgacgctcgcgttcaattctccatggcgccagtctggtagcttctgctcctgttatttatacccacgcgctgcctgcctgcctgctcatctcatctcgctccaaacacagtccacagtgcaccaccacttcactcagcaacagaggagtgagcaggatccagcagcagcaatggaggcgcggagatctctcctggcgagcttcgtgctcgccgcgttggccgcgcaggccttggtggccgtggtcgagtccagggccagccccatggagaaggcaagccaaggtacaccacatcttctttcttgagagccaaggtgctgtgtccaacaatgtcaatgttgagcttgcattgatgtgtttgtgctgcgtggtaccgttgcaccgccgcaggtgaggacgtgaagaagccggactgcgtgccggggatggacccgcgctcgttcccggggaccggcggcggccacggcatcacgcccgtgacgccgtcgcacggaggctcaggctcccccgggacgacgccgtcccacggcggcggcgggtacgggccaacgccgtcgcacggcgggacgctgccttccccgtcccacggcggctccggctcctctccgacgtcgccctccaccggcggcggtggctccccgtctcacggcggcggcgcgtacggtggttccccgtccacccctggcggcggcgcgtatggtgggtctccgtccacccccggcggcggcgcgtatggtgggtctccgtccacacccggcggcggcggcgcctacggaggcgggtccccatcgcctgcccatggtggcgcctacgggagctcgccgacgcccgcgtacggcggcaactccccctcgcacggcggcatcgggacctcgtcgccgacgtcgttcgtccccatggacccccacagcttcggcacctgcgagtaagccactgctgctgcccatggaatacatacatctactacatgacgcgtacatgcatgtatgcggtcactgatgaacaaattctcattgtctactctccatcatcgatcaatcgagcagctactggaggtcgcacccaatggagatctggtcagcgatcggcggccggttcccgagcacgtcgtcatcgatggggacgatgagccacttcttcggcgcggcggcgggcagcgtgggcggcgcgaacatgatgagcatccaggacgcgctgggcaacacccgggcggacggcacgggcgcgctgctgcgcgagggcgccgccgcgctgctcaactccatgacccgcgccgggttcccctacaccacggagcaggtccgcgacgcgttcgcggcggccgccgcgggcgggtccgacggcgcggccgcggcgcaggcggcggcgttcaggaaggccaacgagggcaaggcgtagatcagagagagagagaggagtgctgcatggatcgatcgagcgtgcctgtgcatgtctatttgttggtttgatatgggttgtgtgcgtggttttgtttcagtgagcacaccgacctagctgctcactgcaattgtgtagttgttggatcctgttatttttgctgttttttttttgtcgtgtggatcgatcgaaggaagaatatgaatgaatgaaacgaactgcaactacgcagtatcgtcgtagctgagctgttactggattcagtatttgattggatttcggtgttgagatcctgtttcaggcaaaggcaaggccacaattgcaaagaaatgactagttcttcttggcgctactagttgcatcgtctttacatgcatcactagcaggtaattagtcaaacttaaaaatttataaattaatcaaatttaaatttgttgacttgggacggagagagtatgtaaaactatttaaatgtgcagaaatttttggtgttagaatgttgtcagaaggttcccgccaatgtgcaggtgaacaacgctaaggccttgtttagtttatttcgcgacaccgtagcactttcgtttgtttgtgttaattattgtctaactatgaactaactatatttaaaaaattcatctagtcaatttcgaccaaactgtataattagtttttatttttatttatatttaatacttaatgcatggctctaaagatctgatgtgacggaaaattttaaaaatttttgaatttttggatggaagtaaataaggcctaaaaattagggaagcgcgaggttcttgggcaggcccattgcagcgatcagttgg

SEQ ID NO: 3488 - DNA, 2962 bp, Sorghum bicolor
  misc_feature (1040)..(1671): n is a, c, g, or t
aagtggttggtaatgtggcttgcctctaccctctatttcaaatcctaagttattttagtttttatagatccataacttttgtatgctactagatataacttatgtctagctacatagactgaattttaaaaagataaataaaaagatttatagtttagaacggaggtagtgtagaatttataaatcgatggtgaaaagtagccacattattaccagaccatggggccgagttggattgcgttttgtttgacatttgcacgcggagaagtggcggtccaccattgttggagaatggagacgcggtgagatatgatggcatgcatgtgcggctcccgtgccctcgtctgagtccaaagcggcacccatagcacggcggcggggcagctcgccatttgcctttcaactcgtcatcctcgtcgcagcactaccccctgcctcccgcaaacccacacagagacctgcgcggactctcctcaggatgcttgcggctctaaaacgacgatcgtcgtcttccatcccaaccaccgacactatggagtgcagttttcgtggtgcgccgttgtcagcttccaacgacacggctagtgatcgcagacaatggttaacaacagcagaaaccacatgacctgtgccctgtcatcttcatgcatgcgtctagatcttagtcagacacccaccaaaccttagcggggatccgtcgcgcacatattcaggctacctaggcgaggttaatgtcgtatgcacataggcagtcccagtctcacgcggcaatgtaatgatttccccttgaaacatttcctctgcatgcaagaaatatgcatcctctctgtcaatcaatataatgtgctactactctttgaaaacaaagaaacaaaaatgccagcatgtaaatatgtaatgcatcggccacttaagttgcatctaatctcctctcagtcgtctccatcaagaatgatgctccctataaatacagaaagactttccaagttagtaagcattcaacccctccgtacccgcttcctcccttaaccaccctttcnnnnnnnnnnnnnnnnnnnnnnnnnnnnnnnnnnnnnnnnnnnnnnnnnnnnnnnnnnnnnnnnnnnnnnnnnnnnnnnnnnnnnnnnnnnnnnnnnnnnnnnnnnnnnnnnnnnnnnnnnnnnnnnnnnnnnnnnnnnnnnnnnnnnnnnnnnnnnnnnnnnnnnnnnnnnnnnnnnnnnnnnnnnnnnnnnnnnnnnnnnnnnnnnnnnnnnnnnnnnnnnnnnnnnnnnnnnnnnnnnnnnnnnnnnnnnnnnnnnnnnnnnnnnnnnnnnnnnnnnnnnnnnnnnnnnnnnnnnnnnnnnnnnnnnnnnnnnnnnnnnnnnnnnnnnnnnnnnnnnnnnnnnnnnnnnnnnnnnnnnnnnnnnnnnnnnnnnnnnnnnnnnnnnnnnnnnnnnnnnnnnnnnnnnnnnnnnnnnnnnnnnnnnnnnnnnnnnnnnnnnnnnnnnnnnnnnnnnnnnnnnnnnnnnnnnnnnnnnnnnnnnnnnnnnnnnnnnnnnnnnnnnnnnnnnnnnnnnnnnnnnnnnnnnnnnnnnnnnnnnnnnnnnnnnnnnnnnnnnnnnnnnnnnnnnnnnnnnnnnnnnnnnnnnnnnnnnnnnnnnnnnnnnnnnnnnnnnnnnnnnnnnnnnnnnncgtacgccgcgtccacgttccaggcgctgctcggacaggacgcgctcgccctcgacgacgtcgtgacggcctacacgttcgggtgcctccacgtcgtctcgggcaactcggtgccgccgcaggggctcgtcggcttcggccgcgggccgctctcgttcctgtcccagaccaaggacgtgtacggctccgtcttctcctactgcctgccgagctacaagtcctccaacttctccggcacgctcaggctcggtcccgccgggcagccgaagaggatcaagacgacgccattgctgtccaacccgcaccgcccttccctctactacgtcaacatggtcgggatccgcgtcggcggcaagcccgtgccggtcccggcgtcggccctcgcgttcgacccgaccagcggccgcggcaccatcgtcgacgccgggacgatgttcacgcggctgtccgcgccggtgtacgccgccgtgcgcgacgcgttccggcgcagggtgcgggcgcccgtggctggcccgctcggcggcttcgacacgtgctacaacgtgaccgtctccgtgccgaccgtcacgttcgtgttcgacgggccggtgtcggtgacgctgcccgaggagaacgtcgtgatccgcagctcgtcgggcggcatcgcgtgcctggcgatggcggcggggccgccggacggcgtcgacgcggcgctcaacgtgctggccagcatgcagcagcagaaccaccgtgtgctgttcgacgtcgccaatggccgcgtcggtttctcgcgcgagctctgcacggcctgaggccctgaatgatcaatggaacctctgaagggtgtgtattgtgtactagtagtacaagtgttcaaattcctcctacattgctatcagcgttttgaacgtgggtttaatcatctgctcaagaacgtgcgatacaagatttttttttaatcatttatcactatatatgaatatagttcgctttgattttgttttttaagtccaacttttctaatgtgtactgtacaccagcatctataatttcaaatgcactgccaaaatatatttcaaaatataattaaatgttatagatgttagggccatttgtctacaaaggtgggggcctctctacttgtgtttaactatattttggtaatgcactaccaacaattttgtatttaaataagagaggtatgtttggcctcactacttctgtgtaccaaacttatggttccaaaatttaaactatgatgaagcgaaatcataaaaatggccatcaagtcccctttgataacatcgccccc

SEQ ID NO: 3489 - DNA, 4488 bp, Sorghum bicolor
tcaagctaagaacaaaactaatataacctcttaaaacagtcataactaagatactaacctccttcaattaaacggagatgaaaacctagcccttacagagtttacaattttatagaatttaaataattgtttaaactcatttccataattataagaaacaattgaataaaatttatgaatatagaaggatttctatgataatctttacttttaaatcaaacatgccttaatataaccatacttcataaatttactcacaaagattttgaaaagtattcatttgccatttatgattttaagcaatttaatgtatgaatttataatgtcttattcatttgaaaaaacaaaaactaaaactcatcaaaaaaaatataaacttcaaaatgtgctcatcattactctattgcatagatctactcataagaattctaaaaagtatttattttctattttttgaattttatacaatttactatgaatttacataaaaatttagctaaaactctctctcttgccctatgaaccctaaccctagtcctaagcaagaatgcatgatgaaccctagatctagagcacctctagtacaagaattgaaccaaaaaatcactaaaaaatagcatcaagctagggcactaactaaccttttggaactttctcaccaaagaaatgaagatcaaaacctcccccttagaaattgttcttgtctggtccgccaccgtacacaactcacgggagtaactgttcttgtctggaggtggacgaagggtatttataacaagattaacacaagcggtttataaagagggccgccagtgtaaatcaattagcacagacggtcctctatacaaaccgcctgtgtaaaaagacacatttacataggtggtgacgttacgacaaccgcctgtgtaaatggtatttacacaggcggttgttattgtaactcctatgtgtaaatggacagtttacacaagcggttgagttacgtaaaccgtctgtgtaaactcatttacacacaggcggttcttttgttgggtcaactgaattttctctactggcgccatgaaattgtgaaccgtatgtgaaaaaaataagatgccagcgaaaatgattttttgtactagtgcgagtaacagagttgatccgacgtgaagcacgctgtatagcgatttcaccgagtatgttccatccgagttcatctccaaatgctcctatctggatgttcactcagctggaagtctcgcagaaaaatcttcaatggagattatctgaccttaaaattgatgatggttttctacacatgcatgagccagtagagttgtgaggctcaggctcgagtagtcaggacatcgtatatgagtggtgcgagcaatgccatgttctatagtaaattttcaaaaaagatatttgaatattcataccatatggttgaattacatatttttgaaattcttaaaaacactgaaagccaagaatcataaaatagacgttggatagataatggagtaaagatctttgaaacaaatttaaggaaacagaaacagacgttataattttcttgataggaatattttacagcttggtccaaattggactgcatgcagcacgcatatactagtgtttatacatcttttccccaagtcgtccattcctgtttaagaaaagaggcaaatctgaatccatgcatgcacttatttttcaacccaaacagatacaagacaaggaaaacagcgagggacacggaaggaaagaaacaaacgcataaggaaaattcatggcaaccacaaaaactaccatgccaaagcgtaacgagcggtgcaacgtaacggttggctccccggatcctcagcagaggcgcttacacaaggagtggtgatgcgcacaccgggcgccacttccgcggccgcccggccccctctcttgtaagctacggatcaggccatttctcttccctctctgtctccaccactgggatcccgctcgcaaactttgagtagtgctgccccttcctcctcttctccattgtcgttgcttctctcacgcgcgcactgtcatccctgtgactgcgttgggagcgcaaccgtgtgcatagcagcccatggacgataaggagaaagagaaagagaaggagaaggagaaggagaagcacgccgacgggaccgacgttgaggaggaagaagaggatgaagaaggtaacaagcgcattgtcgtgcttggcccccaggtccccctcaaggaacagctcgagctcgacaaggtatatatcatcaatgcctgaatttcaatggtgtgcagcttttattgtaggatttgacatcttcatcatttatgtttctgaacaatcaaaactactttgatgatctgctacttgcttgcataggatgatgagagcctgaggaggtggaaggagcaactccttggccaagtcgacacagagcagctgggaggtgattgtaacctcttatttatcaccctatatatgctcatgttcatatatggatcgagccatggtgcattccagaacaaacgaacctttttggtgcagaaactgcggaaccagaagttaaggtgctgaacctgacaatcctgtcacctggcagaccagatctcgtccttccgatcccattccatgcggacgagaaaggctatgcatttgctctcaaggatggcagcccctacagcttccgtttctccttcatcgtctccaacaacattgtatcaggcctgaagtacaccaacactgtctggaagactggagtaaaaggtttggacctcacaggcgtaatgcatgcatgatttagtgtcaacacttcacatcagctttgactcgacatgctgtcatcgagaattcgcgaatcaacatatatagcacagatcacgtaaagggaatccgtctctcatctgatagtctgcttcaaattaaacaacagacatcattgtgaacttgccattttgttctctctttttggggaagtaacaacttcctatttctatagttcaagatttatttcaagtcaaagtgtgatttgcagctttagtgcagttaaataatatacttttgtctttaatcctggtgattagtaggtatccacgtcaatgactcagtcaatgtgggttcgggtggtttgggtgtgacatttagccactccatcacacatgaattgaggtggatagatgggcatctaaacaagcctatacaatcagttttagatgtcgtaatactgctaataatgtggtagcagctactatagaacagaaggaatggaactcaaccttaagattaaacatgatctatatatggaacaatcaggtaatcaggttcatgccacatctcatgtcagtcattgcattgctcatccaacgacaaagaataatatgagaagtcgagaacataccatctggtgtaggtgcagggttttcctctgtaacctttgtacaattgtccaaatgatgttgatatttttcaccacttattgcagtggagacccagaagatgatgctggggacgttcagcccccagttagagccctacgtctacgagggtgaagaagagaccacccctgctggcatttttgcaagaggttcttattctgctaaactaaaggtatttacatttaccaagcttttcctttgatgccggaagatgcttcaccaatcactaatgccgcattctcagtttgttgatgatgatggcaagtgctacttggagatgagttactactttgagattagaaaggagtggccagcaggaacccaatgatgtggaccaagggtactcgtcggagtatgttagagctcatagctaagccaagcagaaaatgtgctattgcttcaagaatgatccattcactatttcttcacctttaatcgcattttaatttattttgagttgtcattgtatgttgtttatcgcaaaaaaaactttttatttgcatatataatacctgtatggagatattcagagatatttatgtagtgttattgaacttctaaacctgaaactactgctgcacgaagggcttgttgtcccatttgaaacaggcctttagtcccggggctgtaagccggaacaaaggtttcaggactaaatatcccacctttagtcccggttcgcaggttcgggactaaatggaaactttagtcctggttggtaataccaaccgggacaaaagagctcgccactagctgacgtggcgcagccccttttagtcccagttggtattactaaaggttttttttctttatccatttttattttgaattaattttttatttttcttttcaattatattgttatccaatttattcttcgctgctattatccttatacattgcacatatacgagagcgttattattgcacacaaataaagtatgaaactatatatatatatatatatatatatatattatagagctatacatatacgtacatacacattaatttacaataatatacaagtaatcaagtgttcggccgccggttaaatgt

SEQ ID NO: 3490 - DNA, 15121 bp, Sorghum bicolor
tagatgttttcttttccattgcaaaatgctgaaatatttagatataaatatatcataactttaattttcatactatccatgtgttgcctcaactaaaatattgagtttcgtgactcttttaggacccttagatatatgtaattataatatgattaaatatagcaaggagttggtttccaacttattacgaattggtctatccactgatgattatgtcgggagagacatctctagattttccacattgtagtcctctcaaagcactaagtatttagacagaaatatatcttaaatttaattttcatactatccatgtgttaccacaatggaatattaagcttcatcacttttttgatgacccataatttaattctaattctactcgtcgatgatgactacagaaaacatctctaattttcacattgtaatccttctaggggtttgcaacatttatttagactagattagacaacaaactgtttaagattttaattcatagtttgatttgttgaaccactagttgatctatattttaataaaaaatgagttttgtttttaattcaaactataatatatttttatggaaggatcaatgattcagaagacaatactattgtatttattatttgttatttacatttatgagaaataaaaaaaacagaattgagttcaagaaggaaaagcggaataagaaaaagaaaacaccagataggaaactgagtggtgccggaatggagaaacaacgaaaagaaaaaaaaaactaaaaaacaacgtaaagaagacaaaataccctactaaaagacggagtcggaatggagaaacaacaaaaagaagaagaaaaacacagaactaaaaaacaacggaaacaagacaaaataccagactaaaaggccaagctgcaagcagagtccgaaggagagccaagcagaaaacaagaggctgaaaatcacggacacagagcagccgggaaaaaacagtaaaaggtggacaataaaaatatgagaagcagaaaaaaagaggaagaaattttagctccttaatattaggtacatatatgtgtgtgtttgtccggctactcgattttgagaatagaattggtatggttggttgttggagcgttgacagaatcgaaatatggaaacgatgagcaagacatcactcattgaagattacaagtaactgtagcactttcgtttatttatggtaattattggccaattatggactaactaggctcaaaagattcgtctcgtaaatttcgaccaaactgtgtaattattttttatttttgtctatatttaatactccatgcgtgcgtctaaagattcgatgtgactagaaatcttaaaaaagtttaagttttgagtggaagtaaacaaggccttggcaaaactgctaagctattactccctccatctcaaatttttataagacatttagtcaaagcatctcagtttaaccaaaatttgaaatgagggagtactatttataaaatttcaatatgcatcatttcatatttacaggtttactagcaactttgtaacggaacatatcatcgctaaacgcgagttattctaacttttatgactcaatacatctttgaatcagactccgtatcacgctatagggacgaactaattgctaagattctaaagtactgtttctacaatcatttactatttatatatctacattaattaaaactaaaagaatagcgaaacgtttccgctcttatcagagtttttgttttggaacaaaagaaaagaaaaaaaagctctgtatccacgaatccacatgcgtccaatactgatagacgtaccggcatccatgctgcgtaaactgtagccactcgcgcggcagagcccaggaggccccggccggagctctggatgagggtgtgtttgccgaaattgcctggagccaggagcctcgtcgtccggagccacagggccgcgagacgacgggataaggtgagcccagccgctgctgcgatgggggcgcgtgtgaaccccgtagctcgacgctgacggtataagactaaaggcaactaaaggcattcctcgctcaactttccgcagaccctcactctgccccttcgcgcgcgcgcacgcaagcacgctcccctgccctgccctgccacacagcaggcacgctcgctcgggtcgatcgatcgatcgagctctcccgttagcgcgcggaaggatggcggcgtcggtttccggggccaccatctgccttcagaagcctggctccaaaagcaggagggccagggatgcgacctcctccttcgcgcgccgatcggtcgcggcgccgaggtccccgcacgccgccaaggcgagcgtcatccgctccgacgccggcgcgggacggggccagcattgcgcgccgctcagggccgtcgttgacgccgcgccgattgccacgaaaaaggtatataccttgcagctcttgtatcacaaactgatggaatttgcgaggcagccatgcttattggcccgagctagcattttattggccggatacatgttaattgccatgacgtgcatggccgcatgggtacgcgtatatatatatatatagggataaaattaaacgcacaggaacacaggtaaatatatacggacgaaaagtctgaaaattaaattaaaaccgcataatttaatattttcatgtatgcacgctaaagtcacaataatatacacatagaaaccggtctaatattcacttgcatgcatgccatgtgtgttaatatattaatatgcatatttggtggctaatatattaatattaacctaacataaggacatgtgattgttacgcatatgacacatagattgaaaacgggatagacacaagtccatcccgtatcaggatctcccaaagcaaaaacgaacagaaaaccagcctatcctaattatacacattcgaaaacagatttttgcaaatatagaaacgggacagaatttttgcgtcccattttcatccgtctaggtattccgtcccgttttcttacgtctaggtacgcatgcgcgcaccatcacacatccccggcatcgagcgcgagctcatgtcttcccaccaaggccaaggtgatgtcctcgtaagcatggaaatgaacaagtactgcttatttccgagctcactagcatattatggacaattccaacctggtgagcaagctggtctccaggactaacgctgcccaccaaggtttgatgtttccattttgttttgcttgggccggtttggggaccgttccgttgcgttacagcatctttagtccttatgagcacctttggttcaatttaaacacaattattagatggagcccggccaacttaacatagtaaggcccggtttggttcctagtagatgttagctatctaataattatctcttttagatccaaacatttatagatagtagactagctaactattagccaaacctttagataacaactatcttattagctagaccaaatcagataatagtagctaataggtggatcaacaacccaatcttataaattagctgagtatccaaacacttctcttagataataggtagctagctaggctagctaatattactagctatgtgctattaactaggacctaagatactctcctcaactggaaaaaaagggaggccagtgagggcctttgaacattgttcggttaatgtgaaacaatgttcacaactgatcctaacattgtccactatttagaactttttatgctagtagattgtaagaactcccaaacatattgttagattttttttgtccaaaaaacattcaatttttcatcataataagttcttcttttttactccaaacgtgggtctaactagatttgaggatattgggcttgggtcacaattggtctggcccaaaaagacccataaggtaggcctgttcaagttgttggaggtgtttgggttaggaaaacaggcatgagcccaaataaatagcatgagtgcacaattattttttatttctcgtagtgtaatgtaggccgatggcttgagcccaacccaaagcctggttcaaatagagggcccaatcatgtcaaatgcgaagtgaaatttctttctcaactcaagagcatctccaataattgtaaaaagtcattaataaactaatgagttttctaagttactaaaaaagttaaaaacatatatccctcctttgcaccacgagttctagactatttccaaataccacttttaaactatttttccttcctcttcaaaattctagaaaaaaaacatgtgacaacagggtttaaactctagtgtgtaacgtcccactagactatcctaccaccagaccagtggccctttcactttgaaacctttattacaacaagacaaactgccgcacgactatcaatatagagtgatgccgtctattttgtggcgatactaattacctcaggtaagattaatttaagaattagataaactgctgggcagtacgtttgcccctatactgcagagagagagagagagagagagagagtccatgcccatggttttcgccaaaaccaggcgagcacaatgctatcatgctacaaccacggcaaagaatttttccatggctcagttgtcagtacatccgcacatacatcaagaatgtgaacggaatcgagtatggaatccaccacggaatggatagtagacaggggcgccatcagatcagatgcaccttggcaacctagccatttgattatcacggtaggatcgctcggccatccggcaagtggcctcgctcgctctctttgtgatgacgcagagctaaaaaacaagaaccggaggtgtaccttttcttttgccctatctatgcggctaaatccaagaaatcacggggacttttgttggttcagcaaggttcgcttcacttggcacaatcaactggactagggacgtgttatacggcgcaattttctttgcccattcgtgccaatgagacaatggcatctcttcacttcccccacaaattctaccgacaataatcaggggcgaactctggcttcaaatagaagcagccatttaattactagcaacagtggtggcaggcagacatgctgatgagaggtagtactcctgcttgtggccattgtttgtcttgtctcagttttgtccagtgtttgtgtcccaggacttgcaagtttcaacttcactaatgtgtttgcgatgtgaggtcagatatggatcctaaggtcatgccctcataggacccatatatatggccataggagcaagatccaagagcagttgtatgactttatatccttcccaattcttttttttagagcacgccaatccttcccaattcttatgaatagggattttgattaacaaaaatcttcctatgcctttttagattttcaaatataaacatcctctattttggatttctcacttgccaaagatgaaaaaggagcggggatataactgtacgtgggatgtaatggcactgcctcggtgtggcaatgcaaataatccactaaccctaagacagcggataatgttttaaaatacatttttgtcaaaccgggaagctcactctaatttgagttgccccattttatttggttacaacatggaacacgttgtgcatataggtttttttttttggtccctctacgtaagattacctagctaaaaatctagtttttgaaaattttcaacggacgcactccgtttttccgttgtcatacgtagctagctagcggtccacctcattcactgatacgaagctcccaacggcgtactccttttgcccaactgaaacgacggcgtcatcagtcgtcacgtccactccaccatgtgttggccctccgtccctgtttggtgtttatacatacagtagaagaatttggttaaaaattgcaagtgacagcccaaaagtctatataaccattatttaccgtaccgtgcgacgcacacatggatggtatactgtagtagtttaccaaagccacgcagcagagagcggctcgcagcggcactcgattcgtgcgggcgcggggcgcgtgcaatgcaaattaaacgacggccatccgtgcgctctccgtctccttgtggcttttgtgcagtgcagtcgccccacatggacgcacggtggctctgcttctcgcccgaacgccgccgtgacgggaggcggagacagacgtacggacggccgcgcgccgcccgccggtgctgctctctctccccttgcccgccgggggcgccttcttcggtcgccctgagcgcgtagcgtgtcaccaacaaccaagcagttactatggactcacgcttccaaaagaaccgttttttttttctcatctactattgctgctgtccagctactcgtataactcaagtgacatcacagtagtcaagaaacgatcggattgcacgtaagctcctgatgcgagaagacgacaatttaaataaaaagggggaaatcaaatataatccttgccgagatcagggccgggtcgtgtagtgtacctgcgctgcgatcccatcatcgtctaacgcggacgcaacgacgagacccatcctgacacgaccaacaacgctatccgcttcgcttgctttgcgcacccatgcgtggccatggcctgccggcgtgtgattgacagacagggtattttgttcgataaaaaagaataatatgcccgttcacaccttgagctagctacctgctggtggcaatttttcgtagcttggcttgcgaaaattccacatgttcatcccagcaatgcaaatgtctggccactagtccatctctggaacacacaatatacacaaaatgcgagtagcagagagagagagagagagagagctccgtccagtgtcgatcacaacaaattaaagctagtaaataaaagcctaacaacactgaagcaagcaagcaggcaaacgttcgtcagcgcgtcgtccttgcgaaacagaaagcgcgctagctagctgctgcaccgtacgtgtctaccgcgtcatgttgttgcattggtggcgcggtgcgtgcgtggatgcgtgttgacacgacagcgtgagtcacagaagcggcgccactggacgctagcagcattgatcaattcagttttcagttttttcttggctggacgatgcatcacgcacgcatggaacaagaaagggtgacacggccggcggtgccggtggtggttcttgcatgcattggactaaggctatgacgagcgcaggcgttgggtagtaggagtacaagtgtagttgggttggcatgccatttagttaccacttccaatttttccaagctttagttcatcgttctctcgtactccttacgtccttaagtaactttttttttgcttttacatcttatttgatcacttatcttattcaaaatttttatgtaaattataaaataaataaatcattattcaagtatctttaaaatataataagtcataacaagatagatagtatttatataaaagataaggcagacaatcaaacaagatatctaaaaaaaatacttattttagaatggagagagtacgaagcatcaagtacttagtactcctagtttggtgtgactgagggtcctgcggcaaattaaaatagcttcatggcattatatattatgacaaaatgcttcaaagacattttgttgtacaaaaagaagaatccgccacatcactagttttcttacactcagtttcactcagaaaaggttaattaaacagtgtgcgcagctaggggttattttggaaaacaaattaaatcaaaaccacctgcacgtacgtacgtacatacgagagcaagcagtgcacacatcaactagtttgtcctggatgtaacagaaaggggcgggccactgtaggtaagcaaaggcagtagtggctatggtgatgtggccgcgggcgtccggatatgttagctgggaaggggcaagcgtgtgttcacttgcttgacaccgtttctaactttgccaacaacaactactactatagtatacgtgtaaagctcatccagccatctgaacatgttgataaagaaaaaaagtcatcctaacacgatggatttttgctcaaccgattttgtgccaaaatgactcgtcatttattgtttacaaggggcaccccctgggtttgtgaaaaaaaagtgttacgtgcttgcaagttttgtgctgctgctgcgcacgctcgccctgtcacgtcatcactcgcagccaaggctcgggtgccgccgccgctgctataaatagagccgcgggggaggccctgcttcattcatcagtcacacacagcggctgtgttgtgtattttgtcactgatcagtgagtgatcagctgcctcgtgtttgtttcgtgtgtgtgctaatggcgcccgctcaatgtgaccgttcgcagagggtgttctacttcggcaagggcaagagcgagggcgacaagagcatgaaggaactggtgagtgagaagctgttttcttttttttttatgattaaattatgtgctgcatgctgttatgttacatacatacatacatacatatactgatggacggtggatcatcaatcagctgggtggcaagggcgcgaacctggcggagatgtcgagcatcgggctgtcggtgccgccggggttcacggtgtcgacggaggcgtgcaagcagtaccaggacgccgggtgcatcctcccggcggggctgtgggccgagatcctggacggcctgcagttcgtggaggagtacatgggcgccaccctcggcgacccgcagcggccgctcctgctctccgtccgctccggcgccgccgtgtccatgccaggcatgatggacaccgtgctcaacctcgggctcaacgacgaggtcgccgccggcctcgccgccaagagcggcgagcgcttcgcctacgactccttccgccgcttcctcgacatgttcggcaacgtcgtgagtatttccttccttcgaccagcacgtcgatcgtcggttccattttccgtccgtccggcttgtggtcaccgctactgcttgtcccactagccatggatgcctagttttgcgcgcaatctcatcgacgacccatatcccatggtccatcctccatggctgccgtgtgccgtggcctggctgccctggcctggtgcttgctgccgccggacggatgggtccaccaaggctggagtttttgtctgtttgccaggcgaggtagggccagccgtcgtagggcgtgtgccgtttccttgggttaaacgaacgtggttggggccttgggccttgggggttgttggattattcggcccgtcaggccagtcatcatcgtgcctactacgatgtgtatcaaattcattcacgctcacgcgttggagacagcgattggactaagtgctcctcttgttttattaccaccaatactattatactaggaggagtattttcccagttgcaaacttgagctttggtctaaataaaattgctttaattttaatcaatttttttagaaaagtatactaacacacagattttaagaagattttttttttaaaaaaaaagataatttaatttaatgttgtggatgcaggtctatttttttgatgaacttcataaaaaaaactactttaacagttccatgacctgaggaagatgttttttgtcacacaaatgcaagttttgatgatgtaaaaaaaaagaagcgactttttgaggaaaaataaaaggtgaacatagtttcgtcagataataacaagaatcttgtaggccaatgcgcacaaatgtatgtatattccgcgcagaattaacctagaggtcgttgtcagtgttgaagctcacgctaccaactaactagattcatatacggaatgtaaacttggtttgtcgcttgtcggactcgaggaaagaacgatgatgactcaaattgctctcatcagattttgttttttccaaatgtaggaactgctgcttaattaatctacggatcctttatatttattgtttatttcctggccaggtcatggacattccccgctcactgttcgaagagaagcttgagcacatgaaggaatccaagggggtgaagaatgacactgacctcactgccgctgacctcaaggagcttgtgggtcagtacaaggaagtctaccttacagctaagggagagccattcccctcaggtaccatcctcagtcactcaacagtgtctgtatgaaacaaatctcctgatactactggagctgttttcctaattgtgcaccaaaatcatgtgctacaacacaaccttaataaattactgtgcttgccttgcttgcagaccccaagaagcagcttgagttggcagtgcgggctgtgttcaactcgtgggagagccccagggcaaagaagtacaggagcatcaaccagatcaccggcctggtcggcactgccgtgaacgtgcagtccatggtgtttggcaacatgggcaacacttctggtactggcgtgctcttcactaggaaccctaacactggagagaagaagctgtatggcgagttcctgatcaatgctcaggtatacttatggtgacctcagtcaggcttccatccattgctagctcctgtttgatcctgaaccttaattagcttctgtgttctgttcatacatgactacttgacacatgtcctggttggtaaacgaaacatgctgtggaccggagtcaaataatgaatttgccatcatacaattttgtttcctatatattcagggtgaggatgtggttgctggaattagaaccccagaggatcttgatgccatgaaggacgtcatgccacaggcttatgaagagctagttgagaactgcaacatactggagagccactacaaagagatgcaggtacgtacattagcttttctgccttgagattctgcgagacaatgtagtactacttcctttgctatgaatgaactcaggctgacttggtttttgatatgtgtgtgatgcaggatatcgaattcactgttcaggagaacaggctgtggatgttgcagtgcagaacaggaaaacgtacaggcgcaggtgccgtaaagattgctgtggacatggttagcgagggccttgttgagcgccgtcaagcgattaagatggtagaaccaggccacctggaccagcttcttcatcctcaggtaatcaatcgtactaaccatgaacggcttatcaaatcaacgtgtcctagatgtttgtatattaattaagtagttgatatgcatgcattgatacctttttcctcttgtcttatggaaaaccagtttgagaacccagcgttatacaaggataaagttattgccacgggactgccagcctcacctggggctgctgtgggccagattgtgtttactgctgaggatgctgaagcatggcatgcccaggggaaagctgctattttggtaagtaatatccttttcatcctctgtaaaaaatagctcttctgtatttattcaggataatttttttcctttggaaatactcctatgtaggtgagggcggagaccagccctgaggatgttggtggcatgcacgcagctgctgggattcttacagaaaggggtggcatgacttcccatgctgctgtggtcgcccgtgggtggggaaaatgctgtgtctcgggatgctcagccattcgtgtcaatgatgctgagaaggtgagctgagttcttgtttgcagaagccaaaacatgctgagaagtaaaagcttgtaatgagattgtgatatggatgcttactttgctatgtttatatttatagactgtagcgattggagaccatgtgctgagcgaaggtgagtggctatcgctgaatggatcaactggtgaagtgatccttggaaagcagccgctttccccaccagccctcagtggtgatttgggaactttcatgtcctgggtggatgatgttagaaagctcaaggtataatctcagaaatactaaccaatatgtactactccattagtcaaaacacagacataattttctttcaagttcagaccatgtactataatcattgtctatttagagatcagaaatgattgtttgtgcatatgttgtaggttctggctaatgcggatacccctgaggatgcattggctgcacggaacaatggggcacaaggaattggactatgccggacagagcacatggtatctatttagtacttggttatagttacacccaacatattatggctaggatatatacttggacattttacactttctttatttaacttctttgttatagacaaggaaataaatagtttcatgttttttctcctgtactttggcagttctttgcttcagatgagaggattaaggctgtaaggcagatgattatggctcccacagttgaactgaggcagcaggcactagatcgtcttttgccttaccagaggtctgactttgagggcattttccgtgctatggatggtaagtgaaaatcacagtgcattcatttacagatttcgtattgaactggatgcactagttttactgaacaaaacaggagtaagcaaccttctctcaattaagcaaacattgactatgtattttcagaaaataaataactaaattaggcttgaacataagtgatagctactccagagtccagactgtatttttgaagtgtgcaggactggtttgaacttttttttttggtttgtgtttcaggactttcggtgactattagacttctggaccctcctctccacgagttccttccagaagggaatgttgaggaaattgtgcgtgaattatgtgctgaaacgggagccaatgaggaagaagcccttgaacgagttgaaaagcttgcagaagtaaatcccatgcttggtttccgtgggtgcaggttggttttctgctattctatttttcacagaaaaatccgtttccacccgtgcctgatccatttggttgtatgctctctctgttcttttatagctgcatttttatggagtatttagcaggttttcttgtgttagtgaaatattgagaaagaacaaactcactgtacatttatgtataccttgactaatgttggaactgccaaaattttcaggcttggtatctcgtaccctgaattaacagaaatgcaagcccgtgccatctttgaagctgctatagcaatgtccaaccagggtgttgaagttttcccagagatcatggttcctcttgttggaacaccacaggcatgcatcttctttattttcgtattaatgtatatagtatctctgcagttcaaaatgacaaaatccatttgatgccaaaattgcataaacaactaatttctgtacacatttaagtttcgcttgtctggtcacttacacccagtttgtcttccaccaaattcattttcttgaaatactttttcgatattttaagtttgttacagtgacctgagtttcctttagacaactgacatttgatatttccaggaattgggacatcaagtgaatgttatcaaacaaactgctgagaaagttttcgccaatgcgggtaaaactattggctacaaaattggaactatgattgaaattcccagggcagctctagtggctgatcaggtaggaaacaactaactcccttatttcagaaaatttaaaggatgactatttagattggctttgtagattatattttattcctatgctaatttgacatctttcattgttgttttggtttcacaacctggcagatagcagagcaggctgagttcttctcttttggaacgaacgacctcacacagatgacttttggctacagcagggatgatgtgggaaagtttattcccatttacctggctcagggtatcctccaacatgacccctttgaggtaactgttgcaactctgtcaccctctcatctgaggtcatacttgtatttttctatcatttgcagatgtgtatctcctgtcgtcttgccattatgcatatcccccctgactttcgaatgtccataaacttatcaggttctcgaccagagaggagtgggcgaactggttaagtttgctacagagaggggccgccaaactaggcctaacttgaaggttagtttcgggatctgtggacattgtttcgtttccttagaaaccatggtttgattgtttggtgttgtatgtaaacaggtgggcatttgtggagaacatggtggagagccttcgtcagttgctttcttcgccaaggttgggctggattacgtttcttgctcccctttcaggttggtcaagtgataaactcatgatccaatccaacaagtatatctctttacatcccggttatgttaacggcagcaaaatcttaactggtttttatatgaaataccttctgcagggttcccattgctaggctagctgcagctcaggtgcttgtctgagggtgctgagggtgcctcctcattcgcaaccggatgatcgcctgctgttggcgcatctggtgattaataatattgttacagagccatgatctgtgaagataattagtagcagggctcataaaagctacaattccatccctttttgcagttatgtaaaactttcaaactgtttatgctcaaaaactctgttcttcaatggatcatcaattatcgattatatatgtgtcaagggcttcttcttttcttttctgggtgtgtgtttatggttttcttggtgtgtgaggtgtgcatgttgttgaggccattgctgcacataccacctattgaggcctcctcaaattaagcctcaaaaagctgatactttttagaactctggactctggtgaatgcaactgactgctggtttgcttctgaggctcttcgtgtattcatgcaagaagctaaaggaatgatctataacagcagaaacccctcttccaaagtgatcgttcctaagccttgacgtgtcttcagtgtttttcttccccaattgtgagccagttataagtcacacaaataaccacttacagttcagtggtaacgacccatgatcagccaattatgtgtgacttacacgtatctatgagtactatgtatgccatgttttgagcatttggcaactgcagctgccagttataagtcacaaataactggccatgttttgagcatttggcaattggcatacatactactcatagactctccacgtg

SEQ ID NO: 3491 - DNA, 2755 bp, Sorghum bicolor
cttacttcagtatgattctgacgaggttctagctacaaaaattagcccataagcatggacaatgatcaaaataaatttggaatatcggatagtagtaccatgctaacatccgaagttagcgacttctcatattctgtagtgaaatcaaactcagacaaagaggtcgatcctacacatacacaagactacaatcactgaaaccttcgcctactcctgccagcaaaatccttccaaatatagttttccatcctacaatttccccccaaagatcattagcagcaaaggcgagaatcgctcaccagtttctccatctcctcgggcctcttcccccgcgagagtccatccgaaatccccttgagaactgcccatcacatgacagtgtaacgaaacgcgtcgcactccaaccgttagccagcagattgaggaagtaacgaaaggaagccacgcgggataggaagaggcagggaggccgcacctcggaggcggtcgatggcgaagagctcgaactcctccagccgcacctcgagctgcggcgccgccttgtaggtcggcagcgcccccgcgccgccgccgtcgccgccggctgcggcagctgcggcggcgacctgccggtgtgagcgcacgatctccatgcggcgtcggtggctgcccgggtcagcgggtctggagcggggagcaggatcctcgcccggccggggtcggcttctgcggacggtgcgctggcgtcgtcggagacaggcgcgggcgggaggcggggtttgttgcggagctgaagtgcgggagagccagggcggcgggagtaaggaagtttggggcgctttggcgggaaaaggacctgcttttcccgccgcgacgcgcgctgtttggcagttgggcttgggcttgggattaccacattaggcccaagctgttttggaacaaacaaggccttgtttagttccaatttttttgaagaaacgagcattgtaacactttcgtttgtatatgataaatattatctaatcatagactctataggttcaaaagatttatctctcaaattacaagtaaactgtgtaattagtttttatatttgtctatatttaatgcttcacgcacgtgtttaaagattcgatgtgatatagtcttcaaaattttgggttgtcatcaggaactaaggccttgtttagatcacctaaaaacctaaaacttttcaagattccccataatatcaaatcttgcggcaaatgtataaaacattaaatatagatgaaaacaaaaactaattgtacagttcgcctataaatcacgagatgaatattttaagcctacttacttcatgattgaataatatttgtcaaataaaaataaaaatgatatagtatcaaaattcataaactttttagatctaaacacgccctaaggcccaaaccaacaaatgccgtgttgtttcgcgtgctggcctgctgcgggttctgacagctgggcccaccacaggcccggttgagcggacagattgttctggccacagtgatctcgtgagctaaagctcatggacggatggttcttcctcctctcatccgtcctcactcatcagtcctccaagtccctccgtcgtccatccaggaaaggtaaaaaaaaaaaaagttgtgccccaaagaccaaacccaatctctgcaaaatgtgattctctagctgacatagatcttccttatttgcgactgcagttgtcatgagcaaaggcaaatcggtggcgatgtcctccgccggacacagcgccggcgcgagccctacagacggaggagctgatccgctgtccatgtcggagacgccgtgtgccatgcagcccggggtcctccctcttctcgggaggccatacttcacatgcatcctctgcaagtctcatgtcaatcagccgttccaagtggtactgttgctactcatatgctcttgtgcttgcattgcatttgctgaaacagagtcacgcaagaggcttccacgtgatgcatgaatgagcatgaccaaacaaactccttgggtttgccttgctgcaggtggtgcccaggtcgctggcgccgttcctcccggcgaccacggtgccggcgacggtgacgcggcacggccggtcctgggagatgcggttcacgggggggcggcagatccagcgcctggaggccgggtggcggggcttcgcgctggacaacggcctcatgctcggcgacgggtgcgtcttcgagctgctcgacggcaagccggagggcgtggtgttcagggtgcaggtgctccgcgcccacatccccgaggagatccgggagcgcgccggcgggtacacctcgtccacccccatcctcatcgattagctcaccccacggctgctgtactgtgtatcccccgtgtcttgcggccgtctgtttgccactgttagtgcggcctgaaactatgacttaattgatgtgcagagtgcagcgcagagctgaaacctgatgattgctgagaatttcttgtaccttgtttagttcaaaaaaaatttgcaaaaaaatcgacgcatgtatggaacattaaatatagatagaaatatagattttccgtcgcatcaaacttacgatacatgtatggaccattaaatatagataaaaataataactaattgcacagtttgtctgtaatttgcgagtgaatttttttagcctagttagtccatgattggacaatatttgttaaatacaaacaaaagtgctacaatgtctattttgcaaaaaaaaaatttaaaactaaa

SEQ ID NO: 3492 - DNA, 4931 bp, Sorghum bicolor
ttttgtttttatctatatttaatgttctatgcatgtgccacaagatttgatgtgacgagaaattttgaaaattttttggtttttagggtgaactaaacaatatcacccttccttttttttttctcggcatacttgattatctggacatctgtttcaggcgtgataagactatatcgatgcagattggagccctaacccccaggcacaaggtacttattgttagccgttgattctaattcgtcttgaattgaagtccagcgaccatagaatgcaagggtaatagaaatatttttattcaatggaatttcgtatgcacacatatagactaagccaaactatatgaagtagtactgacaatacatcacaactctctctctctctctctcacagacgctcatattcagagtggaaacgaacatgcagatatatatgagatcagacggaattcttgatggccgagctgtatccatcctggtcatcgtagaacttggaccacagcatcactcctccgtagttggtggagttgttgagcgcgggaagcacctccgtcttgaggctccctactggtatgaatccactccctgcagcatctggtgcagccggcaggccaagaaagatgtacttagctgtgatccctgttgtccactggttccaggaattgacgaggttggccatgcttcccggtgtgtattggcaaggtgggttgttgtagaactgaacccagacatagtcgaagaggcctgtctgaagggctttgccgacccactggtccgggaaaggacactgcggcgccgctgacaggtagacctccttgcccttggcgttggcagccaaggacttgaggtatgccgcaagggctccatagtagtcagggtttcctccctcgatgtcgaagtcgacgccgtcgagcacggcgtcgccaagcggcctcttgtcggagtgcccaccgaggaaattgttccagatgtactgggcaagcttgaaggcgtcttgcctggagttgagggagtatcctccagcgccaccgccgatggagagcatgaccttgacacccttggactggcatgagttgatgtctgcggtgaggtttgtgcaggcgttggagtaggggtcgcagtgacccgcgaggttcagctgcggcttctgccccgagccgaagctacagaggaaggcgatgttgacaaaggcatagttgccggtggcgcaggtgtcggcgagagtgccctcgttgccgttctggccccagtagatggcaatgctgccaccatggctcccgggtagagccaaggatacaagtaagacgatgaagaggcaggcaagggaggatgttgaagcgtaagttgccattaattcttgctatagcttgagctcgatcgaaaccctttgtgttattgttgtgctagcttgtgcatgtgccgctgctgattgattttatatatacatactacagtgggacttggagtgatgattgttttttagtggagacgtgccttgtggatcgacgaatgtcgctgtcaaggtaactccctcaactcaacgcctacgtagtttggtttggttggtcctagtagctagtttaagcatggtccgtctgtctgtcgctacggtacgttgctgtttcttgccagttgccacaaaacagattcatccgtgtgtgtgtgtgtgtgtgtgtgtgtgtgtgtgttttcttcttcttcttttttgaatctttcattcatccgcgttttctttcttggattggatggatggactggcttggcttggcttggattggattggagtagtttagcttgggcttgatcagggcccggcctgctactcctgcccgcagatgtgatgtgatgtgatgtgatgtgagctatcggcccatcaccgcaccgcaccggcccggtccgaaggagacacgcagacgggacaagcaaagcagagcagggggaggcagcagagcagcgagatctcgttcgcctactcctccagtctcgtctccgatccggccaaccatggcggaggatgctacgagcagccacccgtcacgctacgtcaagctcaccaaggaccaggacgcccccaccgaggacatccgccccggcgagctcaaccagccagtccacgtcccgcaggtctccctctctcttcttagggtatccttcctccgatgggttcgatctgaatctcatccctactccctcagctcgaaggccggaggtgcagcgagtgcggccaggtcctgcccgagagctacgagccgcccgccgacgagccctggaccaccgggatcttcggatgcaccgatgaccctgagacctgtatgtaatctattctctcttccacctcacccatcgatccaaatagctcgttgcattatctttcctagtcaacactaccaggagcaggcaggggtgccgtcgccctgccatcaccttgatctaccatttcagtccccgcgtcattcacaaaacctgcatcatcgtcattattggtcaagccatgtgggtttttggtggcttttcatgatgggttccatgaaaatcgggctcattagtagggagaatccattgatttgattgattgaggcattagttgcccctcgtttcatgctcttcggatggacattaggttcagggtctgacgtggcataccgttttagatgttgtaaatgctatttggacttggctgcccgattccgtcgaaaatttttagcctgtatgtctcggcgccaatatgcatgcatcattccacatttccatctgtaaaatattcatggttgttagcgagatacttgctcccatgttccatggttctcctgaagtatagctagggtagtttgctgattgattgatgaatccgactcggcaactctgaatacaactgaggattgctttccacctcttacaatgataatcagtccaaaatatctgcttcgtgcattcatttttctaacttgctgtgcaccccccctcccccctcctctggttctaattattgtgtatcctacatacagaagaggaggttaggttaagccaaatctgctgcttaatccaaacctcctggggtccttaaaagcttcgggtccaccactgagcccatcttttatgattttccatgtgcagagacttaacagaagatggtgctattttgtgataagtcgttttatgagcattatatgtcaatgatgtgtctgactgaaattgtgctcagtaccaagaatcgtcaaaggatagaatgcttcttgtattccttactttgcgtagcacttttatacatcgctgtgctctatgaaataatcaggttcggattgtcaaaccatcagagattaacataactgcttcctttgcagcacttcaataccatatttggctttgtgcatcatttatctctttctccataattgtatgaatgctatttctagaatgctgatttgaaagaaaggtagctagcggacgatcatgtaactatcaaattgtctgttcattgtgacactaggccgaactgggttgttttgcccttgcgtgctgtttgggcgcaacgtcgaggctcttagggaggacatcccttggacaactccttgcgtgtgccatgctgtgtttgttgaaggagggatcacactggcgattctgacagcaatatttcatggtgttgatccaaggagttcattcctgattggagaaggtctggtgttcagttggtggttatgtgctacctatactggcatcttccgccaggaacttcagaggaaatatcatctcaaggtgcaatctatcttggctgctttccactgttaagaagttacagctagctctctccgtgtggctgtgcacgtacagctagctaactagtcgctattgtcttgttttgctccagaactcaccgtgtgacccatgcatggtccactgctgcttgcactggtgtgccaactgccaggagcatcgcgagaggaggggacggctggcagagaacaatgccgtgcccatgactgttgtgaacccacctccaattcaagagatgagcatgtcagagaaccgtggtcctgctgccctggagaacggagcaggcaacgctgagcgtgaagcagagaagagtgagcacgatgatgtcgaggtcattcctctataggcttcttctaggatcggagcaatatagactatggaaccgttccatccgaatgagcgtgtggttattttcatgtccgacgaccgaacgaatgcagatgacgatcgatatatgataactcctagcacagatcttctgatctagttgttgattgttcaaccccaagaagaaaagattggtaacaattttacccttcctgtagcaattttaccagatcaaccgtctgccgtatggtttctgcagccgtttttgtcattgtctcgacaagaggttgatggtgtgtcaactgtcaattgtaataatcctggtaatatgtaattctgtaatagtgcgattcggcgtgctgccgcccgagatatttcgctcggcaaaagggaaaggagaaaaagccttttcccaactttggcttggccaaaaagaattataataattcggataatcacttaaatcttctgcccggtaaaaataaaaataaaaataaaaggacaagaaagttttcgccttcagtgcgagtctgaggaacgagcagagcagagcagccgctcagctacggagccgattggattggattggatttggggttcaaggttcgcctaccatggccgctcctcgactcagcgtgccgcccgccaccaccggcctccttaccgtggcatcctttagggtttagggtttgtttagtactaaaaactacccaaaaaatttcaagattctcggtcccatcgaatcttgcggtatatacatagaatattaaatatagataaaaacaaaaactaattgcacagtaaatactgagatgaatcttttgagtttagttagtc

SEQ ID NO: 3493 - DNA, 3727 bp, Sorghum bicolor
gtatgctttaatcctttgatggcatgccggccgcatggcatcggcatcggcatcgccagatcgatgtcgtcatctgcgctggtaagaataagatgcatcacgtgcggtgtgtgactggccatgtcctccaacggtgaaacatgtatgagctacatcttttgttttgaggaatttgaaatattttgacttgaatgagttacaatttgaaatggacggggtggcgaggggtccagttctgaataccgagcaaaaaatggtggctggggcgagcgcagcttgtgccactgtaagccccttaatgtaaccatgatgtacttcaattttgctatgattaatgaaagccgataacggatctttagaaaaaaagaaatgttagatccattacagatgatattttgacttagaacaaatcagaaaacacttatattttaaaatggatggagtataatttttttgggagctattatattgtaattccatgccatcattgtccttgcgtagacaagcaaaccacccacattttttggtacactattttaggctgatggcggtgctgtttaccctctgcttttacataactttgaaaacactaagctaatgggatagctaggttaaatggtcgactggttcaccacgaaacaacacgtacgctatacctctctataaagactactctgagagagagagaatctcctgcccgatcttttcaaagaaagtgatagccctttccaggagcaagtgccaccttgtcgaccactcttgtgtctactacatagaaggtcgtgcgctcccgagtaatctccaaattaagcactggcatatattcgtgcacccggcccctactccatgcaagctttcagtggggctgaatgaaagacagcaaaaaacaaaaggggcatcaacatcagaaaatataaaggcccactttggaacagaagaaaaatagaggaattatgaaggattgaaatcctatagaaacattccctttgaagtaaatttgtagtcccttcatcccaaattgtaagtcattctaagaattttagagagtcaaacttttctaagtttgaccaactttatatgataaaataattattattatgataccaaataagtatcattaaattctttcttaattatattttcatagtatactcactttttaagttacaattcttaatatttctctctataattttggtcaaacgtaaaaatgctttgactctccaagattcttagaatgacttacaatttgggatgaagggagtaatatataaaagtattgacatctatactaacaaatactcccacagtctaaaaaagaacaaaattgtagcttagtaccaccaagtcaaagtatcttaagtaaaccaattgtatatataaattattattgataaggtattataatatataatagatatcatgagattttttatgagatatattttcataatatacttatttggtgccgtatatattatatctagacaaactttaggtacgtttgtttttaagacagaggtagtaagtattattgattaattgtagaatattttcatataaatctatttggagacataagtgtggacacttttttaatataaattcagttaaactttttttttacttggttcaaatacagaattgcacttctttagttgaggacagatgcactagtccttcagtagtcctgcagttgacacacggtccccctttggtgtacacgagtaagcgcatgacacagtggtactccctaccctgttcatcatcagcagccatataggagtatatatgcatctttccccgaaagaaaaacaaagttggagcaggtggtttacatccatagccggtctgcctcagaaagcacccctacccggccggccggccggccggcgaaccccaccgccaccggcgttgcgcgcctgctttgctaccccctatatattactcctaggtctctctctcgagacacgcacccctgcttacttaacaccccagcgctggtgccttgccctgtggtcctcgctccgtccttaatccacttctcctgctgcctgcccagcaccacaccacaccatcccgtctcctctccccggccagcctccctctctctttctctgtcctcagtcctcctctcacgcttgacaaggagagagaaaggtgtagcagcagctagctgatccggccgggagcgcaggcaaaggatggaggaatacgacgggctctttccttccgcctacgtggactcctcctcatccctcctggtgcccaacggtgcgtactcgtacattcgaattctctttctctcagctgcagctgtaggctctgtagctacttcttcatctctgcaaatgcaactgtagctcatcatcagtaccagctagccttgcacctgctgcatgcatgcatggcaattgatgtattctactgtgcgatgtgcaggcacggcgcagggggagaggccgagagcgcggcgcaggaggcgtcgagcaccgaggtgcggcggcggcggcgacctggacgggggaggggaccccaagaagcggcggctgagcgacgagcaggtagagatgctggaactgagcttccgggaggagcggaagctggagaccggccggaaggtgcacctggccgccgagctcggcctcgaccccaagcaggtcgccgtctggttccagaaccgccgcgcccgccacaagagcaagctgctcgaggaggagttcgccaagctcaagcaggcacacgacgccgccatcctccacaaatgccaccttgagaacgaggtacatacctgcccccaccacacatgcatgtcctcctcctaactctttttaattgtctgagctcgtatatcctctcgtctgttcatgtccatggattgacggtggcgttgcagtatacactgagcatttcgtgggtgggtacatatgcatggctggcaggtgatgaggctgaaggagaggctggtgctcgccgaggaggagctgacgcgtttcagatccgcggggagccacgccgtctccggtgacggcggagacatcatgggccgtgccgtctgcagcgggagcccgagctcatcgttctcgacaggcacctgccaccagccgggcgtcgacgtcggcggcggcgatcacctgggggacgacgaccagctgctctacgttcctgactatgcctacgctgacaacagcgtggtcgagtggtttagcctgtatggactgatgtaagcgaagtgatcatcagtgatcgatggtatgccatcgatcggcagattcattctagcagctagctactcatcgtagtgtgtcattgctgtgctgaattgctgatttctaagtgcgtgtgcttaatcatatgtacataaatcaagttgttaattagtggcaaaatatagccagctaccagcaactagtacttgaattcagatgtctgttactatactgcgtgctacccacattggaatctttttttttcccccttcactactatatatagtctttcgtgagctgatgagcaagtactatgcatgtgctagctgacaatcacatccttgctacgtgggaaggtaacatttgaacaaaaaaatatatattcaaatagtatacatacaatttcgaggttcatgtcgaacggaattcatacagtctagggtcaagtggatgtaaaaagttttgctatatcaaaccttttcacctttttattcttcataaatactttctctgttcca

SEQ ID NO: 3494 - DNA, 4257 bp, Sorghum bicolor
attacacccataatatgagtcttcatcataaaaaaaagagacattctagaggtagagtagagggagtggcgacgacgcgactgtgagatacattcttggtggtgaatattctcggttatcacatacggtttataatttataattgccggtttgtaatgcaaaccaatagtgataactatcctcgctagtttttaacaaattaaacgatgaaaatagtatatataacatcgccttgttgacaagaaaaacattccatacatatccgttatccagtcatgtcgatttggagtgcaaactgcatacatttatacttgtataatacaagtgaaatgcaaaaaggaaacaataacagaagaaaaagcaccgagcattttcaaatttgttgttcattcatccggattcataaacttttgaagcgattatctggtttctttaactttttaactagtctattttacgttcattgtctaaacacgaacctaaacttatacacttcaaatgaaccacacttttaaaagagaatacatgaaaagcttagagagacccacattacagttccctcttttcacttgcaatattaaatgaagtggctgattatattacgtgaacagtaacctgatttgcatcaaataccatcaactgttctgaaacgccagtgatttccaactcccagcacagtacatctcctctacccagacagggagccggagggagaagattcattgaacccagcagattgcgcccaacttcttccgtgttcgccaccacataaaaagccagcgccaccgggcactcctcttccccaccgcaccaccacccccacctcctccagccacttcccccaacccgtccctccggctcctccgccattttttccctgtcgcggtaagcgatagggttcggcctccgtcctctaaatccgccctcggatccagtgctgctgctgcttctcttcctcttcttcgtttcgcttctagcttccggcgttctcggagcaaagcttcggcttcgtcgacggcgttcttggtcttttgcggcttgacatgtcttcgttccagggatacagaggtaaagacccttgctttgtgagatctcaaaaagatttgtagttgcagctgtgggggattgggtttccttttcgtgtgttcttaccctcgtttcttggatcaggcgatgcggttctcgccggcgtccggtcgcggaagcgcgtgttcgcgacggcggccgctgagcccgtgacggcagcggcgcccaagaggcagaagcgcagggatgagccgtccctggacgcgctgccggacgagtgcctcttcgaggtcctgcgccgcgtgcagggcgcccgcgcgcgctgcgcgtcggcctgcgtctcccgccgctggctcgcgctcctcgccggcatccgcgcctccgaggccgtgctggccccggctgcccccgccgtgccggacctcaaccaggagtacctcagcgaggacgacgaggccgatctgatggacctcgacggcgacgtccgcgagaggacgctcgagggcaaggaggccacggacgcgcgcctcacggcggcggccgtcgccggccgtctggctgccgtttccgtccgcgggagccacccggcgcgtggcgtcaccgacgccggcgtctccgctctcgcccgtggctgcccggagctccgctcccttgccctgtgggatgttccgcaggtgacggacgccgggctcgccgagatcgccgccgagtgccactcgctggagcggcttgacatcactggctgccctatgatcacggacaagggcctcatcgccgtcgctcagggctgcccggaactgaagtctctcaccatcgaggcatgctctggtgtggctaacgagggtctcaaggcaattggccggtgctgcgccaagctacaggcagttagcatcaagaattgcgcacatgtggatgaccagggtgtgtctggcctcgtctgctctgcgaccgcctcgttggcaaaggtccgtcttcagggtttgaacattactgatgcttctcttgccgtgattgggtactacgggaaggcaatcaaagatctgaccctcgctcgcctccctgctgttggtgagaggggattttgggtgatggccaatgccctgggcctgcagaagctcaggtgtatgactgtcatctcctgcccgggacttacggatcttgctcttgcatctgtcgccaagttcagcccaagtttgaagcttgttaacctcaagaagtgcagcaaggtctcagatggatgtctcaaggattttgcagaatcatctaaggtcctggagaatttgcagatcgaggaatgcagcaaggttactcttatgggcattcttgctttcctccccaactgcagcccaaagtttaaggctctctctttgtccaagtgcatcgggatcaaggacatctgctccgcacctgcacagcttccagtatgcaaatcgcttcggtccctcaccatcaaggattgcccaggcttcacagatgccagcttggctgtggtgggcatgatctgccctcagttggagaatgtcaatttgagtggtcttggtgcagttaccgacaatggcttccttccattgttgaagagttcagagagtgggcttgtcaatgttgatctgaatggctgtgaaaatcttacggatgcagctgtttctgccttggtgaaggcccatggtgcttctcttgcacaccttagccttgagggatgcagcaagattactgatgcaagcctgtttgccatctctgagagctgcagccagcttgccgagcttgatctttcaaattgcatggtcagtgactatggtgttgcagtcttggcagcggcaaagcagctcaagctgcgtatcctctcactgtctggctgtatgaaggtcacccagaagagtgttcctttcttgggcagcatgtcttcatccttggagggactcaatctccagttcaacttcatcggcaaccgcaacatcgcttccttggagaagcagctctggcggtgcgacatccttgcttaagaggaacaaggcgattagttgctggagatgctgggtcaaccttctccagatgcaaatatacgaccgtagcggtagtacttgagtctaagctttgtagttgagtctggtttccggctcgtgtttgtgtcatggtgggtctcctgtttgtcttagggtcggttgttttcctagggggtgtttttgccgaggctcgttttttgcaggtatcctcctgtgaggatctctgttcgttgagcctttggcagccattaccatggcaccctgccccctccatcccaacctaagcccttgtgatcagccattccaccatgcagtttctcaagttgtgtttgaagctcaagtattcgtcaagtgtgtgttcttttccagtactcctggttatagagttgcagacatcaacactcttctgattgcaattgtagcaagtccaattgtcggtgtcgctgtccggagaaacttagctccatgtcttgatgtttgggtgtctgcaatctcgccgagtgcagtgtgttgttggtcatgttgctattttacagtgtcggtagggtttgcctatgtacttggggatctggcctttgcaaggttcattctacggagcctttgccttgacaaccctgcgaggttgtttttcttctccagagacctgattttgcaggcaggtggtttgaacactgtaatatttgcaacattcttctgaagataaataaagattgtgtttcgttctgaatcctatgccctgtgatcctatcttcgtgttatacttgtacggtccccttagattaaggtaatcctgtgatcctatcatcgtgtgagtgaccctcctgtgatgagcagcgctgctgccttgtttgactgagccggccaggcccaggacttacgcggttatgcatacttgtcgatgaaatttggctgctgctgatttattgatgttcttttgctgaaaagtaactgctgataagttctaagataagatggccctattagaactgaactgactggtgaggctgtgtcatgcatgcttaccgagaataaatttttagtactagtatttgttttcaaggaaaaaaaagaaaatctcttaacttaattctggagatttttatccaaatcccttgtcaaagcctatccaatccaaagcaggcagtgcccctcgaggccatccattcacgaatcatggagtactgtagcttcagggacaccagttgccctctcggcagctgccaaacaagca

SEQ ID NO: 3495 - DNA, 6112 bp, Sorghum bicolor
gcctatgtgataatctatttaatgtaaatgaaactttcactgagactgacttgttatactaaaagcatagaagttccttcagagcggcttccagagtaagattatttaaaaggtgaagttatcgtaccctcgaacagggccaaaaacccaattttgtataagaaatggctccctttagtactattttaatgaagaaagagtttgagatctctatttaatattaaagaacagaataatttttaacccactttttcagtgctaaagtgtacttaaccaagacaaacaaaattgattaacggaggcagacaaatcatctgtatcttcaaaaggtcatggttaatccagatctacggaggcagttggtccgtccatcttagttaatagattaacgaaggcagacatgttaaagcaacgcctcgattgataccaattaacgaagacgattggcctaatgcgcccgccccgattaatagtttccaaaaaaaagcccatcaacaagttcgatgagcccatcgacgcacctctgccaccgctactcactggatccgagccatagcagctggatcagaggttcgctgtcgtcgcattgttgctggaagagacgtctgccgctactatgtcgttgtcataagagacgcccaccgctggatctgctagcgctaaggagaagcgccgctggggccggaacccccgctggccgcctccttgaatccgaaccaccggaggtgcaggggtcgccctgaggaagcaaggtggaggtggatggagccgacagaggtggaagtggaggggtccaattggaggtgtaggtggagggcgccgctagtggtggaagtggagatggagggtgttgggtggaggtggaaggcagcctggaggtgaagatggagggggcggtgctcaggaagaaggagccgctccgacatgatacgctagagagtgaggagcatgagaatgatagagatagggagatatgtctctaattaggtggatagggatgggcaaagagagagcgcattgacgtcacgtggccccatgcataatacttagtgaagaagcacaaatacattgatgttggagacgactccacgtgaccatcgatcttgtcatctatacatctacgccaacgattcacaggtgtgcagaagtagaacagatggcgtggttcccatggtgcagtcgatgtggcgtgatccgtgtggcctggtgtgtggcaacgagaggtgtgtgggtggtttcacgaaaacgaggggtgcaattagcagttttttcaaaccacgcatgagaaacagagggtgtgggcgttgggctctaggcgtgcgacaaaataagcggtgacgggtgggactgggcccaagagttggctggttcgtttttttaggcgaacacattataaatgcttgattctgtaaacaatttactaaggcttaaaccttaagcgtttgcctcggttattatttactgattaaccgagatggttgttgatatgcgaccgtctgttaatgtattacaatcttagttaaccgatattaataaagacagacgtgttcgttaagattaaccgagatggtcactaggctggctgtttgacaaaatgttgtgcataagtttttgtgtagttgtgtttactttaaaaaacttatattttcatttttttttactgtctataaactacccgcatacagtccgataccgtatttgatttgaattcatgatctcatagtatataaactaaatccatgaatagaaatttaaattactcatatccggtaagaataaaaaaatcctaatttcaaaccgctccgtgcaagatatctccataaataggctatgcactaggtagtagagcagagaacgcaggcagaacaggcactccctaccagtcaaccaccgcttcgttctccgttcttccccacaccgctcgcctccttcggattctttccccgagctccaccgcacctcacgtctataaataaggggaggtgcccgcggtgcccatcaattcgcgtcaccgcgtcccgagagcgcgaatcattccgcgcgacgcaaaaccctagcccatccaccgatccctgtcatggcggccaccaccagccaggcgagcctcctcctgcagaagcagctcagaggtgcggtccgccggagttcccgttcatccgtttccgctcgatttttcccccctccttgcggattgtttggctgattgacttggggttggtttgcggtatgatgattggcgcagatctcgcgaagcacccggtggatgggttctcggctgggctggtcgacgacagcaacgtcttcgagtggcaggtcaccatcatcggaccgccggacacactatagtgagtcagatcctctccattccaagcgtgcttccatgccttgtctggatgaattgcttgtttggtgtgtcggtgccatgccctatggactatgaatctgtgatggtgtttgtgtattagtgtggaccggaagcagcgattgaaaatcttactatacgggatagatttctggtggaggctggtgcggggcggatttttctttgcttgttgattgttgtagcgggtagcgtactccttttagtacatcaacttggggacatgtccggtgcccagttccatcgagtttgtttggttctaggtgcgtggcctgctctgttctctgctaatagctctgtttttttttttaaaaaaaacgttcatagctgtatcagtagttcactacttagaatcggggtcttcgattgctgatcagggcctaaggaatcgttaattggagttcagggataaactgtgtattctgaattggggtttgtattgaaagatgggttaaaataggcaccataggaatgctgctggttgtttagaataggttctgcatcatgtcaggaaatgggactatgtatgtttggagttcgtagcagatagttgcgacaatttcttgtttctgtaatttaatattgaatgaattggtgctacttgacccaagtagagtcaccttaattttgtcaacctgtttggtgcaggagcagaattttaatagcagacagactttttgcccaggtttgaaatttgattgtaggtagaaataaaatacatgaattcttttactactaattactgaaatacattatgaactagaatggtcactggatgctgtaaatatacctaatttttcttggagttctgcgtacgcaaaaaaaaacattcgaatcactgataatctgatactaataaatttgaaagaaagctagtgttggtaaatgagttcactgtatatgcacatttgtaaatgcctgctgtgtttgataactgttatatcgttcataaagatgggtcggtctgtattgagagagcatgcagcatactaggaagtactccctccatcccaaattataagatgttagacttgaagtgttttttgtgaagtattttctctttgataattcctgatcaagcgataggatgagtaacttatagcattgatagagttataataatgatgcattcttaatttttttactgattggcttctcgcaagctgcagaatctcttacagcataattctccatttgaactaagcggctagcaaacagtggagctattagttatttgtttttgtactgctgaagtgtttatgttcactttgttacaaagaaaacaaagtactgcaagaaaagttgaagtggaacctatagaatatcccaaggagttttgttgtgtgatcagtgtattttcatgtttaatgcattccttgattgatattttattggcttcaaagagatgtttacagtgctggtcttgtcaatttcctggttactctagttgatcacatatcaatctgaaattaaagtgtctgagttctgaatggaaaaaatcagctaacagcctaacagtgtctgaactactgacagatcttaaacataatagtggtgtttgctgcccttgtatttgtcttgaagcattgcattaatgcagtcatgtaaatagtattgtatatttatcttctgagcaacacactaatattgaaaattactttgcagtgatggagggtatttcaatgctatcatgagcttcccccaaaattacccaaatagcccgccatcagtcagattcacctctgaaatgtggcatccaaatggtcagctttttattagtgaaaattctatttatttacttgatctgcagtcatgttttttgatgtcatgcctaatattttgtggaaatgccagtttatccggatgggcgcgtgtgtatctctattcttcatccaccgggtgaagatccaaacggttacgagcttgcaagtgagcgttggacgcctgtgcacacagtatggcttcgtatactatgtttataaacataccttttcaccccaatttttatcttctgttctccattacgaagcccttgttacattactcaaatttactgtggttcatcatcaaaacgacattcagaagttcactggtagctctgtaatcatgatttgcctagcttccactagatagatagagaatgctctgttttggtctcaaggtagaataataaacagaagaattatttcatgagtgaatacttttgtaagctatcactagttaaactgatggttgttatgcatttgcaggttgaaagcatagttctgagcattatatccatgctctctagtccaaatgacgagtctccagcaaacattgaggcagctgtaagttcacctaataatttactttatggtttgcgcaaaaaaagaacaatttactttatactgatttggtttattggacctctacttgtgggctgctttaatatcaaatacttcatgtttgtgtcctgttgtatttgccaccaattcatagttgtaacatgacaagtttatttgtgttatacgacaggatagcatgctagtcttaaagaagaaatcagtgctgagagatgtctctaacaagtgtcttagtgtcaccaactcaccattgctttgcccaaagcattgagttctgagagttctcaaataacttgtgttcctcctgaaatttcgtgaattcatttgcttaattctgttggacatctcatgcatcgatgcatcatcactttcatccagatatccttctagtgttgtgaggactttctgtcactacaatgttgcaaagtgcctctatgtttctgaaaagcagttatttctcgtgcagaaggaatggagggagaagagggaggacttcaagaaaaaggtgcggcgcattgtgcggaaatcacaggaaatgttctgaagaaaatgggggtactgggaagttaaccatgccatgtcaggctgcaaaaattttgctgccaatctcaaaatgctcatctgacaccagtgtcttgtgtattttccatttagcgcctgtccattggtgatagttgcctccagaaatgcattaggacgtggtctgttatgaaggttctgtttgtatcgtgtggcttgggctctactaatgttgacaaacctgaagtgctaccggttatcgtaacttcggtggtgaacctggtataagcaggcgccattcctgtcagctaatagttgagaaaacatatcagtgaaattgtgcattgttagtgtaatgaggcagctccatattgttgcttctggtaactctacagattcttgaatgcattgcagagtaaccgacgaacttcttgaacacagtataatgaactacgagcgcagtatgaatggcaaggctcgtgtaagattacatataaatcgattgagctgtgttgaatgcaacaatttgatgctgccttttctgtttccatccaatcacaagaacaaaacagaatcacactgttgtgccgagtatgaacatttgatgaacgagccatagaccactgtcaacgaacgtagcgtttctatgattgaatccataataatccataaaagataacaccattaagcaccacttacaagcagatagcatgttacaattgtcaaaaaggaatataataaactaggaacttacatcatgcaagcctgcatttacatataactgcaagcccataaaacgtcagcactgcaacagttccacacttcgttacaattctcagggaaggtatcaggcctaattgggaccactgtt

SEQ ID NO: 3496 - DNA, 3860 bp, Sorghum bicolor
atatacatatgctatgctgaggatccccttttgattcagagatgggatcctgaatttttcgaacaaatgtcagaagcactacaccagcgactgcagtaccgaagtgcgagagctcgtcaaatactgaatgggcggcttgatcatttgccacattcgtccagtatttgaatgaattacatgccagatattggttatttctgtgaatccattgatatgcaggcaggcatttccagaagaagatttggatctccctgccattgaaatatatagatcaaggaagatattccaagccattgacgtttagagagctcaactgccccagcaatcttggacgccttcaagaacagcaaaatgtttaaaaatcccaatgaagccacaatgtgttcaatgatcatgcttttgtggtactgcgccatcattttttatctgtgtaggcttttgtggtaaggtagatactattaattccatttcgagatttgtgatgcagagtgggtgtggtttcagcgtttgtgcgggttagtgcggcaatgtgatagttttttttgtctttcttttgtagtcttagccctacagtatgataagctatggagacttggagaggaacagcatcgtggttgctacttggccggttgtacagaacagtgttgcttaatgctcatatactaggtgctctgactgatttatcacgtttgcttacatttacttaaggttagcgttaccggtttgaaatttggaatgttcaattctaaggccctgtctggacccacctcaaattgtgtaagttcactcgaattccacaatatggggttgatggatcgtgaggaccaatagtctagggtgtttgattacaagctagattgtgaaaagctggatttcggtggattcaagcaatcctgaatgttaccagatctatgtcaggaagcgagagactgcgagaagttgtagcagtttcatgtgaatatttcactgggtgctctctgctcggatggtgcagtagctgtgcaggtacgcgtacaccctttcgaaaaccatgtttcggcttcagaactcagaagtaacccaatgcctcgccttgtgggcggcgcacactggttgctgactggcgatgttatcataacttgcaagaactcggtatgcgtctttctatgattgctgtcgtgccccactactatcacggatggacgccttttctcattggtgagagaatagacaaacatgtcttttgaaaaggaaaggaaggccatgccatcaaatttgagtaagcataagcatatacagtagattcatacttccatagtggctggtgaagcacgttgaacaacaactcgaagaacatgcctgacaattccaacaagtaccaccagcggatcagtatatccgtggacccgtcaagcacgtctttgtggaaagcaacccgtggcatttctacgcacgcgcgttaagtttttgctactgtaaggtcgtcgatgtgggcagggaaaagtcttctttccacggacgcatgttacgctactgaacgacgtacagtatctccagacatacttgggtgtactcttatccagatcgatcgggcacgctcgacgtttaaacgacggcagaaaacaacgtgatcattgcatggcggggcggcaatccacatgagcctcgcgagtcgcggcgctgtgtagcgtgcaggttgtgtggagcacggcctaaccgataaaccattggtggtggtgtggccgggcgacgacttgacccgctagtgccggccggcagggccctggttggttcacgccctgacgtatactactccgtagactcgagcgccaccggccggtcactcggcccaccagccgccaaaaaaaaaaaaaaaaaaaaaaaaactgtctcgtggcggacgcccgcaccgacgacgaccccgacgggcacctgcgtgtactccgccatcccgccttggtaaagtcatcgcccgcgacgcgctggccgggaagcgacgcgacccatttgttcggcgtcggcacggcaccctttgggcacaggccacagcgcacactgcacactgcggttacgaccaggcggacgcgcaaaaggcaaagtccaacgctcgtcggcggacagtgcggcgcgcctccgatccaccaccaaccatgtacccgaaggcagacgagggtgcgcagccgctggccacgggcatccccatcagcggcgggcggggcggctactaccaggcgggcggcgcgacggcggcgttcgcggtgcaggcgcaggcggcgcccgtcgccgcctggtccacggggctctgcgactgcttcgacgactgcagcaactgtgagtgaagtcgatctgcctgagccagagagagagagagtgagaggagggatatatatgatcgatcgggagcggttgattaacgatggatatgcatatgcatatatatatatatatatgtatatgatgcaggctgcgtgacgtgcctgtgcccgtgcatcacgttcgggcagatcgcggagatcatcgaccggggctccacgtcgtgcggcaccagcggcgcgctgtacacgctcgtcatgctgctcaccggctgccagtgcgtctactcctgcttctaccgcgccaagatgcgcgcgcagtacggcctccgggagagcccctgcgccgactgctgcgtccactgctgctgcgagtgctgcgcgctctgccaggagttccgcgagctcaagaagcgggggttcgacatgaacataggtacggaccaccagtccctgttgtgaagcatccgcatccattcgttcagttcgatcttgcagttccctagccaggacgtcactgcactgctgacagatgctgcccggccgccgttgcagggtggcatgcgaacatggagaggcaggggcgcaccgccgccaccatgccgccgctgatgcaccctgggatgacccgctgaatgctgccgcgcgctcccctcgctcgccccaatttgttgcatgagggaacccgattcgtatgtatcggtccgcgcccatcctctgcgctgcgcgcgtaccaaacgaaccttgtcgtttacgttttgtatatttccttttaggcttggacagagaggtggtttttggtacaatatcattttgtcttcccaatcagttccaccaccaatagggttatacaaaggataagctaaaggatcatagccatcatgataagccctaatataatgcgggcggtcctcgtgaccatatattattatgctcctgtcaaatctatgctggggatcattgcacgcccatgtaactaccccgtcctggtatctactctgagtttgtattaaggaaaaaaaaagagactatcatgtcaccatatataaacgaaaattctctgcagtttgttagctacctcttcaatctatggcttcaggggtgctgatgcaagctgctttcacttcgtagagttgctttgcttgcacccctacgaacaacgtgtatccatgatctctctatgaccttgtttagtttcaaaatattttagaaaatgggcatggtagtatttttgtttgtatataataatattatctaactataaattaaataaactaaaaaattttgtctcacaaactatttaatgtttcggtctgcaagattcgaatttcctggaaggcctatgtagtgtcgggttgtatactgataccctgtggatttcaatttggcccaggacacgaaatatagcccataaatgctccatgcggctaagctgacacagtatgttccactcgctagcgatactgcgatactagtaccaaactgctacgataggacggtgtatccgatatataaggttactgtgtagccacgcaatgcgccagaaggatataacaagcagtgatgaaa

SEQ ID NO: 3497 - DNA, 5398 bp, Sorghum bicolor
gttgtgttttcatggccatatttaacttcctgcttcagtgctttaacgattgtatctatattgtttaacttgcttctgaacaacttgtctgaatctgaatgtaacagattgataaagaattttggttcacatggtgatacactgatacatgttaattgactgcatcacaagaatcctagattcttgttgcaattatcacttatgttgttgggtctctttagtatgttattggtttctatgattcatctttattaatagccttatcttcataccatgctgaaattaagaaatatgtgcatgtgctgatatgaaaactgaagtttactggccacatttgtgttaggtttttgtggccctgaacatgttgtgatgctttcctttcttaattaatgcagatggctcgtaccaagcagactgctcgcaagtccacgggagggaaggctcccaggaagcagcttgcaaccaaggtaacattatttagatagtggtgccttattttcctttctttgatgtttgatttggccctgatattggattcaagccatgactgaatttgtccctttgacatattgcttcataggctgctcgtaagtcggcccccaccactggaggagtgaagaagcctcaccgctaccgccctggaactgttgccctccggtcagtagaacatccttggttttttctgttgaatctgttattgtgctgcactattgatatgtttgtttttgcaaatgtaatttatcagtgagatccggaagtaccagaagagcactgagctgctgatcaggaagctgcccttccagaggcttgtcagggaaattgcacaggacttcaaggtatttatctctgaattcaacttccagaggttctgttatgtactcgtttcatgttgttaatggaacctgttgttttgcagactgatctgcgtttccagagccatgccgtgcttgccctccaggaggctgctgaggcataccttgttgggctgtttgaggacaccaacctgtgcgccatccatgctaagcgtgtgaccatcatgcccaaggacattcagctggcaaggaggatccgtggcgagagggcctaatccccccctcaaatcattgtgacaaaaatgaagtcttgtgtcgtagcaatgaatttaatctggtgccgttgtaaggacatatgagtagggtttgttttgtggatcataagtttctctactgccgcactatgtgttgctgctacctttgctggtgttattactagtgtcgaatgcttaaattgtctagtcatgtaatgcgctgacagtctgtgacgtgtatgcgatgtaggcactgactagtagtgttgtctgcgctgctggatcttgcgcctcattgctgtggctgatttgttcgttaatgtcaagaattgtgttacagtgagtgtatatttgtgcatcgttgcaattttttttgagccctagacctagtggtttttttagccaagttgaaaattctggcattctcaaacaggttgacatattttcattggtaaggaatcatgtgaatcatgccataataatatcatttccttataacttctagttagcttttgacccaataagctacaagattaggaataatgggaatcatgtcatagcatgatactatgccagagtctcaaacaggtcgtagttagcttatcatttctctttagcctttggatgacaaaccggtatagttatcatagaagctacaattttgattgataactggtctggtttgtatgatcgtatcatttctctgtagcctttggatggcagtttgtttcttccgacccaaaatttccagtgcgtgagatcaaatcgcattagcttcccttaaacaacaaatttccagtgcgcagtgacatcgtttgcaagtttccagttcgtgggatgacataggattagattccctaaaataaaggaaatgcagagcaggaacaaacagccaagctacttcactagatgactggatcgatcacgacgcctaaccagaagaacccccaccgcactccgcctccggcctccccctccccctccccctccccctgcgcagtcgaattggccgccggcgagatggccgcgccgatgcctctttccgcggaggacgtgctgcgcgtcaacggcagccgccgcttcgccgccgcgatggcggccgcctcccccttcgcgtcccttgccgacgccctcctcgccgctcgacgcatctggctcgacgaggtgtgtcgccctactcgctgtcgcctctcctacctccctgtatctgtatatatctctacttaaaatttctgtccatccgcgggccttcgtttcctgctgtactgacggcgtgctttgctgaccgtgcgcgcgctacgaatcggatcaaggtggatgtcagcggatggctcgaggccttcgcggcgcacccggcgatcggaaccacctcctcatctgtctccaagtcggtggagtttttgccctctcaccagtcaccaccctcctttccactcaattcctctgcttaatcagttatcctcatcttgctgtttgttcacctgacactgcgttatggccagtttaatttaatttaattgttgataaaatcagtgaattgaactggcgagtcgtttcactcagcatgacacaggacaaacaaaatggcgccagtcgtgtgttggtaatctctgtttgctttctggtttaggtggagcaaggaggagcaatcggcagcgctctcaacagccacggattcgacagcccaggtgctacatcagctcgcagctttccttgcgtctatcatagataaactctggacttaatttagtttttttcccctccatctgctgcaggagctggcagagtggaatgccaggtacagggagaagtttggcttcgtgttcatgatttgcgcatccaggaggactgcgcctgaggtcttggctgagcttaaggtatgaatacgtcatgttcatcttcagattcagtgtctgttttctgcacttgatatttttgcaacgtagttctacttccagaaggactcaaaacatacagaattatgtttggatccttgctattgtccttgcctttgacttgggtaatgaggtgttgtactatttggactctcggcaaagttaaaacacccatgtattgttgtttagggattgatgataatacatgataaggccatccctccacatgtctgtagcttcattgttaaaataaaagttcctatcaatctcaaacctaatcaaaattaaattcggatgatgtttatgatccactgttgggacataattcttatttttatatttacttccttgttatactacattttgtaagctttagcatacttcatgtctcatgcatcaacttaaagattgaaacactatatttccttgtatccttatagtgccttagtattatcctcctatttcagaggcgttacacgaataggccaattgttgaacttgaggctgcagcacaggaagaacttaagataactgaactacgtcttgcaaagcttttctcatcagagcctactgttccctccactacaactgaaggccctgccacccaatcagataaagcggcaggtatcaaatcactctatctgtttgtatgttatacaaaaaatgtctcccttttttactttattacatgtttgtgagttttgttatatctatcctatatctgtatgcaatgttcacagagtcaaatgcccacaccatatagcatactatgaacgccatcgattccgttcaatttttacttatatctggaatttctgttctttcattcaccttagctactgttgagtgagcagctggatatggagtttgttcgccttcttatagtaggacatgtacctttgtgatctagtttgactagtagtcacaatattgtgtaatgctaaaaatgaatatttgcattgagttagtgttaagattttgatattgtcatcttctttgctagttgaaataatctaattgaattttgtattaataaatacaaacagaagaaaaatattgatgcatctactaagacttgcatcattttgcaagaaatattttgaaacaagaaccacatagtttacagctatgaccatgaaaaaactaacgaattgtgttgttgaatgggcatttgttgtagaggacattgagtttcatctatttaacaattgatctgtctccatcatcattatatacttttcattctcattctcattgattcatgtgctttactagcatactataattatttgctatacgtatacaatttgggttattcttctttctcaccaactaaattttcaaaaagatcgcatacggattattggagcacatcttggagctctccctcagccttgtgccaataaagctcctgaaattacaggtagctccaaccgaagtcggcctcccattacaacccatgtgctggacactgcccgtggatcacctgcatctggaattgaagttcacttggagatgtggaaggattcttcagctcctccatcattcagcaacaaagatttcagcggatgggcaactctaggctattcagttacaaacaatgatggacgcagtggccagctgatggacatcgtggacaacattgctccaggcttctaccgcataagcttcaacactagcaagtattcgcctgcagggttcttcccttatgtcagcatcatatttgagatcaaggagaaccagacggcagagcattttcatgttcctctcttgcattcccctttctcattcaccacttaccgtggaagctaagttgttaatttacgtgtaattacctctgttgggatgttcaaaacaactatgtaaacttgacacttccattgtgataaataagctggttccatgtaagcttttaataagaagtattgttgttacctatgattaaacggcaattattgtcgtgtcaatctttctaccagttatatatacttccccgtccggaaaagaatgcaattctagttctatctgatctagtcaaactatcgaaagtttgcccaagtttatagaacagagtatcaatattattgacaccagttaagtgtattacggaaatacattctggagactggacatggaaaacttttagataacaaatagagatactgacggcccttttagtaactactactataggtcatatacttttgggaaatgtaacatcataccaatgctctgagtctttcagaaactcttgaaacatctatgcctattcttgagctaaaggcctgcagttaccaagggaaagaaatggaattgcgtgcaagttagaagttgtatagcagacactaaatttagtatttgttgggtgatttttgttcaccaaagacagagagtgaaaacatgcagatgtatggacacaccagtttagtttaatttg

SEQ ID NO: 3498 - DNA, 15121 bp, Sorghum bicolor; identical to SEQ ID NO: 3490

SEQ ID NO: 3499 - DNA, 3331 bp, Sorghum bicolor
agatttagtttgagtatatttcataattagttgacgcttaagaaatgtgatcagttccctgtgtaatagggcttagtgtggtgctttgactctggtttgtgttgctcatttggccgtaaggcggttttgcgtttgatgcacagtatactcttaaccgaacgatgtatatcactttatggtagtaaagcaggggaaacttattactccctccgttcacgaaagagtcaatttctagagttgtcctaagtcaaactttttaaactttgaccaaatttctagaaaaaaaatgctaagatttatagtatcaaattagtattattagattcatcatagaatatattttcatataatgtgtattttatattatagatgttgttacttttttctataaagttagtcaaactttaaaaagtttgactggcacgggtcttagaaattgattctttcgtggacggagggagtattaaaaaaaatagttgatgcttgcagaattgcataacaaatgccaaagggcactattgatgtgcctttcagacttccattatgcttttttattaagtacatgaatgcaaataatgcaactacaatcctgtgatggctagagatgcaaggagtttgttcttcttcttttgatgtgccaaacagccccgtcaccccatcagttcagaaaagagagaagctgctgctgagagcattgcaaccgtctgtcagcgtacagccccgtctagctctgaagttagaccgcctgaaggatttcagccgtgctcgttttagaagacgcaagcgaaagggtcatagatttgctagatgcaacgcaagcttctcaacagcggctcctctaaattcagtatatagatagattattaacgctggaatgcgtagaacaagcaggcgagcacgatcctcatgagaactgtgtactgtattcgtataatcgtattagcatgtggttgaactttggacttcgggtcctttttatgcaagtgatatggcattgggatgcagcccggcagcccgctaacaaacaggctggtgttttattaacctcggtagcttgctctgagtatgcacacgcatgcatgctgctattgctacgaagcatgtctgccacgtcagcgtccatactgcatacagcatactactgcatatataccgcacatcaagagtaaccaaaatagtaatggtctagattatttacatcttttttaactgaggtagaaacactgccacactagagcaggaagtcagaagtatgcgttgggaaacagcacaattgcttggctggtcactggccttttcaatcgccagcgacgattcatgcaccatgcatgcgtgcccatatccccccctcccccctgaatatacacggacacgtcccattttcaaaagatcgaaactttttgtagtgatgcaaaaagtaactttctttgaaatactgacgatcccataatatccgtgatcaacgtacgttgtcaaaagcgaaaatttaggcacgcacgtgccacgcacgtttgaaatgtactccgcgcgtaccactacgacgtaccaagcacatacagatacagtatgtctctgacaccgtgacacaatggcgtacgatgatacaacaacaacagtagtacccgattcatccattttcacgttccatctttcccgtgtgacaactcggccacgcccgcagacgacgacggagcagtacttcacagaatcccccgccacttgtcatcaacagggcgcgcgctggcgctggtgtgcatgcatgcatgccatcgtcccttgagtgccgatgccgtgcctcggtagacggtagctagagtatagtagcctgtgcttgctaccctggtcaacacatcgtagcctcctatttaacgtatcctcacacatcacaagaacggcacgcactagcgcagccagtagccaccacaccactccattcaccacgatcgagcaataaccctagctagcttcaggtagcgagagcgcgagccgggcgccggccaatggactccagcttcctccctgccggcgcggagagtggctcggtggtgtcgggcggcgccaacaatggcgctgcggctcagcagcaggcgccgccgctgatccgcgagcaggaccggctgatgccgatcgcgaacgtgatccgcatcatgcgtcgcgtgctgccggcgcacgccaagatctcggacgacgcccaggagacgatccaggagtgcgtgtccgagtacatcagcttcatcacgggggaagccaacgagcggtgccagcgtgagcagcgcaagaccatcaccgccgaggacgtgctgtgggccatgagccgcctcggcttcgacgactacgtcgagccgctcagcgtctacctccaccgctaccgcgatttccagggcgaggcgcggggcgtccggctcgccccgggggcggccccttcgcgcggcggagaccaccaccaccaccaccccctcaagtcccgcggtcccggcggcggctccggagccgccatgttaccgcaccaccaccaccaccacgacatgcagatgcacgccgccatgtacgggggcaccgtgcccccggcgccggggcctccgcaccacggccacggccacgggttcctgatgccacacccacagggcggcagccactacctgccttacccctacgagcccacgtacggcggcgagcacgccatggccgcgtactacggaggagccgccgcgtacgcgcccggcaacggcggcgggagcggcgacggcagtggcagcagcggcgggagcgcgtcgcacacaccgcagggcagcggcggattcgagcacccgcacccgttcgcgtacaagtagagttcgctcagcaaataaagccatcgatctgctgatgaggatctgcacgtacgcatgcatgtatcggccgggcgcatgcaggtcctagctagtgtgtgcactgctatttaagttgaattgtccccggctagcagcttattattttccttaaaatgtcagtctctagtttttagtagtagtactgttcaatgcttgccactatgtagtattgtgttcgggtaaccatcgatgaaattagttcctgcatgattttcttattgactgttcgtgtttcttctttcttgtttcactgaaatttggcttatgctgatgtgtttacattaaaattctgtgaggggaagaaaatattgttcatttgctaaaaagtatacagcagaacaggattcacacaactatggccttgtttacttttctaaatttttgtaaaagatttttcgattttgcaacacatgcatggagtattaaatatagatacaaaaataactaattgtacagtttga

SEQ ID NO: 3500 - DNA, 7477 bp, Sorghum bicolor
ggctagacgactgccattgtgaaaaaaagatggtgtatagtaaatacatatcaataaaaaaaactgaactgtacatcttaatttctataacaacacaccatatactgccaacattaaaactggttccgcgaagcacctcctttttactaaagcgatccaaaaccttgttcgcaattcattccggctgggcctatttagtcaccccagccatgccaaaagatttagcatcaaatattttgcaaaaaagtttcggcattgtgaaatttggataaggccttgtttagttccctaaaaattttgcaaaaattttcagatttctcatcaaatcgaatctttagacgtatgcatggagtattaaatatgggccttgtttagttcactccgaaatccaaaaagttttcaaaattccccgtcacatcgaatcttgcggcacatgcatgaagcattaaatataaacgaaaacaaaaactaattatatagtttgtctgtaaatcgcgagacaaatcttttgatcctagttagttcatgattggacaatatttgtcaaataaaaacgaaagtgctacagtagcgaaatccgaaattttttcggaactaaacaaggcggaattgacaagacgaatcttttatagtttggtctcgcgattgacaatccgggtaaaataaaaattaattttacagtttggtctcgcgattgacaatccgggtaaaataaaaactaattttacagtttggtcggaattgacaagacgaatcttttgagcctagttagtccataataggacaatatttgtaaaatacaaacgaaagtactactatttctattttgcaaatttttttaaaactaaacaaggcctaaggtgtttagatgcaccaaaagttttagcattttgtagcaccatattaaaaggagaagagaggtagctcgtggcccaagatagttttgtacagttttggacctcaagagtcccaaatgctaaaatttttacaagatcatgttcttatattttttttttaataatggtgtttagatccattttataaaaagttaagctaaaataaaaaacttttggcaaatatctacggtcacaaatatcaaacggctatagggccttgtgtagttccaaaatattttgcaaaatcgacactgtagctctttcgtttgtatttgacaaatattgtctaattatggactaactaggctcaaaagattcgtctcgtcaatttcgaccaaactgtgcaattagtttttattttttgtctatatttaatacttcatgcatgtgtctaaagattcgatgtgacaggaaatctgaaaaattttgtaaaattatctgggaactaaacaaggcctaggtggctgcctcctccttcctcatcagtggagactggagaccggagaggctccacagttgtccgtttcaaaccgcggccctgctgccggtggggagggtccggtccgccgcccgccctgcctgtccccgtttcatcattatagtaaccgtagcagcagcaggtttacagggcggagagagagggaagggaaggggaagccgcgccgcagtctctcttctctcgcagtcgcaggcagtgcagaagctgctgcccccctgcccctgctgcgtccgtcgcgtgcagctgcagcggcagcgtgcggcccgcccgcttctcttttgcccgcccgcccgcctcgctctgctctgctctgctctgctctgctcgcttccttccctcccccaccagcaccgaggaaaaaccttttttaaaaatcactcccacctcgcgctcgcctcgcccgctgcgacagcgcatacgccctcccaccacctcccgttgcgtatacacacacacacacacagcgtagcgtatgtatctacggtgactcggggggggggggggggggcacccccccaggggggggggggggggcaccaaccaaacaagggtttcttctccggggggggttgcagcggcgaagggggaggcggatctggggagcgatgggaaaccggaaaggggggcggcccaagtccgggggggagaaacggttcacccccccccaggggctctacgagcacaaggacatcgaccagaagaagctgcgcaagctgatcctcgaggccaagctcgcgccctgctacccgggcgccgacgacgccgccgccgccggaggggacctcgaggagtgccccatctgcttcctggtaagcacgcgcgcggagatctccattcactcccccccaccctccttctctctctccttctccatctcccgctttgaatttcgtcgtcggcggcggctgagagcttcggcgggggattacttaccgggtcgattggcggttgattctgttggatttccgttgccacgattctgttaccgggtggggaggtcgatgagcgtgcacgtggttccagatgctgttgtggaacctcctagggccagggggtttcagtacgcttaaagccacgtttcttctagcctaatagcacaatttgtcgactagttctgcaaagtgcagttacagtggcgttcgtatttttgttctgtgcgcatgcgttgttatcttctgcgctgctcctgtacgtgcattgttgttagggatattctaggggatgtgtttccacaaaggtcatagggccagcagaggtttagtacatttccatgttttcaatgccttgactgtttttgcctgatacccccagagttgccaacaactagtgcaaagtgcagtaacggtgtcatcattctttgatctgtatatatgtctgcggtggtatctgctgctcatgctctgctaggacatcatactgtatatgtacgttgtgcaaaatgtgctaccatgttgtcttaagattgttattacaccaaatttgatgcgttgatcttgttgtttggagatttttctgaatttcttttcgatggctaaccgctgtgttatatgaggttttgagtgccaatgcctcactgattttaattcctggagcaacatggcctaagaatgttctactgttctatactcctatgcgatgttaatgttgtagcaggcttgcacgtcgcttgaaatgggcagtggtacttcaagatgctcctgggatgggtgtatcatacaggcctggctagaaactgctctagttccatacctaataattagctctataccaacgtatttggtccttttgccttatggttgtctaattgcatcatcctcaatgtgaatgtggttatgctcttgttagctgggattttaatctcattgttattgtagtgcactcagtggtttggttgtgcccgattctgttgtatgaaattttgttcttagatgttttcagtagctcataaaaaactggaaatgacattgattttgtttgcatctacatggcttagtcagttgttttttgtgttactatagtagcacatgtactgcaattctgttgcattttaattcctagcttcaaaagtacttgaggaatttggtcaatggtagtgaagaataagatggtctatttcttagaagtatttttggcattcaggttatttatagctgtttaactgatcggatagaaaaataagctgctttgtgcaaccactgtgttatttctcctcgagtcatttcctaataactaataagattgttttcattcatttgttgcagtactatccaagcctcaaccgttcgaagtgttgctcaaaggggatatgtacaggtaatgcatccatcctactgttgatttaccaatcccacacctgcaaataacctttgcatatcctatttgacattttacagagtgttttcttcaaatgaaaccgacccatactgcccggcctacacagtgagtatcctttatttcatctcattttagtttcatactatttggtgatctacaagtcttcttatgaaaaagaacttgaccactgaaggtgcccattctgcaaaacgcctaattatgctgtggagtatcgtggtgtgaaaacaaaggaggaaaggagcatagaacagtttgtaagtcttatcttttaaatgcctgcatcttccatatatgcattgccaacttctgtacagtctttagactacaatctgcagttgctgtaacttatgtataacatattgcaggaagaacagaaagtcatagaagcacagttgaggatgcgccaaaaagaactccaagatgaagaagctaaaatgaaaagaaaacagagcaggtgttcttctagcagaacagtaaccccaacaacggaagttgagtatcgagatatttgcagcacatccttttcaggttagcagtggaatttaactaatatgctcacttaataatgctatctttctgcaatctgcattgtagtcttatcacttacatagccataatgtcattacctctgtagtgccatcatatcaatgtactgagcaaggaaatgaatgctgttcatctgaaccttcatgctctagccaggctaacatgcggcctttccattctaggcacaaccggtatgttcatgctctctctttgatgtttcacatgaaaccattcgatttttgtttgttgtaacttagaatttgcaagatttaaatattcctgaaactttagtttgacaagaaattatgtttaactgttgagatgaaatcggcatctaacaattgtgccacctgttttgcttacagtgatgataatgttgacgtgaatctggaggatatgatggttatggaagcaatttggcgttccattcaggttagtggacaggaactatttcacaagatgtgcgcagtgcatgacttgaataagactatgaatgctgatttatattgattttccaagagctgcacatagaccaacaattgcctaaaataaaagtttgccagtatcaatgtgcaccatctgtagttaaagaagcatggtgaaagctatatgctctcttagaaagttacagcatttgtatgttaaatagttatatgctctctcttaaaaaaaataggattgtgtgataacatgttgcatgttgataaacttttgaactgtcctgcaaatctcacatctgtttgttgtaatgctaatatgtgtaagtaatttgcagataagcatagtcatgttactgggtagggtctatgagtttttcatcatccttctcttttttttgggtaaatagttcttgtcagcatcagtatatccatttaacaaatagttcatattaacttctagtcgttttctgtgatccagagtttggctgttcatgttttcattttctacgaaatcttagctgtctgtgttctgaatgtcaagttgaactgatcaaatttgttatggtgattgcatgagctaactttgcaactccagattgttatccaattaagtagatttcgaacttgatttgtttttgggtgctagtttagagaatggagtcatcagcaatatggttttgtggaatgaatgtaattaggtctgtgggataaacaaaattttcttgctacaaccactactggcaaaaagagagtacaaaaaattcccatatccatatccatatccataatgctggctaatacaaatctttctgaggtaattagttttgagtagtaccataacagggcaaatctgttctatgcatcaattattgatactccattccaaatttaagttgttctggcttttctaggtacgtagcttttctacgtatctagatatatgtctagatacatagcaaaaactatggacggagtatatgttactaaatctgatgggtgttctttgtgggagtttgcttctgacagaagtgccggatatgtgcagacacttttggggcatgaattgacaactatgttttctttcatttcatttgaatcgagtagctaaactgaaactatagtggaatgctctgtttgtttaatgagttttctgcacagttgtgtcctatttttataataaagccgatagttccctctaaaaattgcttggtattcccagttgtgtgcttgttgtttctcagtgcaagcaaattgcaagctacaaccaaccattgacatccagctaacgtagaacacctgagggctggggtcaagactcatcaagggtaatggcactgatgctacttaacgaaagaccaatgtgtaaccatacatagtatcaattgacatgatctctaggacttcgctgatcttatcagggctataataaatgagaaacgtctaagatactcctaggctgtttgtcattataatacttaaaatttctttgcatagagaaaatgttctcataaaacagttaatggtaagattgacgagatcctttggggacattttttgagattgatttttacttggatcaaatccaaacaataatcttggctttgaattaatgttttgctaagttaaatcaaactctatatctgtttcttatttgtttctttaccttagcaggaacaaggacatctagtaaatcctgtttgtggcagctactttcctgtaatcgagccaccatcacgtgaaaggcaggcgtttcttccagctgcgcctctagaaatgcctcatccaggtggatactcttgtgcagttgcggctttggctgagcaccagccagcaagcatggatttctcttacatggctggcagtagcacatacccagtgtttgacatgatccggcggccatgcaacatgtccagcggaagcctgtgcggtgtcgagaacagttcactagacacctggagcgggatagcaccaagttgcagcagagaagtggtaagagaggagggagagtgctcaaccgaccactggtcggagggtgcggaggcaggaacaagctatgccggatcggacatcatggcggatacagggaccatgcaaccgctgcccttcgctgagaatttcaccatggctccaagccacttccgcccggagagcatcgaggagcagatgatgttctccatggccgtgtcactagcagaagctcatcatggtaggacgcaagcgcaagggctggcatggttgtaagttgtaacactaattttgacacctcggtgccctgcccgcccctttctgttgcgctgccgttcgacttgccctccctccctgcatctctgctctttttttgccaccttgtttggcattttgctcttcttttgttcttttctttctttttgcatgtgttgcttcatggcttgatatagatcttgctatagtcctccattgtcattgcttatatgtatgtaaaatggaatatgtggaaataggaaagaaaatgggtcaaagttcttttgctggtgggatgcgcagtgtgttttcgcattgcaaagcattctaagatcttgcaagttgcaggtactcctgaacctggaacgagcattctaactactctctccgttgacatgtttttggatcttctattcttgtggcttgtttagatgtgaattttttttggattttgctactgcagcactttcgtttgtttgtgacaaatattgtccaattataaactaactagggccaaaaga

SEQ ID NO: 3501 - DNA, 7477 bp, Sorghum bicolor; identical to SEQ ID NO: 3500

SEQ ID NO: 3502 - DNA, 7451 bp, Sorghum bicolor
gatgatccactgatcgacccagccagtccaggcagagcaccgtaacgggtgaacggcctagcctcaaaaaaatatatataatcgcttgtcttatcggcgatattttttctaacagccaataatatttttctaaaggagtcttgccacactttttaactctatgacatgtggagcctaaaaaaatcatgtctaaacttagttgtcaaccaaatacttaccaacctgattaaacttgcctaaaataaagtatgataaactgtggctagcaaccaaacagccccataatcacattcttttgtggctggtgctctgaggatatcagaagagagccaccgccctttatattattttagtctcatcctagctagcccggcccgtatcactgttccatcactgccaataaaagacagaaaccatacatggccacgctcgactagctgcacccaactctagaacctaacctgctagacctactgtttctttcaatgacttttgcccttttcttgtcgtcaaacagcatctcttggtcgctttaatcaaaaaaaaaaaaacacagcatcggtacgtacacgtcgtctcctgtagtatatactagccccacacgtacggccacacgatacgcgtaataatgttagccaacactacaagatgtcgtgttagaaaaaaaaaagagtacagattactgactttgagtactcatttagcatacaagggtccaaggcccccattggaacctaagattaaaactgacaaaaaataatttagaaatttaatagaaatcagtctattttataaggaaaatagagaaaatagaaaaaaaaattgtaatagtgtcatgtgggcaaagtagtttagtcgcaaaggctaagaacttaagaagctaaggcgatcgaggacagctatccacggaagtggctctctgctatcaattagaggcccaccattagctggtgctaactagaatcatactattagagagtgttgagaagtgattggcagcgtaatgtctgtgtaagcccaataactgttggagaataatgaagcaataacagtattattcctgattctccttcaataacagagcataattaaggggggaaaacctcaccctaatcctctggatcaagctacgaagatgcggctacctttgacctcgacgtccttggtatacctgtttggctggctgatatttttgactgatactgacgctaatttgttgtgaaagagaaaaaaaaaactattttatactctgtaattgaaaaaggagtgcagataaattagcccgtgtcccgtggtgtagatagcgcgctggagctggaagcacgtatagttggcaatgaagcgtgtgatgacaaatcatctactactttacgatccaaggaccagcatggctttatagacaaaagccaagcatggagcagcacatgtagcagcgcgacagacgagaggacagagcacgcatgcagcatgcagcgatcgagtagtagtagagggagtagctgccggccgggagcccggagctacagtataggaggaggaggaggaggaggaggaggaggaggaggagtactcttcctagctacagtagctgtgcgttgcgacgagcttctgcattgtgcattgcattgctgcatcatccgatccgtttggtttcccgctcgctccacctcctccttcctcgtcgtctcctgccggctgccactgccaacaaagggcgcgccacgcacggcccggccggtccccccgcactacgcagcagtattccggaaagaaacgaggcgctgctcttgctgctgctgctgctctctcccctccatcattgccgcccgaaacggcaacccgccaccgtcccactgcactgcactgcactgcactcccctccatctccatccatgtgctcgcctgctgcaccacctcgctctcgctcctccactaccgccatttaatccacctcgcctagctcgctgctccttgcacactgctggctggctgcctacctagctactcctagctccctcctccatcattattccggcctgcaagcacacttgctcttgctcgatcattaattagttcgtcgctcgatcgatccctcgccctgcacgcagcaagccccgcccattctgctaccttctgcctgcgcatgcatctccctctcttccttcaattcatcagcaaagccttgccgcgcgccgcgtgcgtaacgtaccagctgctagtagtgcactagtgctacgccgccgccggctctctcgtcgtcgtcgtcgttgacgatcgtcgttcgtccagtatatatatatatatacaccaattaataggatcggataagaagaagaagctactagctagaacagataatggcggcggcgccgaggcccaagtcgccgcctgcctcgccggacccctgcggccgccaccgcctccagctcgccgtcgacgcgctccaccgggagatcagcttcctcgaggtatgtatgtatgtatgtatgtacggatcactcaatactagctaagctagctagctaccacctgcatgccattcttcgattctagctcgcatatatattatgctgcagtgctcgaccgatctttgcagtttgcatcacctacctatcctcttgctgccttgctcagctgcgtttgccattttccttctctctctctctctctctctctctcttatgtgtttcaaaaatgcatatataaacaatcgcattcagaaaatgatatacaaggataaataaagtgtgcgtagtcaacgaagttcaaatttaccagttgctggtggctcctctccatatgggccggccggccgagaactgaaacgctatcagcagtagtagatgacaccgtttaactttgaaagcttaattagtttaatccatcctagctgtgctaatggtcagcagtttaatctctctctgcctctgggcacgtgcggatcgtaccatggatttgcgcgcgtgtcaagcctcaactctgctctttatattccgtttgcctaccatttttttcccacgattccgactcgtctcagagcttggattcttcttctcttctaacctgctgatgatgatattatactacgggcgtgtttagatccaaaatttttttggattttgacattgtagcactttcgtttttatttaacaaacattgttcaatcatggagtaactaggtttaaaagattcgtctcgcgatttacagacaaactgtgtaattagtttttatttttatctatatttaatacttcatacatgtgccgcaagattcgatgtgatggggaatcttgtaaagttttgggtttttgagtgtatctaaacaaggcctacattacttctctcacacacacaatctcaaataaagcactattactactactactaatgatttttttttgtctatctatcgatctggctagggtttaagggatctaggatctagtacatggaagaagatacaagggccggcccacgctttgattattgcctttgtgtcacctgcgtatatcctaaatactactccgatcctatatcctatcatatggcttggaggctttcactacaataatataatactacacccatgtaggcgtcagtgtgtcactataatgctacattagcgctaaaccatagcagctgtacttgcgaaaacatgtttcagatcagcaggctcttcctccttcaaggcttcaactcatcatgaaaaatttcgtccagcccggcctggcctttgcttgccggacaccttctcgttttaatgccttgttattatttatgttatatctgaaataatatatcagcagcacgcatactggacataaagttgcttctcatggtgccacatttccaactactcatccctgtccagcagcctgctcactcatcacttcatcagagctcagctacccagcaataaaatattcccgaaaacagatgttaattgaacactattatttactgcccgatgagcctgcaaaaacacagccctgcattggtgccatgcctacgtgccatctcggtatgtaagagttaattaatcttaactgacaaatttattcaaatactccacaactgatggttctacttcaaactgatcatgacctactaggctaccacaccagcttgtgtgtatgcgaatgcatggcttccttccttgatgcatatagtacctccccccccttacataataaccttaggccttgtttagtttctaaaaatttttaaggttctccgtcacattgaatcttgcggcacatgcatgaagcattatatatagacgaaaataaaaactaattacacaatttgcctgtaaatcgtgagacgaatcttttgaccctagttagtctatgattggacaatatttgccacaaacaaacgaaagtgctacagtagcgaaatccaaaaaatttcgcgaactgaaccaggccttattaatttgttacaagattgtttgtttcttctgttccaacacagcaacgaagcattatatcaaaaaaaaaaacgacgttgcattgatgccaaaatatgctggcgtacggccgtttgcatatggttgcagactgcagtatctcgttctattagaatattggaaagctcggcccccagctggggttttcttcagtaaactcaaactttgaatgtgctgtgtgttaaaaatatcccagacgacaacgcctgaaaagttgacagctgaacacatggcttttacttaccagcagtatacagtagtatttactattaccaatatgatattattatattatatatcctgaaacgctcgatttaatttctttgctgcagggcgaaataagttccattgagggggtccacgctgcctccagatgctgcaaagagtaagctcaacaaatactccattattactactttgtgtacaggggaccttattacttgcagtgttttcacaagaatggctgaaaatgctagtatcagaaaataattcatgaacttaatttctctttaatttaaactgcaaaacatattctcatccaaatgtccatgcatccatccattgttcttcggaatagatactggataactatggttggataactagttttataggtttctatatgagtaaattgaattgcttctctatatattgaccgatgaccatgtggatcgtcggagaaaccaaagatgattctctgttgattgcctctctttaataaatctttgcagggttgatgagtttgttggaagtaatccggatccattcctaacgatgtatgaattttcaggttgtgaatttgtctttaacttagcatgaatgctgcatttttcttattatctctttttaaaaagcagtcagccagagaaaggaagccatgatcaatctcagcagtttctgaagaagttccggtacttcctttgctcctcacaactcttaatattgttggttcttaccattaccagtagcacacgcgcgcatatatagtaatgttattttgttgtacgagaaaaattctaccatcattatctcctaataataatcctaaaatcattgttaggtaggagaatgtacacagaaagataacagtctctgtatatcgtcacaagacataaaactaacaccagccttgtttacttctacccaaaaacctaaaattttttaagattctccgtcacgtcgaatctttagacgcatgcatgtaatattaaatatagacgaaaataaaaactaattacatagttaggtcagaatttacgagacgaatcttttgagtctagttagtccataattagacaataattaccacaaacaaacgaaagtgttacagtgtcgtgaaatctttcccatgaggaactaaacacggcctaaaactgaaatgaatgacacatatatctctccattattactgtctactgtcctattgagaacacaacctgtccattttctgaaaagtatgcaagtgcatattcattcagttcaagctgtatgaagtttgtgatcatctgcgagcctcagtcccaccagcgtacgttctagcagcttcaacggctcgtatcagatctttgctgtttttttcctctgcagcagcctgcacccctccactgtactactgcactacaaactttcagagcaattaccttgtcgtttactactttaaactgccatgccatcaacatcacattatcagccagagcaatcagtttgtcgatcgttgtctgcactaacacttaattgagcatctaaagagctacttttcagaaccgtcacctcattgttactataattgtttcaattattcctcaacatgccgtcagaaaccatcagctactgaatatgtccgtcagtaaaccatgaaatgatgctgctgtttgttgctagctagctagcttgcattgggtttttgggtgaatgattgacaatcgatcacggagcagatgaagttgcttactcttgtgcatgcatgcagagcaaagagctgcctgagctactacctctcgtggatctgctgctgcggcggtggcggtggcggtggcagtggcgggtggtgcccgccgtcgctgcagctcaagaggccagcggcgccgagctgctcctgcgcgccgcggctgaggaagctctgctgctgctgttgctgctgccggtgccgcgtggtgtacgccggcggcgccggcggctgcgggtgctgcgcgccgtgcccgcgctgctcgtgcgactgcacctgcgcctgcccgcgctgctgctcctgccccaggtgcagcgccgcgtgctgctgcgccccgcgctgctgcctgtgcctatgatggccacatgagaaattttgtgtgcatgctactacccggagaaccgtggttttgatgatggatgactggcattttgcagcatgttttttttttgtttagtgtcggcgacacgagtactattgctaacttgctgttctggttcgtgctgcatgctgattgctgaatggtgtcgattccacatttccactgtgagtaggccatgcccatgcagctctagttttacgtacaggacaaaaatatatgcttaggtttcactaagatggattcagacttgaaaagattttgccaagggttccaggtgcaccgtagtaccgtaccactttgccaatgtggtcactctttactttcacacactttgcaaaaaaaaaaaaaggttgatgtagtagcttgaaaccccgtgatacctccaactgagccaacacattgttacagtactgcttaagagagacgcagcacgaaaaattcttacaaaaattagaaacattagactttaaatttggtagattctaatcattactgtcaataataaatagccgataaatctattatatttttctaaaaatattcacctcacggttattatgaaaaatacacaaactaaatttgtatctaagttacccacctctactgttgtgaaagacaattttaaaaataaacacctaatttgcatctaaatt

SEQ ID NO: 3503 - DNA, 3392 bp, Sorghum bicolor
gtcagttgctaaaagttcatattgcaatgaactgtccgtttctaaatgttctaacatgccgtccgttgctaaaagctgcggtgatggacggtccgtcgctaaagatgaagtctgtcgctatatacatacaaccacggcttcaacagcaactgctgaggtctgtcgctataacttttagccacggaccgtccatcgctatacaccccttacagcaacttcaagtcagtcgctgattaagggctgtggtgtagtgggcgatcggcctctttcctcgcggctcgcgcaacggcacggcaacgttcaactaaccaggccgcccagcaaccactgacgtgtggggtcggccggttgccctctccgtcgtcttcgactctccgtcgctgacccccggttcttcgtttgacgcaactgtttgcctagaacgtacatattttttaagaaaaaaatatattttgaaaaaataaataaaggaggtagtaaaattatactcgtgtcatttcgaaatgctaattcttgtatatgaactagacagattcattttagcaaaacaatgggaatgcaaaatgtgtatgggagtatgaacattattgtctatactcttatttcaagttacaagttgccatggcttttttaatacataatatatatctaaaaaacaaataacttataatatgaaaaggagagatatttcttatagtctatgaaagcagtattttgatcgcgaatggaattgcagggacaaatggccattgcctagtactctcttcatccaaaaaatgcaattctcatttttagatgaatcaaacaatttttaagactatttttatttggatcctagagctaatatgaaatagttagctactaataattagttcctttagatccaaacaaatctaactagtagtcttgctaattgttagtagaatattcaactaataaccatttttattaattaggccaaactagctaaaaaacaactaataggtccttattggatctatctacaatctattggttcgtagctagtattagctagtactagtgaaatagttgttagttagatatttagctaataattagttaacctattagctagatctatttggatcaaggagttaaatattatgtttggatctatagagttaaaaagttatctaactagtagtttatatctagtattagctagctaactattagctggtttgagctaactaataagacatttgctagttggttattaactaacaatttgttggatcattcagacccaaagtagctaaccattagtttatggatccaatcaagatctaagtatcattaaattggttatggaatatattattataatatatctatttagaaatataaatgttgaatttttttatgaataggtcaagctcaagaacatttgactagtcttaaacatagaattgtattttcttgaaccgagagactttcttgaaaatatgtagttccactgtccttaaaaaaatgtaattatgagattcgtaccagtcaaactaggtgaagtttgaataatattatagtaaatagtttagcatttatatctctaaataaaattattatgcaaataaatttaatgatatttattttgtaccataaatgttagcactttgtgtataattgtagcaaaaataaaaatatttatgagcccctccacgccggctggggtgggtcgcggactcgtacggccccgcaaaaaaccggatttgatagcagccgatacgtccgccgcggcggctgaataggagagagaaaccgccccgacccctctctctctcctcccccttctcgacgaacccgtcccacaagcacgcgcgacgcgacgcgacgcgagccaagaggtggaggagagagagagagagaggtagagagaggaaaaccccgcccccgcccccgcccccgcgctcgtccaggcagccgtcgtcgacgcaaacggcggaggccacagagacgccacgcgagggagcagcccccgcccccgccgccgtagcagcagcagcagcagcagcagaagcccccgcgcgcggccgccgccgtccccaattcggcgctccgatcgccggatctcctcgccggcgccgggggccccgatcggcccctcctcatgcccgtgcgcttccgggggttatctcgcgcgggcgccggccatgtcggacctcgcttccacctgcaaggtatacgcctgcccgcgcccaattccgcaacccgatctccgccgattcccctcgaatttcccgggggattcagctgggcccgtgggattcccgcctctgccgccgccctgctgtcgcccggcggttaattccgcgcccaggtttagatgcatggatggactggctgagagctccgaccctagtttttttttatccagctctggctggcaccagtgccttatttccaaatgtggaatcgcttcggcttcttagtccgggcatgctgcctgatgtagtctagccccgagctttggatagagctgtgtgtgttgttgggcaggtgttgtatgctgtcttagctgccgaatcaacctctcatgtgttgtactgattgataggctagtgctgggtccttcggttgcatggcgcagtactcgttcaagctgctcctagctcgcgcgtggctaagcgacaaaatttgctcttgataagtcgttctagagtcagtagttctgtttttttctggtccatggatcaaccatggcaagtgtggcggtgtactccacgtgcgcagcaacgtgtaatggttgctcttgaagatctcacacgttgattctttccttgtttgtcacaggataaacttgcgtattttagaataaaggagctcaaggatatcttaaatcagctggggttaccgaagcaaggaaagaagcaggtcagcaaatgttttgctctcttattttggctttcgagcactttgtttctactcccggatgtgtacgattacattacaactgaatggaagcatggcatacgagtgtccagggtgaactagccatctggcagtacatcattgttgggtctgactgctgtagtgctgtgcacgacttggtttggcagtaaccatgggtttgtaggacaagcttcaattcaatatttcaatttcagaaatcagaaccatcttcttttttcttccctccttgaatacattcagaatctcatcttcactatacttgcctcagctttgcacttgatggtatctgatcgatttttcataatcgttgatcacaggaccttgttgacagggtattggcaatattatcagacgagcaaggtatggcggtctttgctgcacatattgctcccccctattttgttgtctttaactgcagcattttcgatggttcaatattacttttcagttgtgctcaagcc

SEQ ID NO: 3504 - DNA, 13667 bp, Sorghum bicolor
  misc_feature (6359)..(6458): n is a, c, g, or t
gagagtgatggctatgccagcgtatttctacattggtggatgtagggcggaacatgtgagcaaaccaactaaacattcttctcttatagtttaaacctacagctgcagggaacccttagctaatgggcactaaatctgattgaagccgcaaaacaaggccttgtttagttgcaaaaaaatttgcaaaatgggtactgtagcattttcgtttgtatttgatagatattgtccaatcatggactaactaggcttaaaagattcgtctcgtcaattccgatcaaaatgtgcaattagtttttattttcgtctatatttaatactccatgcatgcatctaaagattcgatgtgacgaagaatctgaaaaattttgcaaaattttttgggaactgaacaaggcccaagagagacatccaacggaatacggatcgaagttgggtaaacttcacacgcattttgaaattgagctacgtacataaccgtggaggctccaattgtttccctagataaaaacaaggggaaacactgtagcagagagcagccaaaagaaaaaccctgacaggaaagaaagccgaagtcctacaaagcctagagccgaagtcctacgcccctagacccagcagggcatggggtcagtcctgtcggttccaactctctccagccgcacgcgcgtcgacacgcgtcgctcacttcctgacatgtgctctgctcgcctggctagtgctcctgccttcccctctctcttctctctctccgactcacccgcgtacggcaacctttattgcatccgcatgcggcatggctccacgaccacggtcacaacggctccacctacggtcctcctcgcaaagataaattgcggtttggacgtacgccagtccgccagcgcgagcgagcagcaacggccaacgggcaccggcacgcagacgcagcgaggccgagaggggcgcgcgctggtacgggctaactggcggcacatcaatcggctatcgctctctgccccgtcccctcgccctcgagggcggcccccaccaggccaccatgcacctcgcaaaaagcaacagctcctcgtggtgccgtggtgggcgagtgatcggtcgctagctgatggatgtttacttcacgacaagaaaagttttcaagtactgcaccatatatttataactattattaacaattaatatctaattatagattaattaaattcgaagttccatctcataaaatatatgtaaactatataattagttatttttatttttatttaatattttatgcatatatctaaatatttgatgaatgagttgaagttttttttgagtggaatcatcagtatcacgacgtcactgccaagtagatagatcgataaggccttgtttagttcgcaaaaatttttaagattctccgtcacatcaaatctttggtcgcatgcatggagcattaaatataaatgaaaataacaaaactaattacatagttcacctgtaatttgtgtgatgaatcttttgagcctagttactccgtaattggacaatgtttgtcaaattaaaacgaaagtgctacagtagccaaaaaacaaaaattttacaaactccgtacttgagagtttgaagagagagagagagcgcgcgaggcagaaggttggaaaaactctccaaataaaagcgtttaggccttgtttagttcctcccaaaaactcaaaattttttaagattctctgtcgcatcaaatctttaaacacatgcatagagtattaaatacatacgaaaacaaaaactaattacacagtttgtctataatttacgagatgaatcttttaagactagttagtctataattggacaatatttatcatatacaaatgaaagtgctacaatgactattttaaaattttttgaaagtctaaaacacacacctcgcccggccccaagggtacgatctatcgcacaataagcatatatctctctgctgcggtgctgcctgcttaaagcaacccaggactccggaaagagctttagagctagagagagagaagagggacgcaaaacaagctcgctaggaagatatgggtcgcggcaaggtggagctgaagcggatcgagaacaagatcagccggcaggtgacgttcgccaagcgccggaacgggctgctcaagaaggcgtacgagctgtcgctgctgtgcgacgccgaggtcgcgctcatcatcttctccggccgcggccgcctcttcgagttctccagctcgtcatggtacgacgcacacgcatgccgccgcctgcacctgcatgcatcctgtgtgatctatgtatattccgcaacgcatcatgcatctatccccaaattgaacgagaaattaattaatatactaaagcacaacacacctgcactttgggtcttttttcccctcatcttcccgtgcgctttcactttgagcatacgttttttattgtcaaaatttgccctctaaatttatggcttggaagattcgcaatttgctcacagatcttgtgtatctctctctttggaaagctttctctctcttctttctagtctttggcggctttgttttcatgcattcatgctgtctgtctgttcgtcctcgtttgatttggaatttatggtccctgagctcaatctctttgggaaattttctatcttccttttggtctggggctgatttcctttcccttcttggctgctcgtcatttatttaacatctactcttactacgtacctctcgtgtgatcactgcgtggtatggggtaaccaagatctggccacatgaacctagatctccctctattaattgtgttctactacttctgtatggtacaaggaacaagatattatggccatatttttgttcaaaagaatcagtggagtatatatcctcgcttttgcttacagttcatcatcaaaacttaggttttttcttcaccacaactacgtaaaattatatacatatgcatactacagttcttccacttcccaaggtagatctcgtgagcttgatggatagtagacctgtacctcaaacaagatttgtgtttttcaacttgttctcttgcaataagaggcaagagtaaaaaacatcagtccattatttactgccttcttccttccctttttagcattgtttctagactgccggccagttgccaaattccatatccagttatccactcccaagttttatttttactgcatgcgttgtgttttataacactgtgcatctcctttgtttttgtcaactcaattgatcttccaaacgagctgatgtgtgtgcttagctcactggtttcagtcactagagagctgtttgaagccctcatctgctggtctagatgctactgttccattattctctacacaaatcttctttactgttcagatctcgaaatgctatctcgcatctttcttgagtcccgtgtacagtcatatcaagcagctcagaatatacagcatgcaatattatgaagtctcaacgtcatgctttcatccatgtgcgtaagcagcataaaccgatgtgcagtgcattatttaaccgcatgcagaagcatttcatttcgtagttttttttcctgaagaatattcgtctatcatatctcagtgttttctggaagttgtagcaactatagaatatatactgcctcctccttttgccttttcgatctcatgcatggaggatttttcgcagtcttcagttcaatattattgtttctctgattttctttgccattttcacagattttcctcccttttagtgactccataggtggagaatttatggttatatctctgttgatataggcgagtcgtttgtatattatcttttcatctagtaaaaaattctgtatgttttaagcaaagattcagtcaaactcttgaaagaatttccatcaataaatttagaacatttatagtctaaaatgtaaaagtcacagatttttgcttgaaaaggaaattcatattctcataaatttgtagagatattaaaacattttaatagaaactataataacgatcaaagtcgtaactcaaatactttgaaatgtcagtgaccttgactacttttgattgaacgaactactccatatatatataccttctagtcactgtttggggtcaaactaattttaaaacttttgactatcaaatgttttactaaataaaaacatgaaaataatttgcgaaaatttattttgaataccactttcatgaaactataagtttactagatgtttttaatatatttgaatatataacatgcatagtcaaaattatattttatagacaatatgggcaatgtcgttgtccaaaacatcaagcattttccacattagagtgtatacatctagaagtgtttacataattaagtaataaaaagtaacaaataaaaggaaaaaaattagctatagtagtaccggcgacacatggaaatatgtatgtatatatatgcatgtacaactttattgatacaactagatagtaatagtatgtatgggcttgtaccatcattaaaattttcatattttattgtagttcccctatgattgttaaattctagtgtggaagcggcacaaagaatgttatatatatacatccactatgaatgataggaattcgacaagatctttgaagaaccatgctttatgttgtaagatataatttgtaaattttaaaaatggagtaagtgtgcacatttgtacaagtgttttaattaattgtttaaggcaatgttggcataacttggcatatattatgtcatcaactaggcggcaactgagcttaaccaaaggactaggggtgcagtctagctatataattgaggattagaacactaatgaacataaaatatcactatttaggccttgtttagttcacccaaaaaccaaatttttttgaagattccccgtcatatcttgcacagtttatctataaatcgcgagatgaatcttttgagtctagttagtctatgattggacaataattgtcaaataaaaacgaaagtgctacagtaccgaaaaccaaaaagttttcagaactaaacaagaccttagacaatagggatcacattgagcaggggtggccatggcctagcttggtcttaaccaagcttcgcctttgcaattaggtgaaggggctactgactaactacatcctagtgacactaaatattagggctcttttgtttcaactttgttttttacaagttagaaaatagaattgtccgaaacatgtttaattacattggtttataatgctgatgagtcacaaccttacattatcatgcattaaatctacaaaaggaactccaaactaactaatggattctagtacagccccaccatacttggcattacatggccttccacattttgcaatatggagacctatttgaacactggccggactgcatgaacataagcatatatggtatactattgtgattagagtagcaaagaaccatatcctaggaaacaatttctaaattacagtaatttgtttcttcttgtttccagcatgaaacacatttgattcttaaattggtttccaaagtaaagtacattattttgtttttgctggcatcctcatgtatgtttttgttttccctcatgcacacttaacagtgagaacctcaagaattttgaaaagatactttagcatatataggacctaaaaatagatggaagctactaccgtttgaagaatacacatggttatattaattaaccatgctatggatcgtgtcatattaccttatttacttccactcagtatatatatatatatatatatatatatactcccgggagtaactactcccactgagagtatactctggcggtaagttaacgggtggagtaaacaggctgagtaacatggatccgtttgtacgttggaggtaggtatatggcttccgtatttatctggacgtatatatgtgaattaaaaaaggccggtgtccatttaattaccggcaaaaacggatctgggaaacggtggcttgcttatatatgcatgttgctttgtttttgtttgttagtatgtctccatacgttcggctttaggtttctgtagatcaaaagttggtcttgtgattcaggttgatcgtgccagtatggataaagacgttgtggagatcatcgtcgtggaggattctggagtatgagtacatacgtaagagatccatacttgtttgaatggctgttatacggctgtatgtatatattctggtatgcacacatactctaatataggagtatatacgtatatgcatgtgtactcaagggatacgttactatacatgttttctagctatttatttagaattggtagttcgacttataatatgggcccnnnnnnnnnnnnnnnnnnnnnnnnnnnnnnnnnnnnnnnnnnnnnnnnnnnnnnnnnnnnnnnnnnnnnnnnnnnnnnnnnnnnnnnnnnnnnnnnnnnnatatacatacagccgtacgtataccagccattcaaacaagtatggatctcttacgtatgtactcatactccagaatcctccacgacgattatctccacaacgtctttatccatactggcacctacatgtcgatctatcgggtttacttgatcgtgaatctaacccgctaagacaaatgtggaagtgggcaagtctggttatatatatatatatatatatatatatatatatatatatatatatatatatatatatatatatatatatatatataagttgtcaacgtgtggcaatccataggttaggcatataatttaaacaccaacaaacttaatgagttagatcaaagagtcatggatattagctgacatcaaatcttgacataaattacatggaagagtcattggtcttcggagcttctagacctagtactttcctaattttacaacacaacttaattagtagaaatatttacccttggatccattcatggcttcatgcacgatgttgaatctccttttttttagttgtgattttaaatatgtaaaaaattatgtactagttaaaaaatatagtgctataactagtacatagatataaagcatataatattttggagttggctagaataatataaagcatatacttgaattcaaggactagaaaaattatctacagatattattaccatagtgtaaaccatatagattgcaagatgtttatctctattaatatatggaaaaatctagctacattttattgtacctagttaaaaaggcaatattgtacttttaatctctgtgggttgtagaagagcatctcactactatgtataaatgtggatagttatttggcataatttagagataacatctaggagctagaaaattgaccttaaacagcccattaatctacttgatgaaatcagaagttgacatttctgcgcatttaagagtttggcgtgtttagtcaaggtcggtatcttcaccaactttatggtatatatccaagtcatgggtcaaatgaagtatgtacgattgttgatttatattaccaatataaatgttacgatatcaagatactcgtacaggtgcatgttatagtgccattaattgtggcactttagttttgtagagtaaatatgtgttgaaactgcggacggacttcttttttgtctccaagtaggagaattgatcagtatgtggttattataaactaataacaaaccattagttctcagaaaaaaagggttatcattaagtactgatatgatcatcttatagataaaaaaaatttgttgccatgtagctataccttcttttgtggagattgtagagttacttgcttagatatagttatgaactaccataactccattagcatgttttttcacaaaagtacatttgtgtcacataaaagacaacatttttgctgttgcattcaatattgaattagtttatgtatgatactaaaagttcaattcacttggactaaacctccaatgggatagattaggcataacatatattcttcttgtagctgcaaaaatattctaaaaaaaatattcaagttcacagtacaacgaactggcattgccacggatcacggatggctgtgctgcacctgaaagtacgtactacatactgaacaacttggttggagtatattcctatgcttagatcagctctctgctacactgcatataatgcaagcagcgcttccatgcaatgcctctctctctctctctgccttggttggtgcctgttcttcatagcacatgtcagtcctaacacatgcacaacatcacaattttctctgttgcgttcacaccaaatttggaccctgatgggaccttgggagatagagtctcatttttgtcctgaaaagggtgcgatttattttcctatgtagctgccattggcataaaagaataaataagaggattatctataaaacatagacatggtgaagatcgagtaaagagaagggaagaaataagctaggtgaatggtatatgaagcccttgtagtttgtaaatcagtctcagctgcaaacactccatacatgtgctaaatatatatagttgcatttagcaccccagcatctctggcacaaaaaagcaacgagtttccaaatatataacgtacgactaactatatattcaactattgtgcgagggtatttgcaacttattagactaatccttggattttctatcataagcgcgtacatttacaagggaagtgtgaatgaactgtaccatcattacctataagcctattccctattcattgttccatgtcacactctttaaacatatatatattgtcttctagagagcaaatgctgcttacaaattacaatgtatgatacaggcattgtttcttagaaatcaaacgtcaattaattgatgacagtggcctcgatcgctcataacatgtgaatgcggttttcaaaaattgcttcttgtgcctagatatatcttggatctcactctatgaagacactatagatatatagtatgctgagttggtgcacaaaagcatcagcaaatttttataatatgtattgcacctttatacaagaaacgtatctaataaattggagtcaaattaacatattttcatggtgtgctgacatttggagcagcaactagaactccagcttttgttgtatatatatgaaaactagatgtaaagcataagctaattatgtttgttgggataataccaacgaaacttccttcttaattagtgaattatcactgtatgcaagtgttttatttttaatttgccgtgcagcatttctatttttgtagttaattagctttcaccagatcatggcactgtggatgtccactaaacagaatttaatacaatccttacaaaattaattaaggatttttaaccctcagaattatatatttcttttgtcaaaagagcaaataaaaggagcatcaaggcgaaatcaaagaacaatcttattttttttctaaattctgccattgatcagtttgattgccttgtgccaacagcatgtacaaaacactcgagagataccgcagctccaactacagctcacaggaagtaaaagttccactggacagtgaagtaagtgtaatgaattcttagcatcctttctcgacataataatgcatttgtatgttagggcaaaaatcatctgtaattttgttttataaaaaataataatataagctaacaatctgttgatagcttccagtgacaccaatcgcccaaaaaaatgaactaaccagatttgctttatcatcagtcaagtgatcatgttcatgtaattttttccaagctaactgatatcatactttatgtttagattcctgttttttaaattcaaaatggtacctttattcatttgcctcataaagtttcctaagcagtccaagaagtgtgcagacactcttgctcaacatagtctacaagggatatataggattggcctagggttgaatatacaattataaagaaccatagaaatatatatgatgttgttctactgtgaacgcaatattgttatgaattgagtttattataaagaaaatatttcctaaattctagcttaggtttggatggcattgaagaatcttgtcctatttaagtttttagatagacttgtgtgggtgctcgtacctccccgtttgtagacgacatatgtagggctggagacagacctaggacaacgacagtctccagaaacacaactttgatatcttatttttataaaaatatttaggaatatatgtatacttttatgaacttattttcaagacaaaatctattaatataaatttcacatttgcaaactcaacaatttaaaagttattgatgatctatattctcaatgtttgacctaaacgttatccaaaacgacttctaaatcctatacggagggagtatgtggttatcaaatgagcaagcaggacgtaagttaaagaaactattccttttgttaccaaatgtaagatgttttagttttaaaccttaagttaattattctctaactttgattatgtttatagaaaatacaccaacaactgcaacatcaaattaggttcctaaaattcatatgaagtattcctgatagtgcatttcattattgaatcatagatgttaatgttttttctaaatttggtttaaattagagaagtttaacttaggtcaaaattagaatgcctcacattttggaaatgaggaagtctatttccagtgctgtagagattgatttagttgagcgttggttcttagtttggttttcatcagccggtaaacgaaggagcaaaacgtcaatattttttgacatctcagcttagaggctttctccctataagaacaaaataaattgcagggaagggtttttgttttaaaaaaaaacaattgcagggaagatgagagctcaaattagccaccatttgtggccctgatatcaagctgacgggctcagccagattgggctgggggctgtacagctgggccggatacaaaagataccttatctatcttcctctcgcggagcccatcatgtacaatttcggcccatctctcttaccaaattaatggatgcgtgattctgatttcgtgataattttcaaagatttatttatatgggtttagtagctttgttaaagggcaacggatctagtgtaaattaataaattagtaaaattaagattcactcggtcaatatatataggaatgtactgtgaacgctatctacaattatacatcctgcttgctcatttgataagcccacccatctgtttctactgatttctagagtaggctagtgggagtgtgggacaggatcatttttttagaactagacgctattttcttttttctttagaactaggtctaaaagccggtctgaaaagtcataattgaaaatactgttcaatgatttattgtgagagaaaaacactgttggctggtaaaaaaaagtacggctgataagacaagcgaacgggtgcgttaaacttctgttttccaagcaggatctcacgttgacttattctgtttcgttgtgctctttcttgttaaaactagattaactaccaggattatctgaagttgaggacaagagttgaatttcttcaaactacacaaaggtagtcttcaaaatggtagtgaactactgattgctggtttgaggtgcacaaatattgttaatgggcatatgatgtatgacatgtactactaactcactttttgtagaaatattcttggtgaggatctgggtccacttagcatgaaggaacttgagcagctggagaaccaaatagagacatccctgaagcagatcaggtcaagagaggtagagaacctgactgcatggtttatatatttatacagtctactgttttcgcttgcatttgacaagggttgatatgtttacagaatcaaatgttacttgatcagctctttgatctcaaaagcaaggtaataatgatgagttgcgactgccttttgcctaattttatttctgttccatgcattcatactaaactttgtaatgccgagctaccaattatgttttgcaggaacaagaattgcaggatctcaataaagacctaaggaaaaaggtaacgtcaatgaccttattaaaacatctctgtgtgtgtatgtaccttgatgttaagttgtctacacgcatacatttcttactgtgttgttgctgagaactgtaacaacttttacactaaaaatgttatatgtatctctgttccgatatgcctacttgacgtaaacccactgctccgttactgatgtctttcaagtgccagctgcaagaaacaagtccagagaatgtgctccatgtttccagctgggaggaaggtgggcacagtggcgcaagtggtaatgttcttgatccttatcagggactccttcagcacccagagagtgatccttccctgcagattgggtaagtttttccagctgatgaatatctaagacagataaaaaaaatgcatagatgaagagagagagagagagagagagagagagagagagagagagagagagagagagaagaataacagaaactcatgaagccacacataactgttatctgaacttatgcagtcacagtcgcatcagagttagcctcgcatggatgaggccatgacagtatgacaccccatcacaattcccgtagagaaatagaatcccaccactgcacattcagcatttgaattttagcatgctttgctttgctttcatcataccttaattgcgttaatgagtgtgtgtgtgttcgtcgtggacaaaggtaccatcaacaagcctacatggaccagctgaacaacgaggacatggcgggcccaaatgagcacggtcgatctggatggatatgaaatgctccgatgacgacccaaataaagttgatgcatagcaggaatccaccctgcaggacgcaaaaactatgtattgaaactgcttttggagcttcccagacgattaagtaacttgggaatcattcgagcgcgtgttgtactggtggcagcgtggcgtccccgtagccgtagcatgcgactggacgcactgtgtgtgtgtgcttgtgcttgtaaattgtaatggttaactagcttgagacctcgtgtgtatgtgtgcgaagcttggaactttattatgtattatgtgtatggtactatttgtgtggcaatcgtgtcatgccgatcagatgatggctttctattactttctctcagagctgcgcataaccgtcttcacttctggccggtcttcagttcagttcagttcagaccttggagatctcatcaaacccatcctagtaacgctggatctgcggcgtcagggcgctgaaacccaccgttcagttctccttggctctcgcgacggacgcctcgcgcccctcctggctcgtgttggccattccattgcgagtgacctgccgagttgcctgtgggaaggggaaccaaaagctctgctccgcaattgtgctctgctccagcatccgcgccgaggcgaaagcgcgtcccaagtccgaacaccgaacccgcatgcgcgtggtgcctgggccgaatcgttaggagatccctgggccgtctccctccttctagccagcagcctgcatcaccgtgcgcatggaccgtgggccgcgtcatcatcttcacacggcgcactcctctactaccggaactcccatcgtctgatc

SEQ ID NO: 3505 - DNA, 4146 bp, Sorghum bicolor
acccaaaacacgataagttccagatttaagggtgctatgtggtactcaatctcgggtgagtttgcattggatggcaaacactgattaagttcagatactatgcactcaggtggcaaagttgtacatgtactgcttcagaaaagattattttagcacttaggccttgtttagttttcaaaaattttcaaaattctccatcacatcgaatctttaaatacatgcacgaagcattaaatataaataaaaaactaattgcacagtttgcttgtaatttgcaaaatgaatcttttgagcctagttagtccatggttggataataattaccaaatacaaacgaaagtgctacagtgtcaaaatccaaaaaattttaccaactaaggccttgtttactttcttccaaaaacctaaattttttcaagatttcctgtcacatcgaatctttggacacatacatgaagtattaaatatatatggaaataaaaactaattacacagtttatctttaatttgcgagacgaatcttttaagcctagttagtctataattgcacaatatttgtcacatgcaaacgaaagtgctacagtggctgtttcccaaaaaattttgaaactaaacaaagaccttaatttgacatagtttgcaattgctgtcccaaacctaggatctgaaaagtagtcgggaaaaataaggtgttgcaaccctctagacttcgggacgtggtaattcaagaatagcatcgcttagcgaaacaagcaaattgtttgtccatgccaaaacaggaaaagtacgaaacataattctccatataaaacaaatctaacaaaatcccagaatcatatggttgtcagtctaaccatccagccagcctttgagatcctaaaacacagcagcagcaggccacaggtggacagcacgtgaagtaggcagctttccgacatggatccatggagaagtggagcaacactgaacagcctcccccccagtgcgtttcgttcgttgtctcacccaaaccggaattcaaaatgctccgaaatgttcctgttccaaataatgcccgaacgcaagaggacacgccgtcggccacgctgacctcataattgacgctctgggcacatggtctgcctgcaacgcatgcacctgcctggtatgcagtacaatgcataacaacaatgctgggagcagttaaccatcctcttaaaattaagcagaggcttaacagaaagttctaccagcacataccaacccccactcaacaactcttttggattgcaagaccaaacaaaagtggtggcaccctaacggaaaaaaagtcaacactcagtgacagccccatgcctcatcaagcaaggttggattgaagaggtttgctgaaaaaactttgcacatccacaattgtgctgaacaatgtctgtttaccgcagttaagacaattgggttacagtcgcctgacaaaggccaagcatgtgctagcagcagaagctccagatccattcacgtgatgcctgtagcgaatttaaagaataaggccttgtttagtttctaaaaaattttgcaaaatttttctgattcctcgtcacatcgaatctttagacacatgtatgaagtgttaaatatagacaaaaataaaaactaattacacagtttggtcgaaattgacaagacgaatcttttgagcctagttaatccataattggacaatatttgtcaaatacaaacgaaagtgctactattcctattttgcaaaattttttggaagtaaacaaggcctaagaggcagggtaatgaagccccagaacagagtgttaattactagtcattaccaatggcaaatatgcagagcatcgcatccctcgtttctattcgttaggcagcctgatgagggacagctatgcaacgcaatcagtgatcgccatcatccatctgctcccaccaaaccactgagaattctcccctcgtatcaaaggctcaaagcgatgctcaactttgtaaccacttcgttcgtcctcagtccagcttcccactacaacttcaaccacttcaccacctcccagcaatggagctagcatggttcatcagatcctcaataatctcccttgctggattcttgtcagtggtttccgcatcgacatcgcagcagcaatgcggcggcattggaggacctgctggagtgagagctggctactggtcgccgtcctcaagccgctactccccggtcagtagcatcgacgcctccttgtacactcacctctactacagctcagtgtccatcgacgaggcaagctatgctgtcgcgccacagccgaccgaagaggagggctcgctgctcgctgccttctccggtaccgtcaagtccgggagcccgtctaccaagaccatgctgtccatcggcacaaatgagtacagggtggatgcgtcgaatgccgccttctccacaatggcttcggacaaggacctccggggagtgttcatcaactcctccgtggaactggctcgagccaaccgcttcgacggcctggatttgtcgtggattttcccagtcacacagatggacatggagaaccttggagccctgcttgcagagtggcgagcaaggatcatggaggaatccgccaccaactccttgtctggtcctcttctcctgacggcaacactctacttctccaaccacatgtttgacatgcctgacggcaacctcgactacccaatagatgacatctcagacaacctggactgggcgaatatcctcaccttcggcttccacggggacagcagcgtcaccacagctgacgcacctctctacgacaagtcgtcgcacttctcagtgagctacggggtgatctcatggctggatgcaggagttcctccatgtaagctggtgatggggatacctctgtttggaagatcatggttcctcaggaacaaggccaagaatgggctaggatcgccgactgccgctgccggaacaaagcagagcaaaagcaaccagactgggataattgcatatgcagagactgaagagtacctgaactctgaaagcaccgttgttgcctatgacaaccaatcagtggcagagtatttctacaacggtgacctctgggtcagtttcgatggcgcacaggtagtgcagcagaagctagagttcgcggcgagatctcagttgcttggctacttcctctggaccgtcggcttcgatgattcaaacagcacaatatccaagaaaggtcagtagctactcgattatgatgacatatgtaaattaacgtaatctgttaaatgctcatcttgatataacattgtctgatgcagcatcggaatcatggcaccaatatactcaaggtggatttggaatcatgcacgcaggaggttcaaaccaatatgttgcatttaattcatcttcagtatcacttggtagctggtattcaaaatctctcagctgtttgctgtcttcagtacttctgttggtgattctgtttcattaagaatatcagtaaacaggccagaaatgtaaaagtagttcagatgatatattcatcaaagcgaatgtctaatatatgttctgttgtatttattaagttttctcacagtcgttctttgccaaaaacaagtgtcgcatcatgttcaatgactaatagccacattgtgttccattacattcaaaaagaatggattgtttctttttcctaagaggatctccaaaagacatattttcatttggctatccactccgtgaggattccctcaccatgattgtgattccccgcactcccacaaattagccataaactgttataacaggacttcagtaagcaaggaggaggcctacccgtggctagcaggcgcatgcaggagatggcctcacggcccatcaagtctgctatttatagtattagaggattatttatagttgtaaagataatttttagcaatttaagtagaaacataattgtttccgacttgacttgccaaaccctagccaccacctcccttttccccctctcacgcacagcagcaccgcgtctacgtgccgccctgacgagtatcatccctgtcctccgttattccatccctacaacctccgcaacaactccagtaggtctcagcgtcctctcaacctggtatcagagatctcagttttgatgttggcct

SEQ ID NO: 3506 - DNA, 8474 bp, Sorghum bicolor
tcggccatattaaccgaggcgaaccttataagtggcccgcctcggttaatagggctatttctggaggcaggctcctttataataaccacctccgttaatagattttgtgaaacggttttttttaaccgccgcggttaataaaaaataaccgcctcgattaatgtctggcattaaccgaggcggtttataggcccgcccacctcggaaaaaaaattgaaaacacctcccaaaatattttatgtagtagtgcatcgacaactacaatgtgcaatccaatgctcaaacacactctctctcttgtttcaagcatcgcacaactcacacactgtggctagtctaagcctacctaagtccccgtccccacgctaacaaggaggagaagccaccctcttcctccaagcacaagaagaacatgtagcactcacactaggaaccaggtttttagtttccctacgaggctataacagctagcgttggtaattaattgcattaccgacttaccgttcttgcacccactcctagaccaaacaacgccctagtattaatgttcatatatatatactatatacagaaaatatagtctcaatagatagtttatacagaaccattttttatataaccacatacattctcttcattctctaccgattacattctttcatgtcttagttctcgtatagatatggtttctaacttaaactcagtttctataatttttctttttctcttcaataactaccttgtcacatcagcaaaacgtttaggtgatcgtacaattaatatctatagaaattatgatgatttctgcatcgaaagtgctctaatattttgtttaaaaaacagtaggctcaatattaatgcgggttattcaaaaacattagcatgctaaggtgttttacatgtcatatttatcatctttggatattttggcttatttttatctgaatagcgaatatatataaataagcatgtggtacaacgccgagaatttacaacacccaaaaagtactccctctatatctataaagaaagttggttagaacaacgacatagtctccaaagcctaactttgactcattatttttataaaaatatttatcaaaaagtgatatatatgcttttgtgaaagtatttttcaagatggttttcacattttaagatccaacaacttaaaaaatattcatgatttatattctcaatatttaacttaaatctcgtttaaaatgactttgtttatggatatgaaagggggtaggaaacaagacggaccctcattctggagttttggttatcgacaaattgtgggtgccacgtgccaaccacctagagttatcttgaatcaggagcgtccggccttgggctgtcatgaactgaccataccaccagtaccagactggagtttttgggccggtacagcacgacaaaagtagcgtaaggtaccgagggccagcccggtccagcccaagggctaagtcccacatcacatctgatcatctggtggtgcaaaagacgctgataattcctcagcaccgtggcggcgcggcgcggcaccacacatcactccgacgtcaaactccggctgggccagagacgacgaaacaggtccgcaataccctccacaaaatcccgcattctcagctccgtagccgcctaggcctggcctgtgctgcactgctcgaccttgacgccaccaccgcgccgccacttgccgctgccggccggacccagccaatcccgtgcgggcacctgaacggggtaccgggccccggaccgcagtcgcctcaagacttcaagtgagaagtgcagtggcaacggaaaagctccatgaccggggtccgggcgtaaagctgcgtacggcggcacggtggcacgcacggaagcatttggcggcgccaccaaccgcccctcctcaccattccaaacgctcattcgcttgccggccggaactggcgcttgtgggcagctagttcctgtgctgcgtgcggcctgactcctgaggaatgccgcactccgtcctcgcccgcctgccccacggctccatccgactcgtcgtcgccttcgggctgctgctcctcgtctcgctgctcgtcctccaccgccgccccgggaggccccatgcggcggccgccgctgccggcggtcgcctctccgatcccgccgggctgttcctgtcgctatccccgggggccaacgcgagcatcgcggccgacctccgcgcgctcaccgcggggccgcacctcgcggggacgcgcgcgtcggcgggggccgccgcgcacgtgctcgcccgcctccgcgccgcggggctccgaaccctaacgcgcgagtacgagccgctgctctcgtaccccgggcacgcctccctcgcgctgctccggcccgacggctccctgctcgcgcgcctgtcgctcgaggagcccgcggacgtggggcgccgcgtcgtgcggccgtaccacgcgtacgcgccgtccggcggtgccgtcgccgaggcggtgttcgtcaacctcggccgcgaggaggactacgccgcgctcgagaggcttggggtgggcgtgcgcggccgcgtcgcggtggcgcgccgcgggggcgggtaccgcggcggagtggtggcgcgcgcagcggagaagggagccgtcgccgtgctcatcgcgggcaacgcggatggcggcgtcgagagaggagtcgttcttctcggcggccccggtgatccgctcacccccgggtgggccgccaccagcggtgcggagcgtttggggttcgacgataaggcagtcaagaggcggtttccgagtatcccctccatgccggtgtcagccaagacggcagcagcgatcattcgaagtctgggcggtccggctatgccggcggaatggaaagacggccttggggtggatgtcggtggcgttggacctggccccactctggtcaacttcacctatcaggtataccttgctgtcttgtttctatgattatcaagagacaacaacacgacatatatacggacaaactggatggacagctagatccaaaagcctatgtggatttgctttgttgttgtgaagtcatatggcacatttgtggtgtctcgattgggaaccggatgtagtgaattgacgttagcttaatatggtattgcttgcttcttctgttatatcttgcgggatggtctgtcaaaatttgtgggcttccatctatagaatgtccaggggtgcgtgtttcgtaaagtgaaattcattatctgattttgttaggaacttaggacatttcattcatatgaaacttaagagggtgtttggtttgaggattgttagcttgtggggatgaggcggtgatggatcaatcaattccattccaggaaccaagcaaaaagttctgcataccatatgtagtgagtgctgaggttggtttaatatacatgtttttgggtgggtggggggggggggggttctcatgtttgatctaggaaatgggttggttatagagttgtcatatcctaatccctgaattaatcttcttgtttaatttgtaaactgcatgaattattcaatcagcatgccgatctacatgactacaatgccaatagaagatcaggaatagtgtgtgctatgtggatatttaccaatactggaccaaccgcttactaggatcaaaccctttcctgaaccaaatttagagctattaacaagcatttaaatgccataggtttgcaagtagtatgtttttatatctttcttctgttgttgttgacatttatgcatttgtgttgcgcttattctgtattatgcccttgtcaccatgtacttgaaccaggttaccttttaaatgcatgactgcccataaatccatgtcttataaggtttttgctcttgtgaagtataattgttcataccaacagtattttagaatgcaagtttctatcattgttacctgtggtatggaatgtacatgaatatgtgcttagacttccatattgctgcaagttctgtgtaaatacttctgtacatgtactttatagatggatacactatgattgctattatctctttgtttaaggaggacaggaagttttataagatacgagacatttttggtatcataaaagggcaagaagaacctgaccgttacgtgatactcggtaaccacagagatgcatggacctatggagcagttgatcctaacagcgggacagctgcacttctagacatcgctcggcgtcttggaacaatgctgcaatcaggatggaaaccacggaggtccatcattctttgtagttgggacgctgaagaatttgggatggtaagtagacatggaagaaagatgataagatgctactgtataaacatgacgtataactgcaaatggaccaagagatgcccttaacattttgtcattttattgtttaaaaatcacaaatgacacaactacctaaatatctgggatatgttgtcttttgactcatgacaatacacaggtgatgctgaatagcagtgttgcagtctaattcttgccgattcaatataatgcccccccatgcccccccccccccccccctttttcttttgctgttatatcagatcaactttgtatgtgatatctaattggcagcacatttacttcttgctacttttattgtctacaatttgaatgttcttttcctccccagattggatcaactgaatgggttgaagagaacctcgaagatctgcattccaaagctgtagcttacttgaatgttgattgtgctgtgcaaggtgtgggattttttgctggctctactccccagttggacaaactcttggttgatattacgagacaggtagaagcattttttagtcgagctattgtatttttctggttttggtctacaaactagctaagctttgaaatgatgttgaaaccaaattatttattattggacaaatttaacatcatcaaaccttttgcatatgtctgaaacaacttgaggcatcgatcaatagtagtactcaaaattataatgttaataccattttctgctgtatggctaagccagactgccagaatgaatacatgacctggattataattgaaacttttgtttcccaggtaaaggatcctgatgttacaggaaagatggttcatgatacatggaatgaaatgagtggcagcatcaaagtaagaattaagaattttgaaaatttgttctgcatatgtagagattgttcgcactattatctagcattgtcatgtagttctagttgcaagatggttattcagttacaccacagctgagccacatcgagcatagtttgttaattgcagtttttgtactgctttgtcgaaccttttgtgttgtgatggtagtagaggcaggaatgtactgtcttatgtgaggtgcctgcctcttgcaaatcccacttggaggagggcatatgctcccatcagtcctcttgatcttgccatgtccaccccaccacacccgcaccccactaccaccaagaaagaagaaagaacatgcttggtttctgcatgtgactaccctattcttttgctttatgatagttttgtccttattccatgacctgtttgaatttagactaaatagggcagaacaatttggttctgcatgctctttaaatttgactttgcctataactcccttttactttctcatagttttctcgtcacttccttatctgcttggcttaggctgtgtttgaactttgaagtgcttctgcatttaaaccaaacatggaatctaaagctgctttctagaagctgttgctttcgtgcaattttcgcagcaccttggactctactttcggctttcggtcttttgctttttacaaatggatggcaatagagagctgtttcaaggaagatagagagaggggttagttttcatagttgtatcaaacaagtaacttgcaacattccacaacacttctacagctcacagctcttcacaaaaagagctcgattattttgaatgactgatcactgcttgctttatatatatatatatatatatatatatatatatatatatatatatatatatatatatatatatatatatatatttgaggggaaaatgctgccaagtcaagactttgcttgccttctatttgtttgtcctatttctaaacaatgtcaactctgcagatagaaaggcttgccagaactgattccgattttgctccatttctacatcatgctggaattccctctgtagacttgtactatggagaaggtatgtcaaaacagaatagttttttttttccttaagagaaaataacatattggagatcagacatgtccaaaatgtatttgctaatgtatatttattctgctggaccttcaattgaggatcattgcaactcaaccattttgaagtcttttgtcttagctgtacatgcaattttgaggctatgtgcacctatagttatttcttaatatttttttatcgaatcaccttggagttcacacctacagtttctcctttaactctattttgttctatcacgtgtcatgtaaattcttctaacatggtgtgtggtcatcattactaaccaatgcagtgctaatgcagaatttcctggttaccatactgctcttgacacttataattggatggaaaagcatggcgatccattatttcttcgtcatttggctagtaagtaaaaacacagtttgcatagaaacttgttctgaagagcacaaggttgccttgcttgtgacatttctgatcaaaattatgatttaactatatgtactgatacaaaaagggtcaacaataagaatgaactgttgcctgtaaagctagctactaaatactcaacaattttcgaaattttggtgcaccaaaataatgtattgctagcatttcttgtggtaatcctaggagtgcttatgcagtttttctgcttcatcagtcacagaaatttggggactattagctcttcgattggccaatgatcccgtgttaccttttgattatcaagcttacacttcagacttacaggtacgttgactcttcacagttacaggttcgttgactttcatgtgcacacttgatttctacattgcaaaggtgtattgcttggagaataccacttaatatgtgtgacatgagtgactttggttgaatctgtaacttcacagtgattttttttggaacatggagatgtacatttgagtaaatcttatctacgacaactcacacattgcataacaccaccaatttgctttcagtcattattattgcgtatctgattgaaatttacaatgttacaggagcatataaaaacattttctgcgctgacggacaatggccacgcagtaaatttgatgaatgggttcgtcaatgatctttctggtgcagctatggaagttgtgaaggagatgaaggtatcaatttatgccatgcttctggtttcatggatttgagtagtgtcggtcaatttcaacaatctagtgatcaatggaataatttcttctccaatttggaactggtgtttgaagctagttgatgatgtgctattttgttggtttggattcaaaatccagaaactacagcagctggatttatatgatgatcacgctaggatgagaaggcgattgttgaatgatcgcctcctacttgccgaaagaagcttcctgcaacctgaaggactccaaggaagaggatggtttaagcatctggtgagaaacacatttcagcgcacttgtacattattttcctttcaaaactaaaacttacatttctttccctagttgtactcgcctccggaggattatgaaagcaagttttcgttcttcccggggatcgcggacgccatctcacggtcggccaatctgagtgacaaggaacgggaggtggcagtgcagcatgaagtgtggaaagtctgccgggcaattcaaagggccgcgagtgttcttagaggtgaattcagtgagcgaaaaccgataaattttagttctttggtggctccatgagatgtgtttgtgtaaataaataataataggtatttagtatctgcacgaaatggaagtgtgatgagaatgtgctgcttttgggcgtacccaaacctgtgcggaaggggatcctctaacacactctgctttacgtcactgggacataaacgtttgtgcgtcgtagatgggacatccgacggtaagaatcaaccaacgccaaaacagagagcactcgtcggccctggtgcgcgacgcggcgcagagcaattgaagcgaggggggaacggctggaagactagtaaaagggcgcgagaaaatagaatcgccgtgtagctgacggaaacaaacgagtttccgccggagcggacgagagcaaatatagataaaataaaaattaattgcacagtttggtcgaaatttacgagacgaatcttttgagcctagttagtttatgattggataataattaccacaaataaatgaaagtgctacagtgtcgcgaatttttttccttcaccaac

SEQ ID NO: 3507 - DNA, 7553 bp, Sorghum bicolor
ttttttgtccccgctacttagtttattttagagaaccatctcacataatcatttctcaattgaaaaaactctttagcaaaatttatgttggattcagcctctaaaagtctaaatttttcaaaaaactctgacaaatagactttccctttagatttattctgaaagctagctaatactgtgagctctgccaaaggagaccctctatatgtcatgcatgcaccgatgcacgcgagggcagactagaaaaggcgatgcatgcaagggtcctagacatggacaacagacccaccgcagtaccgcccatggatgcgaataattataatcattataatcaaagttttggtgatcgaagagcaaagaagttgaaaactccacacgttctgatagaaaaattgaataaatcctaaacatattatatacataacgcaagggtgcttcaatactcttgcattatatatataataatatgttcaggatttatttgagtagtttgtttctcaaataatttgaaggggcctcgcggaagtcgcgctcgccctgtcccgtgcgcgtgcgtgcatgcgtgagctggtcggtgcgcgatttgtgtagagacctacatatatatatatatatatatatatatatatatatatatatatatgctttgtttagttcccaaaaaattttgcaaaatttttcagattccccgtcacatcaaatctttacacgtatgcataaagtattaaatatagacgaaaataaaaactaattacacggtttggttggaattgacgagacgaatttttgagcctagttagtccatgattggacaatatttgtcaaatacaaacgaaattgatactattcacattgcaaaatattttgcacgtaaacaaggctatactgtaggactgaacaggctgaagtgtgaacaaaactttcacatgcgcatcaagtggttggtggacagaagtcgatcggtcagacagaagctagggtagtacctaatatatagcgccgctgcaagcatgtagcagcatggtgcagatggtccacgaacatgtacacatggatgcatgggacgcggccgatgcatggaacgaagctggctagctagctagtgtgtatgcatattacgacgccatgcatgtacatgtacgtggatcaggatgatgcgtacgacagtgaagtatgaacgatgcctctggcctctgggtctctcggatatataatgcgtgcatgaacattcaaagtatttgttgtggcttggtattgtctggtccctctttatggatgcaggccggccgcccggccctagctcgttgcttggacgacattgttggggaccgaccgatggagacggacggatatgatgtgcccatcaactgccactacatttactccaaacactcatgcatccatgtccagtgcccataaccgttgtttaaggtttcaacgatttgcattgacgacattgaaaacaagctgcatgccagtgtatatggactatactatagtacataagtttttttatttaggggatactatatatatagcacataagtaccttttatttatttcgagtcttggaacaatatcgtggatagaatgcacaagcacaagagccgtcagattgttcaagtgccatgggcttttgatccacaaaaaagcggcccgacgcgatgcaaagctctgctcggcccaattactccaccagcctttcaggcccgcccgaacacctccgtcctcttctcgtgttgggaaaaaacccaaaaatgaatagacctccgcagaccacgcccaccaacgcccatgacccaggctctcgtcgcgcccgtcagagcccatcgccccgcctgcacccggtccaccaccatcgcgcgtgctcagccgcagccgcaaccgcgaggatcccccaccctctcgctcgctcgctcgctcgcctcacacactcctcgtctggagtcgagcgccgcccccaaacccccaaccaaaccctcggcgccggccaggccatcatggatctccgccggccgccgcgctcctcgtcgggcggcgtggagccgaagatccgccaggtcggcttcttcaccccggacgcctccgcgccgtcggagcccctgccccccgccgccgcggcggccccggcgccgtcggcgcagcagaggccggccgcggggtcgccgccggcgtccgacgacctctccacgggccgcctctcccccgtcatgatcccgcccccgcgccacgccgaccacctcgccccgggcccaccctcccccgctgcggccgacgtcgtcctcgctacttccgcgcccgtgcgttcgtccccgcgcctcgacgtcgcgtcggagatcggcgacgacgactcctggtcacgcgcgccttctgctgtggagctaggtaattctgtgcctcgctctattaaatattcaaatgatgacatggccattgcacatagcttggttaacgagaccagtttatgttgtcatggtaacgaaccagaggatcttctcaatttttaccttcaaaataggaaggctcgtggccatgcaatcaatactggaaagtttagctaagcaaagtgatcttgcttctctctgaaactcgcatggactcttgacgttaatgtgcacaaaaataatctgtgacagagatttaatcttattcctgaaatgtttttgtacaattaaacttataggaattacaaattcacacatttctacaacagacgtgctgagggacagcccatggtgagggcggactgttttataaataggtccatacagtctcacagtgtggctgccaaactcaaatataaccatttgttttgtttacctggagctggttgtgcatggagagtgtatattagaccacgtccactgttaccttaaaggatgttagactttgaaaaccctcctttgcttgatatattactataaggtcagtgagtgtggaggcccagaaatgtgttgcttctttgtagatttgtgttgatgaattggtcacaagtggtgttagaaattagaatggcaggctacaagcgcgtgtaaattaaggttgttacctatgattggtcatgagtggtcttctaacttctttaagataaaaggtcaaaagtatttaagtttttgggtacatgacatattcagccaaacgaaaagaaaccttcatgatgacacaatgaggggcagctgcttctcctgtattctctaccgctttttccatggatcttcctattgccaggttctagggattgtgggaagcagcaacttgctgttggttgtgcctcaagtgtggtgaggagggagcaagtgaagaaaaatgtttttttaataaatttgcctactcaacgtttcagctgacttggatacctaataggatcctacctaactgaaaatttgttgtttttagcgtaaaggttatttggggatgtctgaatgaaaaccagaaagttgtagttttgctggttttttgtttgctaattatggcttagtggttaatatttattaaatttgttgagaaaattatttgacaattttatttatatacgtgcacataagtttgtttcagaagaaaacaagcgtggtttggctgaaatacagaacaagggtgctccagcctccattccacaaaagcagaaaacctcgaaggcagagagacgtgcaattcaggaggctcaacgtgctgctaaagctgcagcgaaggaggcaggtaattatcatggcatagggttttgtggagtgctgcttgaatcacacaaagtgtgtcagcatttctgactgtttattttttgatgttggcctagggttggtggttgaaaatgtgcctatgaacatgttcaactttgttatgatgatcttgcacgtgtgtaatgcaagcatagctcccagttacgattttcacattactttgcatttacagataaatcaggaaaatctgctggtgctgcgatgtccaagcaagcaaagtcagcaaaaactgctcagaaaaaagatgtgccccaagctgcaagtacagttgcttctgagaagaaggctactgaacgtcctccagaaagagaaagaaagttagatgctcctcatccccgcatgcagtttgatgatgtgcataaggtggagaaagcaaaaaaacgtgcagtagtcaaccaatcagaagctcgaaacagagttgaattgttcaggcatcttcctcagtacgtgcatggcactcagcttcctgacctggaggcaaaattctttcaactagaaccaatgcatccttctgtatacaaggtaactgttgtgttttaaacctacccagatatttatgtactcctattatactagatctcaagtaggattagtcaatgatctattaatctattattcacccacgtaaaatcttcatttgtttggagtaggactaaggtgtaggaagctatgtaacatgcaactgttgggttatttctatagatatgaggatagttgatcatagatgaaacaatcattgctgccttactaatcaccggatgttggattaccttgctctcctggtcataagaattttgacctgggctgaaactcaagacaccctcaacttgttttggccttgaaatgtgtcatgtatctgcacctaagttgttttttctatacaattcagccttttttctctctttccaatatccataaatgtagataatgttaaatatgtacacctgccaaagacttcgcataatactttcatatgcgctctagctctatgtgcaagaagaatattaaagataaactttctttgcacaaaagctaagccactaaggcttatgttttaattttgattcattatgaattttgttggaaactcttaggaaagcagagttccatgaatgtaactttggtgtacatacatagtagaattgcatttcccagatgagtagccctgtttgtcttatgcacattgttgaattctagaaaatcggttccttgagatcacttcagcacgtcaccatctgaattttaatctaagctatatattgtgttgcaaatgtttaatggtgtatggtcatactattgagttgtatgttggtcaaaaaaataccatttaggcccaggcaaaactagttgcaagccggatttatgttgttattactgttgtattgcttagatgtttggtggttcagacttctgagtagtaaagaaaatagctaataaaaattagataaactgattactgtccattttggtaaaatctgattgactcatctggacttttgctatatttcaggttgggctccaatatttatctagtgaagtatctggtggtaatggtcgttgcatagcaatgcttcttgcattcaaagaggcaataaaagattacactacacctccaaataaaacactcagcagagatcttactgcaaaaatcagcagttatgtgtcatttcttatcgagtgtaggcctctttcaatcagcatgggtaatgctattaggtttctgaaaagcaggattgcaaagctaccacatgcactgtcagagtctgaggccaaaactcgtcttcagtctgatattgatcgttttataaatgagaagatagtccttgctgacaaagctattgtcagccatgccatcacaaaggtcagagacaatgatgtcttactgacatatggatcatcatcagttgttgaaatgattttggagtatgctcatgaacttgggaggaactttcgagttgtagtggtagattctcgcccaaagcttgagggacagggattgctgcggagattagtggcaaagggcatcaactgcacatatacacacataaatgccatctcatacatcatgcatgaagtaactcgagtcttgttgggtgcctcatcaatattatcaaatgggacagtttattctcgagttgggacagcatcggtggctatggttgcacatgcatttggagttccagttctggtctgttgtgaggcatacaagtttcatgagagagtgcaacttgattctatatgtgctaatgagcttggtatgggcattttgtcgtttttgcattgcaaatatatgtttgcctcatgcatgagaactacttgacgtgagttttcttactcaggcgatcctgatgtcattttgaaaattcctgggagggcagaggaccatcttaagaactgggcagacaatgcaaatctccaattgctaaatttaacgtatgtttctgaattctatacacagaaattctttctgatactattcccctcagtgtaaataatgttgcacatctaataggtatgatgccaccccgcctgattatgtgtcgatgatcataacagactatggaatggtaagatatccctctcactataatcaatcttctaggttattttttgaatatctgtgcaaatgttatctttttaacataatgcatctagttactgcagtctagttgttaacaacagaacatgtgtcctttttattagtgaatctattcaaccatgtaaatagtttaatctgcttggactggttttattaggctttttgttctgtatgcataggctgcattcagattaaccataataaactatgtatccaatatcttcaagatagtgttttctctccgaaaatattttacccatgacacttgttcagtttctgtagaagcagctggaaacttatgtacgtatgaaccaactagtgcttgacctttgaactaggtgaactggtgttttgcaccaaactaatctgctgtgtgtaggccatgccactctaaactccaagcatttacacacatatgtcccctgtacatttgtacatcttgctgtttgggaatcttttgcctcacacacagggatgcaccgttctgtatttctttgcctctatactttgagtttttgtaaaatgttcggattctttaaaaatctgatatttgtcattacattaatttgactttgcaatctatttatacttgtttaggatttatagataagatgtgggccgtttggtcaatattgattgtgttgtttcctgttgcagcttccacccactagtgtaccggtcattgtgagagagtaccgcaaggagcaactgtggatatgactcgctgccctactgtcgtatggtagcaattttggtgacttgcctgagtgcaacatgataatgattgcactgttggcctgagttttttttttgtctgcccttgtcgccttttttcgtcctgttttgcgatcacctgtataacttgtaactctatgaagagctcactcttgcactcatgtgccctcggacgttgttgagtcgatggatcactgagtactgtttctttttttaaaaacatccatgggttctacttatttcaatggaatgccacctccaaccacgagaaggttgtattgtgaacattttgatataatatggtcttagatactcaatgttgaacgctactttgtactgtagtgcctttgtttggcagtttatttaccgatcaacgttctgataagtgggctgtgtcattcgaagaatttgctgtgcgcccttaactgtgcagtatgtgactaactggttcatagcatcggaccctacagggattcacactgatc

SEQ ID NO: 3508 - DNA, 3143 bp, Sorghum bicolor
aggttctgccgaaatttttaactaatgtttttttattttacacaacagaggacgtgagaggagctccagcgcctcagcttccgacgccgtttagttctactgtaagtgtcaaagttaacttcttctttgtaactgtagtgcagaaataattactacaatctcacataaatatctaactgtttgtgcagcctcagtcgacagcgggatccaataacccgcctcgtatgtcaccggatcctggagccttcgacacaccaccctcgacgtagaggcaggacggttggggacgatggtgagttctcgcagtcctacggtgcgtacgtgtcggcggtttagaactttggttcgatttgatgaacttgtggactactggatggtcgtgatatatatatgtgatgttcgtgtatacatgatgttcgtgatatatatatgtgatgttcgtgagatgtatgtgctcgttgtggaatctctgtgtgtgatggtatatatatgtatctgtctattgtctggaagcaaataaacaaacaaaaaaattttaaaatttctctggtgtttgccgagggccttgaccatagccctcggcaaagaatttctcagaaaaaatagaaaacaggtctttgccgagggctatggtcaatgccctcggcaaagaattctccagaaaaaataaaaaagatactttgccgagggcctgcatggtagccctcggcaaacatattacccaaataaaaatttaaaaattctttgccgagagcctgtatgggaactctcggcaaagaatttacaaaataaaaatttaaaataattctttgccgagggcccaacgttgggccctcggcaaagacgccgtcagttgcagctagtgccctaacggcatctttttttcgccgaaggccggcctcagccctcggcaaaatctttgccgagtgcccgacaaacggccctcggcaaagactcctttgccgacggaaaatttcccgacggctctttgccctcggcaaaaatcctctctgcagtagtgcacaactgtactgattggtagagacgtgtagaatagccccctgaaccatgaacgcgtagactatatttagctttctttcttgtttctagtttttcttttgataaattgtttctagttaattataaggagatgaagactttctcagctgtatgcatgcctgtatctgcttcattctgctgtgaccaacaaaccttgttgatcgtgggcactaatgagccgctaaatgcagacaaagaaaccatacacactgttcggtacagcactacacagccataacatgctttgctgtgcctctgatccagctggaaggaaggtcattagctgatacatcagcatgacaatagaaaactatgtttgtcctgacctgatgctaaaaactatcctgatatctcccatctcctgacctatatcagttccaacctaccatcagttattgtttagtttgcaaaaattttcaagattccccatcacatcaaatctttggtcgcatgcatggagcattaaatatagacgaaaataaaaactaactgcgatgaatcttttgagcctagttactccgtgattgaacaatgtttgtcaaataaaaacgaaatgctacagtaaccaaaaacaatttttttttgcaaactaaacaaggcctcttctaacctatatactttgttccttcccctagctagcctggctctataaaagaggaggctctgcacccagcagtctcccctcttccctttgcaaccatcctctcttcactgctcgctctaacccctgtgagctgtgaccgaggagccagaacatggccgacagtggaaatgggagccgaagcagcagcagcagcagcagcagcccgccatgcgcatcgtgcaagctgctgcggcggcggtgcacacaggagtgcgtgttcgcgccatacttcccacccgaggaccctcacaagttcgccatcgtccacaaggtctttggcgccagcaatgtcagcaagatgctgcaggtccgttcaattctcctccttgctgacctcgtgcattcagttctatctcctattcgttaattactgtcatccatggaccattcagattttctttcttttttgaagtgtgataattcagattcagctatatattagcttgctcatcagtagtctaacagcgttcactgcaccaactgtttgattccaggagctgcctgctcagcagagagcagacgcggtgagcagcctggtgtacgaggcgaacgcgcgcatgagggaccccgtgtacggctgcgtcggcgccatctcctacctccagcagcaggtctcccagctccaggtgcagctcgccctcgccaaggccgagatcctctgcgtccagatgcaccacgactacgagtcagcttcagctgctgctgctgccgcgccagctccggcaaagcaacaacaactccagcagcagcagcaggaggagatggaatgcgaggcttatggcaacctgctcgtgcagaatggcctgatgatgaacacgttgaacggtactggtgcagttcatcagcagcagaagcagatgctgggtggcttcggctctgcagggaacactgcaatgatgctccaggaggcgtgcctcaagaaagagtccctttgggcatgaatgaatgaattatgtactccttccatttgtcgataagaaaaaaaaacaacccttcttgtctctatcgctgtctgccactgtaattttctggaaagatgggaaattactaagagatgagttaattgggtcacatgagcatcacaatctcagcattattcctacctaaaaactaacaataagatctttcagaaaaaaaaaattaaaactaagaatcaagacgaagttaagctatatatctgaaggatattgtgtgaaatagagtttttgcacaaaggctgcacgagccagatcgagtgaagtttcagaggttcaccctttgttagacttggagttgagagtcagctaagctatttggatgcgtttggattcacatggtgtgcacagtaggattgctcgtggacaactggacattaagcatcacaaaaacctttttcttcccccaccgtgctggatcggagttgtatatttgactgctgctacatccaattggaagacctgac

SEQ ID NO: 3509 - DNA, 7791 bp, Sorghum bicolor
ttgttaattgttataatggtgaaaatgatgaacaactggtgaaaatattgataaaaatgagttgttgtcagcttgatgggccgtgggctggcacgacacggcgtgcttgacaggttggcacggcatgaaaatcggcccacgagccatgccgtgtgccgaaggccagggacgaagtccgtagagacatggcccgctaggcacgacggcccacaacggcccgacgacctatggcacgacacgacctgtttgacatatatatgtagaaccgatttgggattggggtggacctcccaaaatttacatcatcattgggttgcagattgtaacccaataggactaaagcaaaacccaaacaatgttcaggtagctaaggctgcaatttggtagtttaggtaccaggttaacacatctcaataaatttgagggccactggcgtactttacatctaaataataagtaagtagtcataataagaatcatttcaattgtatcattaaattcataattttttaaacaaaatgctactttttaggtatgcatccacaaccccaaatgctcacacacctccttacgcacacccgctcgtgtgctctctctcacgctctcccctaggcgatcatgtcaacaacgtgatagatctgcgcccggcaagctccgatggctcgcacccatgtctagggatgaaaatggtacgaatattttccgaccgtattcgagaccgaattcgtttagagaggttcaggcctgtccgtatccgagtccggatattcaacatccgataccgtatccgtatccgaatacttaaatcgtatatttacgatgtcggcatctaatcctaccttatccgatacgattgatattatccgttttcgaatccgaatccgaccagaaatatgaaaacaaatatgatatcggtgatatccgtccgtatccgatccgttttcatccctacccatgtcccaccgcctcctcgcgtccgcgcccatgccccatcgcctcccccacgcctggccatggcggatccaccgccaggtgggcctcctcgtacttctccttgtcctcctcctagatctgctatccagggttccggcgagttctctcctactctcccccaactctgatgggcttagaaaagaaagtgtatttagagaggtaggtaggccaggcagtgggggatgatcgatgggcggcgacaggggcgggagaggctcgttagagctagagaagatgtcggcagtggggggaaggggaagaggggggactgccatgagcgctagggttcgctagagcttcagcaaaccctagcgcccgtagtggcgtggtggttcgcggcgggggcgagggcgtcggagtcagggccgggcgcggatctagtctgcgtttttttccttttttttggcaaccaaaataattttttttcgcaaattggagtgtgcagtcggaaattacattttctgcaagtgcatgctctagtaaagttcttttctaaacaaaacatctatacataacttacatcaatcaatcgaccaaaaaaatttctaagaaaaatacatctgtttacaactaattaacaaaagtactagatatggttttaaaatcggattataaataaaagccggatagaaaaccattccatttccatgagaaataaaaaactaggggccagcgccagcctcagcttgggctttgttttgggtcaaacaaaccaggggccccggccaaagcaacctacacacgccagtcgccaggtacagtacagttaacacggcacgcctctcccggtcccacctgccagcgaagtacagcctctccccttatctcctggcgcccttatcctaccatctccctgcacccggtccacgaacggtccctcgatccagcgcaacggacggctctccagtcaccaggcgaacagcacgagactcctcctccctgtgcaccgggtccaggcaggtgcccgaggataaccccgaacccgtcgccacgcggcccagcccagtgtgcgaggacgaggacgacgcgggcgcacgcagcgcaggtgcaggccgcagcaagagcaagccctgaaaccgccccgccccccaccacctcgctctccctcctctcgcagcgccgcagagccagggtagccagtcagaagaggaacacacacgggggagggagcggcagccgcagcggccgagggcggagcacgcgaggtgagatttttttctctcttcttcttcttcactcccctctccttcctcctcctccgccgctcggtctcgattcgggcgcgggttcgtgggattcgggggacggcgcggcggggcggtccgctcggcgggtggaggctccgaggtcgggggttgttgaccgggctgttgcggcgcggggtggggacacgggttcggtcgtcgcctccgggcgcctccctcctctccgctcccattcgcggcgggcgtcgttgtcacggaagcggttggggctcagagtgatgcggttttctaccccttcttcctgaagggattcggggggttttaggatgcgccgttctaggtgtgccgcgccgcgacagagaatcgattttgttgtccaaatcgtgtgtttatcttctgtgatttattacctgctccattttttttttttttgggtagggagtggtgggtgttaggacacaattggaagttcgctaggttcgggggttcatttcactctgttttacaccgccagtcactgcactgttttgatacatgcgtcctgtaagctgtatacagtatacttgatgttcttcagacatgacgaaaatcgatccttgtatattggtccattgcttgcccattggtgtggggttctggatacttatacctgtcttcttaatgcgaatctaatgggtgggagggtgagagcatgtgccctcaagggcacaaaagaactttaccggtcagtctttggaagcataagggctttgggacttatttgattttgtggtgctcaaataacctgcactttgtttttctagcactgtcagtttcagtaggatatatatacgttgctctcagattccactgttagtcggtgtgggaagcgcggagagcaccttctcaaatatatataagacaagattccactgttagtctgggacatcaaaatagacttcactgtttcagattattattttttacatcaaaatcaaggctttatctaacaaaaaaaggaacaacgaaattcgagccttgagatagcgtattctttgaattctcttatcttgtgaattatggatgtgggtttttcgagtcgatgctgattcatactttaccttttgatgaatgatttcatcacacccagtatggtttgcttctgccattatgtgtggtttattgtttatttggattaccttcacctgtttaggttcaaggtcttccggtttaaagacatcagaagaggctgtggtagtgccaatatgtacttttagtatttaaacttgatttgctcttttctttcatacaccatcctactaaatgcaataagctcttagtgattctgtcgttgtttagatatttattatgggttccaggagaagtctaaatctcggttgactcattgcctatactgtagatgcaatttgctgcattttatagctttctcgtcttcattttttgttcttcaaatagacgtgcatgttattttgagcagtttctgtaccttttgtctttaacttgttcttaggtatggctttagattgcatggtctttttgaagcccctgttttttttgatttgatgagttttgcctttattatttctgcatggtttacggtactctcttctgaaatttacttgttgatagcccattaaatatattgtactgagatttttgtcaatttataggcatggatagataccacagggtagagaagcctcggaatgacacgccaatcagccagaatgagatcaggatcactactcaggggaggatgaggaactatatcagctatgggatgtcgctgcttgaggtgacctgctgtgattcaatcttgtctttgttgttacctgtcataaaaataagcattcatattatttgggcatatttaactattgctgggaagtgtttgcaatctgaaattatgtgaagtggcgatagtgttagggcaacagtttgttttggtgtgtgcatgtatgtgcttttatttgtcagtagccttttctttttgtgattgtaataaaccattatatctctcatctgcttgtctatattgtttattgttacaatttacattagtcaaatgataattgtttggactcaaatgccttcatttaacattctcattacctatcgaatggaaagcctgctattttgtttgttgtggtatagtatgtggtttgttgcattgccaatactttcatctcccttcacaagttcattgctcttatgtcctaatgtcctagtgctcttttccttgcactatttctgattagaccttttcacctgaactatgtgaagctcacattatttaattaataatagtgctgatgccatttgctcatgttgtttcttcatctttttcattgttctgaaaattacccacctgctttgttttaacattcacaatatatacaaattttcaaatggtaagtttactccattaaatcttccatctaacatcctcattttgttcaatgttcacacattgaatgcacatcttaatcagagacacctttggattttcagtctgatatgttgcttttatgatagttcttgtcctgtttccattctgatacataagaattcttagcccttcgccccttcctggtgactgtttagcgatccttgcgttgtgttcagagtttgttgtttcagctgctatgaagcttgttgtttgatacaaagtacacagattcacatatagttcagggcatttagaaatttctgccattattatttgcacttgttgtttcttcagtatatatagcatcctcttctcacaattcttttaatggttataggccaaagatgccacactacctttgctacttctctttgtgcagtaatcttaccacagttgaattgatacctgatccaacttttcttattatgaacttattcccttccacttttacaggaaaatggccatgatgagattaatatcaaggccatgggacgggccataaataagacagttatggttgttgaattgatcaaggttggtagtagtatagcctcttctgccttatgatgctgctattgaaatttttattagtgtctcattttttatctggcacttcactgttcatccagagaagggttggaggtcttcatcagaacactgctactgaatctgttgatatcacggacacatgggaacctttggaagaaggccttctcccgtaaggatattcttatattccttcaaacagaaggagattgaaacactaacacacttctttacacagactagagacaactcgccatgtgtcgatgatcactgtaacactgtcaaagaagcctctggatacatcatctccagggtaagtcaaaaacctgtcctctggctacaaacacagaagaattttaggcttgatcacttttccttccctaattcgtaaagggccgttcattattttgaaaccttctgtcagcttgcctgctcattattggttatgtttgatattgtacgtagataccaaccacctatcccagctgaagaggtgaaacctgcttttgactatgatcatgaaggtgatattctcagttgatcttctctacataatgctgtagttaggatcactgcataaacaccatttttttcatggttttttagaatcgtatcccactggtcgtggaagaggacgttttggtgggagaagaggcaggggaagaggtatgttctcttgtcgtctatatgagcagcaaggcaatagtcagagttttctggacaatatctcttataattttataatgctgacttgttgagttatggtcacactacattcagtcctgtacttggtacttacgcctgcttttatgctcaatatcataatagctgtttttaggcatgcacaccatgtaaaactaatcaactgcagctgctgtcaaggtttcagtttgggatatctataacttaagtcagcacatattttattttctgaaataggtagtgtttgaaaaaggaatgtatttttattaattcttgcatttgaatatgcacaggtatgagcaatggtccccctccacctgcttatggttacaatgacgagtgggaggaggatggagattattacaacagagggcgtgggagaggaaggtcacgtggacgaggagggagaggccgtggtggctactatggaggtgggaggcgtggtggctacggttatgattatggctatggcgggagaggcgggtactatgaagagcaagatgaatactacgatgagcccgaagaatatgcccctccccctggccgtggtaagccccagactgatgacgttacatgctgatgtggattttgctctgcattcctaaattctcatggtttgcggtctgctgtttcgcagggcgtggcagaggaagaagggggatgccttggcgcgggcgtggtgggcgtgggccgccgcgcggcggccgaggaggctactactagacaagaaatgcgacgtgccaaatgggtgtgctgaagctagcaatggcgtgcctagttatctgttagcgtttgctctgtgctcttctatggagctccgacccccggactggaattatcccgtaggcctttccaggtgctactttacttcagctgctgtgcctgtgcaactcgtctgggcaagttttgtggctcgctcgtggttttgtagctaggttaagcgagtgaagttacactcggtagcgcagtgtttcctccatcggacgatatgcgagattgtttattctgctgttaatctacctaccttcctatttcgtatggatgatggatgcgggacaatgaagccttgtttgtttctacatgctttggggtagaaatgaacaaggcctgaaagggcaggccgcagtgttacgcagtacactaatgatttgcggttaatatgaggcaggcattttatttttatcatacacaaaagaagtgtgggagcggggcactgcacgaagggtagcagcaatggcgttggggcgtggtggcgacggaggattcgccgatctgggatggtggcgccggggtctctctctccgttagtcatttaattgtaacagttgatgcacgaaaatgaataggtttactcgttttcactctaatgtttccatctcaatctagaggaaataataatcagcttttgataccaatcacactactaggaagcacccaagtactccttgtccttttacccggagctgaacgaagatgcactaatactccttcctgttcactgttcaccaattggtacgtaaacaagaaaattaaactgctaaagctgctggtgccatctaagacttcagatcactcaaggcaaaactgaagctacctcaggggtgtcatctaaaactttagatcatgccaggcaaaaaaatccctggtctagaaggattgagggggatttttacttgtagaggataaaaatccctttaatacaattagattaaccaaacaaacctttagagatacactgaacaatatggaagctgctcctgctcggcaaactacaagctgttgtccgaccatacacacaaaaaagatgtgtatattaaaggagcaattacatttggatagccaaaacatacatggaagcttactaagggcactcacaatgcaaaactctatcacaga

SEQ ID NO: 3510 - DNA, 2932 bp, Sorghum bicolor
ttcccaaatacaaatgtacatatatgctagaagatagcattgcgcatcaccatggtgctttttttttctcgaacagcgcaggagaactgcgcgtcatttcaataaggtagaaaaaaggtacataggtccaagagacccaacacccacacacacacacacaccccccacaactcacacaccccaacactagactttggataccatggtgctttagatcatgtatgccagtgcaaaagctaactatatgctttcaccgtggcatgagcaatcacccattttattatacaacccgtgtacggtagttaaaagaaataaaggtgaccatcacttcatcttcaaaaatttatatacataatcagagctattaagtcatacacaaacagctagctgttggtcccaaggtgccacgccgctgacagtgtgacatggcctggtcatggagctcaagaaggctctcacaacctcttcagaggcatctcttctaagcaaacacatcacgtactccatcacagcagcatcacagggcagcatgatcttgccgtcatcgctctcgaatccaaactcttctcacgacagcattaggagctcgctgaagaccactttgccaagatatgccagcgggacctcgaaccgcagcccatcagccgagtacacaacgcagtgtcctttgccagccacggacgtcaacgtgctacacgatccttcgctttctttcgccaggatcggcatgaccctcttcctcggaagggcggctatcctttgccacatccttgccatttgcacaagtctcttggcgcttcctgactaatgttcagagaaccttatgtatcaggtggtgttcagctaggtgtaatgcttagattgctgatgggcagatgacgagttgctgctaagctgatgcacttataggtgagaatgaacggagaagaacaagcagagcatgcggtccaactgcatctatcaactcaggctgtcgagagacaagcccatgagctctgaacatgcattgctgcaaggagaaaatagtgtgtggttttgattagaatgctctggggccatctgtttggcacttgttggatgcaccagtagcaatgcctgggttgctaggatatcacaatgtgctgccatactgcaatgcctcatgggccatgaagaccacatggaaattgggtccaaactgtcagtaccaattgttatatgttctatctcaagatatgtgacagtttttgtgcccacagcacattgtttctgagcgaccagattaagcctgtccagtggcccatacaacttgctcgacagctttatcgcctctttagtttgcggtctgcagctggatcacttgcacatcaagtgacctctacttcgcagcagcttcttgaagttctctgcattcctgttcttctatactactattattcttgaagcatgcgattgccatctgattgaaatactcagtccatgcttccctgtcctccatattgctaggggcagtgccttatttccagtctgaaagcaaacaaggaatcctcatcaccctgttctgaaataaacccaagcttatctgctgatgtatctgatggcacaaccgccagctgaacaattctggccctcacacagcacgttggttccaagtcccaacaaactggggtcctcgtgccgcttccccgcaacaccgttcggcatggctccaatccaagcactgaaaacacaccacgaccggcaccaacatgtgctagacacatggccccatcagaatctcatccaaatcgtgctcgcagacgcatcttgcaacatcgcactcaccatgctcatggccttgtcccttgcccaaccatttcgctccagcagtcctgtgagctatatattcagagtccggtggcctctgaacatcatcacttgcagcttcacaagcaaatcaaaacagagcaaagtagcaaactgaagtctcagctctccagcttccatccagaaagaagaagaaaaaaggccaacaaacaaccatgatcagcgccaagaggattgctcatcaggccaagaagtggcagaggatggctgcacaaggcaggaagcgcctcatctgggctgcagcagcaaaggaagccaacgagtgctgcagctccgtggcaagcaagggccactgcacggtgtacacggccgacggcgcacggttcgaggtgccgctggcgtgccttagcaccgtgttcttccgggagctcctgcaaatgtcacaggaagagttcgggttcacgggcggcgacgacaggatcacgctcccctgcgacgcggccgtcatggagtacgccatgtgtttgctcaggagaggcgcctctgccgagctagagcaggctttccttagcaccatggcgatgtcgtgccactatgtcagccgtgtggcgccgtgtgttgaagcaagccagcagattgctgtttagtgctgttcagtgtagtgtaggtagtactagtagagcaaagatattaactagataagtgttgttcagagccttctaatccagcaactgatcaagtaaggtgttataagtacaagaaaatagagagacatgattcctgttccgaacctaagtttcgctgcagtgtcagagataattggtttatggaaattgtgaggacttacattaagtggcaacagagtttcttctgcagaactctgacttcaaatccgagaggttcttcatccgaaaataatctgagaggttcctgcacgtggcacaagtgcaaaacgcaaaagccagcagattgctgtttactgctgttcagtgtagtgtaggtagtactagtagagcaaagatattaactagataagtgttattcagagccttcggatccaacaactgatcaagtaaggtgttataagcccaagaaaatagggagacatgattcttgttctgaacctatgtttcgctgcagcgtcaga

SEQ ID NO: 3511 - DNA, 9672 bp, Sorghum bicolor
taaaaataataaaaaagtagcactctcattggctatcgaggagagagatcaaatagctagcgacttcctaatagctagcgaatcataaatagctaatctagcacgatcttctagaaataactctctcacaatagctagtgactttctaatagctagcgactttttaagctagctatttgcaaattgccattaaaagccaataatattttttcaccggtggtttgaaattcgaatggcctctgttaatctatatagcttttaactcctagcctgagagtagcttgttctgttttcggagtagctcatgcaaaaagaagaatcagcacttgtcgtggctgcaaaccatgaacggccggtggtgcggtcaagcgatgctcgctaaggccttgttcagttccgaaaaaatttcggattttggcattgtagtatttttatttaacaaatattatctaattataaactaactagattcaaaagatttatctcgtgacttacaatcaaattgtgcaattagtttttattttcgtctatatctaatgctttatgcatgtgctccaagatttgatatgatagaaaattttaaaaagtttttagtttttggagtgaacgcctaagtctagtggcgagcgcgatggagcgacgctcaccgggacgcggcggggcacatgaggccgatagagtagagcaatggcatcacggtggtgtttgagcaaataattgagccacactaatatctcgctggcaccgaaaaacatcgcctgctctaaatagtttggctgcctgtttggggttgcttctctcctcttaatcatgctaaaagctatatagattctagatcaacatattttctcatgattattctctccgtatcctgcttcaacttgaccgttggatggactgttagtcagcagtggagaaaatcctcttgattctctcctttcctttgtctcggctccacctgctcaaagctctactcccgcctctcctgcttgagccttgcctccgcctctgcctcacccagcatcaggacctaagcgtcgcagactcgctgacacactcgcctccgcctcctcactcagccaagattgagtgttttggactagattttaattttgagtgttttggatctaaatgtaaatggttaggaccacaagtttaaggactgccactgcatttaactctatttattatataaaatatattatatctaaaaataattacatgtataacaaagcactacttatttgatataataaataatttaataacatattttatataaaaatcatataaaaacgatcacatgctatcgctatatctacggtgctttaaaagctatatcacactataaaatatatgacaactataatagcctaaataacttaataatattttttatattaaattatataaaaccagtgaaagactgtcacgcaatgcgcgtgacagctagcggtgccttaaaggcgctgtggtggatgacatgtcctgtcaccaccacataaatacagtttttctctctcttctcattatcttgagatctgcgctgcgccgcgactctgcatctggccgtgtgcctcaccaaattcgaaatggaaccccgactccatctgcttctgttatcatcgggaaatgctccccacaccggtgaccactgatcagccgccacacaggatctttcaccacctactttctctgtctacaaataaatattgcatgtgtaaatcttgaaaaattaaacttttttaaatttaactaaaaatatattaaataattttaatatttatatatataaataatatattataaaagtatattttataccgaatttaatgatatatattatatatgataaatattagtatatttttttatatatttgattaaacttaaccatgtttgactcaaaaaacgagacgtacatttattggtaccggcgttcccgggacagtgccgcactctctcgctgacagccctggcacacatgaggctgtccccacatgccagtggcgtaccaccagcgacctgcccattgctggtgctgtttggcgggcgcggcgcgtgagtttcttgttgagacttgcttggagattcgccgtctccccctctcgtctaaaagcgggcaaagcagagacggtggaggcaggcagagccgccctgtcgccggcgcggcctcctgctcctcctcctcctctgccaccgcctcccaactcccagcgcgcaggggccgacggcgacgggaggggagaagcggcagaggtagtccgaggaggggcggggccgacggcgacgggaggggagaagcggcagaggtagtccgagggggggcggagagaggctgcgccgtcccactccgtccggtgcctcagcccccggagccccttcgcgaaggttcgggaatggcggtaagacctcccttcccctgctttcctctactctgtccccttccagcttcgtttggctgctggggaaagtaatacaagagagaaatcccccacgcagggattgggttgatcccctcccaccacccaatcccctcccaccaacgtgatccaatcccttgattccctggcatcatttggattgtgcgctaattagctcagtttggcgttttattgtgttcgtgtactactaatgctcatcaaagctaattcaatgttgaatttactgattatttaaccataattcaaaatggtagtgttctagaattcagaaccgaaccatgggagagcacaaaaacgagctctaaaattcaagaaaatactagcaaaatccatgtctaaaattcaaaaataacagaaaatgagcaagagaagccatttttcatcagtaaaaaataaaaaataaatgtattggaaggtgcagcaacgattgaaacattataagaaaaaatatgtcgaatgtaatcacatcacatggtcatataccagaacattcttcaccaagtttcgaagtagctcacggctaagtaaggaagacgtgaccatcagcatattgaactagggcttgcacatgcatacacaaatttaggaaacaagacatttgttttcaagattcctaaataaataaaatagtgctagcatcccagcggtgccgaaagaagttgaactgaaaccacttagacttgcacttgaaacgaaaggtgcactttcacttctttcctgcaagcaaagtattcatacttttagacattggtgagcaacaaggcaagaatacttttacaactctgaatcatctgccagactgacgaaacggaagaccgaaagcaagctctattgtacaaagtctgaaaactactctgtaagaacaaacaatatatgatcattcaattctccaaagtttttcacagtcagtcagtacacttgtattgctaaaagatttgctgacgagaggcagcgcttaagtcaagtacacttgtatcattgactattatatactgtgcaagaccccagggagatgagcaacaagtagagaactcaaagaacaaaatttctgaaccactctgttggaccacggctagttcaacactgcaaacacctcaaagcagcaaacaaatcagcaataatcgtgtacagtaaacacaaaatagcttccaggtcagtgccacatttccaagaccataagaaaaatctatagtatccgattacattaaagagaatggagagagcatattttagtgatacaacatagttaaaattttaatgatataaaaggacaagtttaggcctaatctgcttcgtactgtttcttcaattgccttgtttcccttatgtctgcatagtgcatactggttcaaagcaaagctttctagtgagttcatgaaagtaatgaaaaaaatgtcagcaaactcaaagacaaaactaaacaactaaccatttcttccttatccaaatcagacgtgttgttgaatctgcattcatgaaaatttccttgttctaagcatctttgaaaacatcaaaagcttcaaccttttcttcgctagtgagttctaccatggtgttgatgacactaatgcattccttgatgaagtattcatccgctcctgatcctgcccttgatttctctgcaacctcaccaaagccatacctaaaaatcacagaggctttctgctgtttcttggacaaggtcacagtcgtggggaacaaaaggagaagggagaagctaccaataatctgtcaaaacgaatgcacaaaaacaagtcatcacagatctgaaattttaagatggataaaagataaccctgagctacttaagcccatagctaattagatagacatatatgctacaagatgtgaaagtaattagacagacatagctactcaagcacatcatcagtaagaagttgtaagctcaaatcaacatattgcagcaagaacccatcctctataatattgtataaatgctagatggaaatatttgcagacaattacattgcaatttttcttcaacaatagctctgattgcctagtcgattccaagtgctttgaagaaaaaagattgaccaagatttgttgtctacaaaacaaaaaaaaaacagcaggttctagattagataatttattacatactagtagtaggcgagataaacaacatcataagaagataatgagaacattcatggtgtagtattgcagccacttgtcaacaagattacagtcggaaaattataggcatgcaacacatagaggtagtacatcagtgtatatataattttttataagaacagttatagactgctttacaatccaacccaatcttatttcagaacaatccatttgttaatagaacttcataatccaacccaatctcagatcagaactctaaaaatgcacaacaaagaaacttagcaagacaacatagagtggacagggagaccaagccagacctgaatgcagtttctgtgcatccacgtggatggaactccagcgtgggtttgcttccatgggaggccggaatcccttccgatccccgcagatccaaggctatccaaacgaagcctccatgtattgtgaagggatgatctctcgcgccatgaattcttgatgctaataatctggtccactgctacggtgattccgcgcgttagattgggttccctgatgtcgcgaggttgggttttgttcccttttgctgctcagcgctagggttttcttaacactggatcaagttagagcttgcattttggatgctatttcgggattgatggtggtttggtcctattgtttctcgatgtgcctgatgtttagttcttaattcgtgtcacagcactgggttagcgacggtgatggcagtgacagcttcgaatgggatagtgatggcaatggggaggaggcagggagcttcaacactgctggtgccagttcatcagcaatggcatcaacgaacactgacgctccaggcccatcgagacgggtaagccaggtaactgatccatacatgcagcaatgtgtgaactcagctagttgttcttcagttcatgttactcagggtttttcaaatcacttgcgctaaactggcctgggtgggggtggatatatatgataatcatgaacaaaatcaggatcatgattagtgtatagcgacacgaacactctttgtgttactgttaccttgtttctgctggctaccattgtaatgtttctgtttgtttgtggggccgattttaaggttgctaatggcaatgggaaggctgggccatctgcctctttggttcagaggtatatagacatgggtttcgcagaagagattgttgtgaaggccataaaggacaatggtacttagctaataacccatttcttctcattcacttagattctatgtgattttatatactctacctgacagctgctttttttctttcaggcgataatggagcagatgcattagttgagctgcttcttacttaccaggtattcatttgtgttcgtgcttctattagttattctttgatgatgttttttgcatggtgtcaaaaaggatttgtatttacaaagtgatgctaaatgcaggaactaggcaatgacctcaacgtggataacggctttgcttctggttgtgtcccccaaactgttgacgatagtggtgatgatgactttctagaaaactgggatgatttagatgctggtgggagaagcaccagagttgctaattctgttgatgattctggagacgaggtattttgacgcgcccccttggtgactgtacgcgtttactttattcttttgagaaacctgctatgtatttagtttgcttcaatcatatatatacttatgcattaaacttgtttaatgttaatccagtaagtagactgcttataaaaaaaccataaggttccttacttttacttgcacctgttcctttggttttcaaacagctgttagctacatagctgtactagaaagccaatctactttgttttgtcccttatcttttgggacaaccgggttcttttaggcaaaacagcatgtttgaatgaaaccaaaatcattaattttgtaagaaaatcgtatcactaagacagtaagcaagaaagttatgtcaatcataaacttggaactattgcatttcatcttatgcgtatgattagaactttcgtgttaatgacattcttgaacaagacgccaccatggactaacaaatgaaattgcaaaattgtgggtgggtcattaatgatgttcttattttgtatctgacattcatttctttgtacttaagtttggtgtaccccctcctccctgtaatagcactctctcctagtgttttaacttttaattcacgaaaaaacccttcagttatgggttataaattataatctatttcctttttttgatacttgtgcaattgatcactgatcctgagaattggaggctctgtgtgcaacaacattcctgttcaactctaacattgaacttgcattgtactttctggtgtttggcttgcgacttcatgtagctgagagttgattgaattggactacagctggacttccatttttttacagttacatttgtttttgtcaataagaaactaattgttttcctaacttgtccatagttatgatacttcccatttttatacatattataagaattgttgtttttgtcctttggaaggtaattggaatgctagtttatgtagcttgtcaactgtattctcagtgctttcctgtgctttctacacaggatttcttacatgagatgtcacagaaggacaacaaaattgattccttagttaaaatggggtttcctgaagacgaggctgcactggctattactagatgcggtgtgctctctgaacctttattccatgctcctctgtttgccttagattcagtttccaaccttgaaagtaggatatgctctcatatagaataaatcagttgagtaataacattgccatgtttaattatatgtctaactttctattggtttatctctggaatctggattttgagaattttcctcaaatgctgtaagttggaactcgtaaattggctacaatcttgaactgagataacctagaatggtttattctttccaagcttgatttactcagattctgtccttgcccctgttttattttaacttatcttcagagtttatcattagatcttgtctaagtattctccaaatgcccctgttcactgatcatgcaccttacaccatctactgtcgtctgtggtttaaaattactcagggcaggatgcgtctatttctgttctggcggattctatctatgcttcacagaccgcaggagatggttattgtggcaatttgtctgactatgaggttcgtctttggtgaactgtccatacaagtctgcaataagatttagttctaatttaatggtctgataatggaactgtgtttgcaatactgcaggatggagggagaaacaaaggaaggttcatggatgggaacaacaaaaagagaaagagatatggaagtcaagcactgggaagtagaggcccattagatggtagcgctgatgaacccatgctgctcccaaatccaatggttggatttagcttgccagatcagtggccaagaccagtgaacagagatctacctgcactagctatgggtccaccatacttctactatgagaatgttgctcttgctccaaaaggtgtctggactatcatatcaagattcttgtatgatattcagccggagtttgtggactcgaagtacttctgtgctgctgccaggaaaagaggttatatacacaatttgccacttgagaacaggtcacctctcctccctaaacctccaaggacaataactgtagcatttcctcataccaaaaggtggtggccatcatgggacccaagacaacagttcaattgcctccagacttgtgtgtctagtgcaaaactgttagagaagattcgcgtaacccttacaaacagttcagatccacctcctccaagagttcagaagctggtgttggaggagtgtaggaaatggaatcttgcttgggttggcttaaacaaggttgctcctctagagcctgatgagatggagtttctactcggctttccgaaggatcacaccagaggtatctgcaggacagagaggtttcgatctctaggaaattcatttcaagttgatactgttgcttaccatctctcagtcctcaaggatatgtacccagaaggcatgaatgtactatctttattctctggtattggaggagcagaggtggctctccacaggcttggtatacgcatgaagacagttatttcagtagagaagtctgaggtcaataggacaattctgaggagttggtgggatcagacgcagaccggtactttgattgagatcaatgatgtgcagacactgacatctgagaggattgaggcatatattagaagatttggcggctttgatcttgtgattggtggaagtccctgtaacaatcttgctgggagcaaccgtcaccacagaaatggtttggagggcgaacattcttcattgttctttcagtatgttaggatcttagagtccgtcaagtccatccagcgtttatagtctttaggatcttcattgttttggttctggaattgtagcatctttcgttgtgatcaaacttgtgaataatttgaacgtcgactggtgtaattctcatgtcactctaatttaggctacttttaattttatcccctttggtgattatgcaaactgatgttggtgcaattctgtggcactgtttggtgaccaaagtgttggtgcagttctgtggcactggcagttctaatactagtttgtatttttcaatgagagatgtatctttgttgtgaaaaaatatctgaaattgtggagctgtgaaaaggacagcgctattaactccaaccacccactgatggtgaggacagaggatgtcctgccacactatgtgcactcaacccaaaagatcctgcttttgctcacggttaccaccataccataactccacccaaaaccataaaaaccagtgtggcaacaatgagctaaagcttccaggctctaaatcatcaggatgtctgtgccagcatcagcccaggtgcctcacaccatacgacctgttgggagctgctttagattgcatcaactacctgtgcagaatttggaccgatgtgagttctcgatctcagctttggccttctttttgaagtgtatgcatgtcgaatat

SEQ ID NO: 3512 - DNA, 4346 bp, Sorghum bicolor
atagatcctgacctagaggagtaggaggaggaggacgagcaggaggtggaggaagagcagaggaaggctcagatctagatccacgggaggagagagagagagaggggaaagagagcctcagatctaaatccctccctacctgtgcaaatgcctcctgtgcaaattacgattgcattaacaagaaatgcctcctgtgcaaattagctagtcatcatcgaccataacagcaacatgccttaaattaagaagtatcaaatgaaagaggcaacaaattcagtagaacatataagtgagcatgattgaatgataaaaatccaagtccataaatcataggacataaacacacgagtaatatgaataaggcagctttcaacataaaaccttggaactaagcaagcaattgatatatccaagagcataaaccataggatatgaacaagaaatcgatagatctcgtcttctaatgaaaccctagaatgaaatcaagtgaggacagggtggatttcacctcaaggaagccgaaggggaggtgagcctgctcaaatcgacaagcaattgagaggcaacgatcgtagatgtggaaggtggggaagaagaaacgcccaatccaagaccagcaccaccccaacagctcagagaggaagacgtagggagaacaccgccgccacagagcccggcagcagagggagcggcgccgcaccagagcagatccactagaggggaacggagaagaagcccgaagacacctgtgtcgcttgccgacctcaccaccaccaccggtgactctacgagactacagtgggaacaagaaagcaagaggagaagaacaccgtgagggaggaggaggaggagggggttataaaggcagcatatttcgacggcaatggcacatgaaacttttcctattcccacgcgagcccgccagagcgctgtcgttgcccccaatttcgcccgcgcgagctcgggcgcagcctggctccaaaaaacaaaggggacgagcgtttcttgagagacaagagagactggatttgcagcccgaggaacaaggctgctaaatatttaaaagtttgcaggagggggctcagccaccccattttagccgcatatcaaacacactcaggccttgtttattttgaatttttttgcaaaatgtccaagattctctctcacctcaaatctcgcgacacattcatgaaacattaaatatagataaaaaataactaattcatagttcgtatgtaatttgtgagataaatttgttaagtctagttagtttatgattaaataataattattaaatataaaaagtgttaccgtaaaattttttcaggaaaccttgtttagattcaaaaagtttttggattttgtcactgtagtatttttgtttttatttgacaaacattgtctaatcatgaaataactagtcttaaaagattcgtctcgcgatttacagataaactgtgtaattagttattctttttatctatatttaatgttttatacattgtctaaagatttaatatgatagagaattttgtaaatttttagaattttgggtgcatctgaacaaggccggccttgtttagttccaaatatttttggaaaatcgacactgtagcactttcgtttgtatttgacaaatattgtctaatcatggactaactaggctcaaaagattcgtctcgttaatttcgatcaaactgtacaattattttttatttttatttatatttaatactctatacatgcgtctaaagattcgatatgacgggaaatctgaaaaattttataaatttttttagaaactaaacaaggaccaaaccaaatgtgggaaggagggagtgaagtggagtgtggagtagagcaggagagcagaaagcagggcagggcagggcagggcatcccgtgccgtccccttcccttcccttccaccccaattccgttcgaatcgattcgatccccagctcccatacccaaaccctaaccctaccaccgccaccatgtccgcccgcatcgacctcaacaacaccgccggatccgcctccgcctcccaaaccctggcgccagcgccacccaagcgcggccgcggccgcccccgcaagaaccccccgcctcccgctcacccgcgccctccggatcccgacactcccatggtcggcggcttcgctccgggcgacatggtctggggaaagaagctcaaccacgccgcctggccgggcctcatctactccgccggagggaacggcaccggccacgagggccagttcctcgtctcctacttcggcgacaaggccttcgcctggtgcgacggcgccgagctcaggccctacgagccctacttccccgtcgccgagctctacgacgacggcggtgaggacttcgacgccgccgtcgaggcctccctcgacgagttctcccgccgcgtcgaggccgctctcgcctccgccgcccgcccctttgcccccgccgatttcctcacctcgctccacgatctcgcagcggatcgcatgggcttcaccaacagggtgcaggccgccgtcgccaaggcgcatctcagagccttcgacgccttcagggctctgccggacccacctcagtacaccttggagctcggtctgctcccacacatcccgctcccgctgcccaatcctaaggctgccgcggatgctgacaccacccccgcttccccttccaggaggggcaggaagaggaaggagcaactcgtcaaggacttcgactccgatgaggactgggaccccaggaagaggggtgccaccgactctgattccgatgtggattttgaccgcaggagaggattcaggggcaggggcggtggcggcggtgctggcagtggcgcgccccgtggcaggcctcgagggaggcccaggaaaacagatgcctgcagggaccctgcaccaccactcaaggacaacaatgacgacggtggcattcaagacaaacttgagtatccatcggctgctgagatgttgctgcagcttttgtctgtcgccgctgatcctgtaaatggcaattatgactctgctcctgtgattgttagcttcttctcaaagcacaaggactctgaggcgcctagtgtatacgaagataaagagctgcttgagacttttggttgcaagaagggtaggaaaaagtccatcgtaagctcaggcccagctacaaagtcagaagctggcgatgataaggatcagttcatgactgcagatggtcagaggggccggaggaagtctgctgggagcctgtactcagctagaaaggctgaagattcctattggtgtgatatcatcatcagcgatttcgacgatggagatagtgactatgaaggtcgcaagaggaagcggccctctcagaacactaacaggagtgccaataagaagatgaagcaggaggagcagccacctcgaggagccccatcggatgtgaaaaatggggctcctacagatccatcattttaaatgctgcattctgcactggatatcctgcgattcagaggtacacattccttgattgttcccaactaaagttccgtattcatttgcttatcaaattttcatatgtgaattcaggaaatgcaccatgaagtttggagcaacggagcataaattggtgtcactgacgtagagttaggatggctcactgaccgggtcacattagtcactgagttgagtgagcaaattttaggctttctgtggttacatgcatccagacgactggttctgtacttggtaccggagttagcttatgttaaatcattagattgtagagtagattatgtagcgtgatgcgctttgctttatgttagcaacctatcttttttgtattgcctagtaattgcacagctgtggatctctctattatgttgttttttcagcgtatgcttccctttttggctcctagtttacttaaactcctatagaatgctgtgcttccgtgctttatcagcatggcaagtgaagcggcaactccaatgaagttcacactcctataaaacaagccatgatgggagagttgaagccgttatgttgtccatggtcatatctgttacgttggcgagctgaagccgtgatgttatccatggtcatctgttacgtgaggaagtgcatgattttgtgtactgtgctttacaaagtatggtatccattcagattttgctaaaagaaaatagagtgctattgttgtgctgccataataccatatggagagctgtgaatctactgtccaatttttgttgtgtatatgctccatgtatgtgacctcttgggtgtgattgcttgctatgcattttgtgacgtcgggacctgtttctattacttgtcagttttgctgcc

SEQ ID NO: 3513 - DNA, 7463 bp, Sorghum bicolor; identical to SEQ ID NO: 3465

SEQ ID NO: 3514 - DNA, 5287 bp, Sorghum bicolor
tctcttgtgtgcggcatcggtgctctcttcgatattatataaatgcttagtccatcggttcaaagacaagagtataattctagctataacaattagttaatccatcttaaatatttttttaataaaaaataatgatgtttatgatatcaaatagataagatttattatgaaatatctttataggttaaggcaatgttttttccctatgaacttagtttaacttaaaatagtttggttttgatttgtactctttttaattagatggatggatatattaccaaaatcgcaaaataatctataaccaaaatagattcatccatgaaatgtattttgataaatgcattatttaatatcataaaagtagatatagtagtattttatatagatctaattagagtcagacaagtttaatagggcaaaatctaaaaagcttacattacatcttagaatgtttaataatgcattatttagtgtgtacgtaattagtattggaactaattaaacttagtagattctgactaatgattacttaaaatgtattcatatgtatgattgccttaaatatatattcattcactccgtcctaaaataatttgctattcaaattttgccacaaaaaaaatacaagatgatgcgaggtccatcgcatgcgtatgaaaataaaagataatatcagtagccagaagctttgtggaccagcgtgaaactaaaaaataacatcaatttcaaaaagaaaaagaaaagaaaactgcgagacttgatgctgcgagaatatcctagctttttctgtaggtgtagaagtgtattccccccccccctggttctatatatttttatcttcgtagtgaaaatgtaaggcgttacatctacgttaaattctaaaattctaagttattttagaacagatgaagtagattataagaacatattcacattatagataactcttaacacaacccgctctttggataatgatgacaaagatgattgtaatggtattttcaaatccttacaaaaagtctacactttgtcacatttattttcgtcataggcttacgtatgctgctgccctaatacatatctcctctatgataagcaagctgctagtgacgctagtccatttgattcctatataaatctgcaattatggccgtagcaattaattttatatactcaacaaaggaatcaaaatctcatagcaatcataatcctaaatgctccaaaatcagctagctggctctcccttatcttcgtttttttttccattcttttttctctttttgaatttgaaagaaaagaaaaagaaaagaaaacggccgggcgtggtactaaggccttgttcagttgagggaaatttttggttttggctactgtagcactttcgtttgtttgtgacaaatattgtccaatcatggactaactagactcaaaagattcagttcgcgaattacaagtaaactgtgtaatcaatatttgtttttgtctatatttaatacttcatgcatgtgccacaagattcgatgtgacggggaatcttgaaattttttggaaaaaggcctaactcccaagtcccaactacgcacctaccgcgcgcataactcatgggccgcctgcctcatcatctccagcgtcgccgtcgactcatccttatcctcccccatcacgctcacggctcacccccgcggccatccgtactctcccggccgccccaccgcggccgccccgacgtgtcgcgccgccaccggaaggtcccggccgggggcagcgcgcgcccagcggtggacccctcgcgccaacgctgacgcgagcgcgcgtccgtccaagaaacctgacgtaagcagtgacagaattggcgccgcctctcggcgcccacgtgtcgcggtcaaccggtcagagcggggctccacgtgtgcgctaccgcggggggccggcgcacgggccacacgtgtcgccgtcgcccgcgcctataaatgcccggctccgcactcggaacaagtttcaagccctcctcccctcttcctcccattagcagcagcagcgtcgaccagcagagcacaagccggcagcgattgagcgagggaggaacacgatgagcggcggcggtcaggatctgcagctgccgccggggttccggttccacccgacggacgaggagctggtgatgcactacctctgccgccgctgcgccggcctgcccatcgccgtccccatcatcgccgagatcgacctctacaagttcgacccatggcagctccccagtacggtgaccgtgaacaatttcagttttctggccggcggccgtgatgatgttgatcgacctgatcgattatattgatgccgtgcatgatgtatgtgtgtgtgttcagggatggcgctgtacggcgagaaggagtggtacttcttctccccgcgggaccgcaagtacccgaacgggtcgaggccgaaccgcgccgccgggtccggctactggaaggccaccggcgccgacaagcccgtgggcacgcccaagccgctcgccatcaagaaggcgctcgtcttctacgccggcaaggcgcccaagggcgagaagaccaactggatcatgcacgagtaccgcctcgccgacgtcgaccgctccgcccgcaagaagaacagcctcagggtaagcttgaaattagaagcacctcgccgtccgtccgtccgtccgtgttctacgacgacgaacgtaacgtaaattcgtgtcatcatcgcgtcaaacaacacaaaagaaaacgaagaagtcgacgataatgtgttgctttcgaaatgaatgcggggataagcgtggcccacggttttgggccgctgatttttcttttttcttttttggaatgggccatgctactaggggggctgcaccggcgcaacttgcccaaatgattcgaatgggtcgctgtcctcggtggggaagcattcgatgcccatggcgaaccaatcattttcgcccgtcgcgccctgcgacggcgacggcagcaaagacgcagaacaactggatatatgaatatgaatgaatagagttcttgtggggtctgggattagacatcgaaatgacgctttgtgattcttttagctctcattcaattatcagtttgcgctagtgcttacgtgatcatcatatctgacaaattgtttatttctgatgatgatgggtgcagttggatgactgggtcctgtgccgcatctacaacaagaagggcgggctggagaagccgtcggcggtcgccggcggcgaccacaagccgatgttcgcagcggccgcggtgagctccccaccggagcagaagccgttcgtggcggcgccgggcgggcttcccccattcccggacctggcggcgtactacgaccggccgtcggactcgatgccgcggctgcacgcggactccagctgctcggagcaggtgctgtcgccggagcagctggcgtgcgaccgggaggtgcagagccagcccaagatcagcgagtgggagcgcaccttcgcctccgaccccgtcaaccccgccggctccatgctcgaccccgtcgtcggtggccacgccggcgacccgctgctgcaggacatcctcatgtactggggcaagccgttctagacgaagacgacgacgcgatcgaaggtcatcaatcaaaggggggaatttatttaaaaaaaaagaaggcgctgcggttggttggttgatctgtcttgggcagcgcaatgcaatgcgacgcaaccgctcggtgtgggcttgactcaggcgagccgccattgttgacctcgttgaggaggagataggttatgaaactatagctggattggataaggcggcaatgagaccgtgtggccccgccggaagggagggagacggacggatggcacagtgcattgggtggtcgatcgtgcgcggcatgtgtgtgtgtgtgtgttcttgtacatatacatacagtacatgattggttcagtgcagggtttctgttccttcattggttagtagtaattctattttataaggtcctgtagttgcaatctccaatgggggtaggtagtgcaggctatatagatactccatttgtcatcgtcaagcttcgagtagcacagagtatattgtagctgttggctctttgaaaaaactgaaacgggaattatgttatttcgatcattttgctggtcgcgtctgaagaagtgctgttcgtctgtattcaactatcatgttcgcttggctgcctgaaaggtacaaagaattatccacggttttttttaataatattattaaataaaataactgactgattcgccggataaatttaagcgaacaaggtaagctggtttggtttggacccgttgttttgcaggcttgcagcggtgctgtatgctggagttgtgcttatggacgaagaaacgtttgtgaaccacacgttgaagggggcaaaaacgtgctgtggcagacaaaggtctgccgaacacactgaaaaccgtgagacactagtgaacacgttgaaaaacgagggggagatttgagagtcggcaggcagaaggtggtcaatccgcacgtgtaggcagggaggcggcgacggcggtgagtgggccggcgagcgggcggccaagcctggacttccacatgtcccgacgggatcgtcttcgggcctatcaccactgcacacgcccggcgaactgtcaaatctcatatcgtctctcctgtgtggctgggtgtgactgtggaacatgtcccaacgatttatggatacatcctattactagtgtggaacatgttttgttatttctaattctaatctaagttaagttatattcattgagtacgagtaccaagaaaagaaaaaaaagataatacaatgtattcgatttttttttaaaaaaaaataaagtaatttaagagaatacttaaatgacacaatgtatttcaaatattttagttttaaagcaattaacgagaatactcaaatgacaatcgtacgttaaacctggttagagagtttctctgaaaattatagttttattttttaataaattttgctaaatctgaacatggcacgccacagtaccttatattttgttgagatgatgtatctcggttgtcagcaaggcgttgagatggtgtccctagcatgtctactcacgacaccatgtcctgccttgtgagatggaactaattcactaaagttctactcctatagacctatagcaaggcagttcgccgttgtggtgttgacatgtcgcattgcatgctatgcgtcaagatagcaacggagacatcctcgcccgagattgagaccccgt

SEQ ID NO: 3515 - DNA, 13667 bp, Sorghum bicolor; identical to SEQ ID NO: 3504
  misc_feature (6359)..(6458): n is a, c, g, or t

SEQ ID NO: 3516 - DNA, 4355 bp, Sorghum bicolor
catctgtaactagttaataggtggttggagttgtctaaaactgccactagaaagggatgaaaggagtgatgagagccaaagccaagtgtgttttggcaacctattagctgatttttggagtgctaatgagataattgttagctggtgcctagttagccaccctatattagttgtgcatatttgttccatagcagctaattttgcaagctaacggttagagctaatgtatccaaatataccttaaaaaagaagagaaggtaggaattactaagttatgtgccaaccaaaggtttcatacagtaagttgagagatatatatttcttctatcttgaaaagaaaatgtaattctaggttcaaaacatgtcaggcgttcttaaatttgactcaacatttatgtctccaaacttgtttactataaaaaaatatatttcaaagttcatcaaataatacatattttgtattataatcggtagtattttcgtatagatttgactgcactttacattgtgcaactgctttttgtggcatggtcaaaggccttgacgaggagtgcactgatgaccggaattcgtataccactgaaatcaaatttagagagtatttggtactaatccagacaaacttttgggtgataaattagaatcactttgtgtaactatttaactgttaagctagaatctaaatattttttataaagatatataaataaagacatgctttagaaaattccttttttaggatgaattacaacttcaaaacaacccattttaacttgttacactaagaaaatgttttactaaaaagccacacctctccaccatttcacactagcatatagaaatagagaaataattatcagtgaatcgctacgcattagaccgttcgaaaattattccacggtttctcctgaaacatacaaacatttttcctagccaaatagggcctaagctaagggtcatttcttagaatgttatagtcagacttgatttcttcctcaaataatttctctatgaaccaaaattattattattttgaatattttggctttgttagttggtttggtttcacattctaaatggaagatttgtaattgaaatgcgaatgaagtaaactgttgtagtaataactagaaaagcacattgtgcctggtataataaaaagagaaacgtttaactggcgggcaagaatgtggaatctctgctaaatctacaaacaaagagccgaacaaacccagcgccgcctacctacagatgtttgcaacaaccttgttcacaaaaaggaaagtttgtttgcaacaaacaagttctatgtggtctgggaaaaaaaaatctcagaaagcaccctacggtgatccttggactgtagcgtagaatccgtagataccgtcgccccgttagccctcgccgttcctacgtctgcaccttcccaggtgtactacgccaaccatgcctggctgtttccggtgaaggtgtactgcgtttgcggctctccaacgggtttccatgccgccgttggcttcatgcgtttgcaactctgccttgccggcccgcggtttccgttgtactagtactaccataccacgcgaacgaacgggtttccttccccccttcgtccccgtaggtagccgtgagcctaccccaatcaggccgggactccgtcccgcgtcagacggtccagccgccctgcaatcacactccgacgcaccccaacaacctgctaggatacaacccccacgcccgtgcaccgtctgatccacatcgtccggccgagatccctcacgagaacgtcgtgtggccaccgcctacggctctatacaccctcggccctagtaggcggtaggcccctgtgccgccgccctagcccaccacccattataagccgggcggggcgccgcggagctgagccattcccacacggaggtcgacttcccctcgccacgcaaaagccaccgcggccccgcccgtgcttccgtctcgcacctgccgatctactccccggcgagacgagcgccccggcgcgcccccagggaatgcggagcgatgaggcggcgctcaggcactgacgtcgccggcctgcgcaagctgcgcggcgaccgaacctgccaccgcaagcacgttgaggacgggtagacccatccatccatccatccttccttccatcttctagtcgtcatcgtcgtagggtagtttgcagatagctagctcggtcgtttctagtaagggatcgatccatcgatcgatcaggcggcatgggtgagggggaggcggcggaggtgaagggcggggtgctgcagggccgctacgagctgggccgcgtgctggggcacggcaacttcgggcgcgtccacgcggcgcgggacctgcgcacagggcgcggcgtggcggtcaaggtgctcgtcaaggacaaggtgctgcgcgcgggcatgatggagcagatcaagcgcgagatcgccgtcatgaagcgcgtgtcccaccccaacatcgtggagctccacgaggtgatggccacgcgctccaagatctacctcgcgctcgagctcgtccgcggcggggagctcttcgcgcggatcgtgcgcgccggccgggtcaaggaggacgtcgcgaggcgctacttccgccagctcatctccgccgtcgacttctgccacgcgcgcggcgtgtaccaccgcgacctcaagccggagaacctcctcatcgacgaagcggggaacctcaaggtcgtcgacttcggcctcagcgcgctcgccgaccacgcgcgcagcgatggattgctgcacacgctctgcgggacgccggggtacgtcgcgccggaggtgttccggaacaagggctacgacggcgccaaggccgacatctggtcgtgcggcgtcatcctctacgttctcctcgccgggtcgctgccgttcccggaggacaacatcgccgccatgttcaggaagatgagccgcggcgactaccggtgcccgccgtggctgtccaccgaggcgcgcaggctcatccccaagctgctcgaccccaaccccgacacccgcatcaccatcgcccagatcgtcgagacgccatggttcaacaagccatccatcgccaagcccgtcaaagcctccgccgccgccgccgccgagccgccggccgagcctgtctgctccgtaaaggacggcggcgacaaggacgagccgccggagacgctgaacgcgttccacctgatttccctctccgcggggttcgacctctcgccgctgttcgatgtggaaggcggtcccgcgaggtgccataaccgggagggcggtatgcggttcgcgacgcgggagtccgcgagcggcgtcgtctcccgtctcgaggaggtggcggcccgcggcggcgggcggatgcgggtgaccaagagcggcgcccgcggcgtgcggctcgagggcgcggagcgcgggggccgcaagggccgcctagccgtggcggccgacatcttcagcttatcgccgtccgtgctcgtggtggacgtcaagaaggacggcggcgacacgctcgagtaccgctccttctgcagcgaggagctccggccagcgctcaaggacatcgtctgggcggccgacccgcagcccgccgccaccgccaccgccgtcgtcgtgtgacgccgtgcgaccgcctgtgccgctcgttcgtagtgccattgtttgtttagtcagtgtcaattccatttccaagtgattgcgtcactgttctcgattcgataatgacgtgagatctactgtttgtggggcgacaagaatctgtatctcaatcgcagccgagcggcggcgctctcggcataatcgagtttgtttttgtgattgctatgcctgatctgaatattccttgtcaatctagtccattatccctgcattattggtgatgtttgtatgtgccagtacaagtttgttgaagtttgaataggctaaaagatgcgtcaatttccttcttcattgctccagaggcaatggctttgcatgtttgcactcaacaaacggttagatttttttgcttgcatgtttgcactcagtggtttgaaatgttaaatgtaaagttgtgggacagagtgaatgagtgatacacggtcattggagtggtgtgagctgtaagcttgttttgacagcgggttcttagtaattcatcgttcgttttgacagcgggttttcagtaattgagtggtgtgaactgtaagcttgttttgacagcggggttttccagtaattcatcgtttgttttgacagcaggttttcattaattcatcgttcaaaatcaaagtgaggacctgctgacaaaagctgtaccactatgcattatgcaaacaagtgtatcgagacacctctgtcaggaatcaagat

SEQ ID NO: 3517 - DNA, 6809 bp, Sorghum bicolor
gagcagtaaccgcaacagtacatgtacatgcatgcatgcagatatgcaatgcagcccccggtcacgtttgagactgtcaggaagtgggaccagaagggaccagtcacgtggtacgtagccattttctttttcttctggtcatcacacgcgacacaagagaaaaatttgttcccgaaaggaaacgttctgtgataatgtggcactttcatttatttgtggtaattattattcaatcatagactaattagactcacaagattcgtctcgtcaatttcgaccaaactgtgcaattagtttttattttattccatatttaatactctatgcatacgtctaaaaattcaatgtgacgaaaaatattgaaaaattttaggtttttaagtggaactaaacatggccaaagatagaaagccatgcagaaaagaaatcatcagtagcgaaaaagtagcgaaatcatcagtagggtcgtggaaattgcttcatgatcttcagaaatttgttgtcaattctggggtttcacattaacatcctccttttgcagaaccacaccttttacttcaccctaaaaacaaaaagttttcaagattttctatcacatcgaatattttgacatatatatgaagcattaaatatagataaaaataaaaactaattacacagttttactgtaaatcacaagatgaatcttttgatcctagttattagtccatgattggacaatatttgccacaaacaaacaaatgtgctacagtagcgaaattcaaaatcttttcgcatctaaacaaggcctagtttgtttagatgtgaaaacttttacatttggctaccgtagtacttttgtttgtttgcgacaaatattatttaatcataaactaactagggtcgaaagattcgtctcacgatttacagacaaattgtgtatttagtttttatttttatctatatttaatgctacatgcatgtgccgcaagtgtcgcaagattggatatgacggagatcttatttttttttggtttttggccttgtttgtttcaatttttttttgaaaaatagaaatagtaccacttttgtttgtatttaataaatattgtcaaatcatggacaaattagaattaaaaaattcatctcgcaaattacaagtaatctgtgtaattagttatttttttatctatatttagtgtttaatgcatgtgccgcaagattcgatgtgatggagaatatgaaaaattttgcaaaatattttgggaacgccttgtttagttcacccaaaaacgaatcttgcggcacatgcaaaaaacattaaatatagacgaaaataaaaactaattacacagtttagctgtaaatcgcgagacgaattttttatcctagttagtacatgattggataatatttgtcacaaacaatcaaaattgctacagcaaaaaatccaaaaaattcaaaacttttcaagattcttagtcgggccttgtttagttgcgaaaagatttcggatttcggtactgtagcactttcgtttgtttgtgacaaatattatccaattatagactaactaggatcaaaatattcgtttcgcgatttccacttaaactatgtaattagtttttgttttcgtctatatttaatgcttcatgcatgtgccgcaagattcgatgtgacagggaatcttgaaaactttttgcttttttgggtgaactaaacaaggcctcacatcaaaagttgtggcacatgcctgaagcactaaatatagaagaaaacaaaactaattgcacagtttatatgtaatttatgagacaatttttttaaatttagttaatttataattagacaatatttaccataaacgttaaaatcttttcgcaactaacaattcagatcattttcacggacgaaacgagaatggttggcaaagtcaacctccaaaaatagcgccaacggctctgcctgtgcctgtgctgcgtggaagctctggaaccactgcaagcagcgagagcaaattgatggcgctcgtcgtgtcccttccgaccccagtcccgccgtcccgtcgcatccactgccgcgcctacgcctatctgacaccgcacgccgtcagcctgccgtgcgccgtcccccagccagcagcagcagcaccacctcctcccgccctgcctgccccggctgcttgcttgcctctgtttgacctgcctatcatcagctcgcccgccccgtccgtccccgccgccgcggattccattccattctccaccaccacctctccctgcgctcccttttattccatccaccaccaccacgtccccctcgcctcgccaccacaccacagcaccacaatgcctcctcccatcctcctctgcttcctcctgctcctgctcctcctgctcctgctccccgcccccgcctccgccacgccggagcgggacgcgtacgcgctgtccaagctcaagtcgtccctcgtcccgtccaccaactccacctccaacgcgctgtccgactgggaccccaccgcgaccccgccggcgcactgcgccttcacgggcgtcacctgcgacgccgccacctcgcgcgtcgtcgcgatcaacctcaccgccgtgccgctccacgggggagcgctcccgcccgaggtcgcgctgctcgacgcgctcgccagcctcaccgtcgccgcctgctccctccacggccgcgtcccgccggtgctctcgtccatgcccgcgctccgccacctcaacctctccaacaacaacctcagcgggtccttcccgtctccaccgccctccccctccacgccctacttcccggcgctcgagctcgtcgacgtctacaacaacaacctctccggcccgctcccgccgctcggcgcgtcgcaggcgcgcaccctgcgctacctccacctcggcgggaactacttcaacggctccatcccggacaccttcggcgacctcgccgcgctcgagtacctggggctcaacggcaacgcgctgtcgggccgtgtcccgccgtcgctctcccgcctctcccgcctccgggagatgtacgtcggctactacaaccagtacagcggcggggtgccacccgagttcggcgacctccagtcgctcgtccgcctcgacatgagcagctgcacgctcacggggcccatcccgccggagctcgcgcggctgtcccgcctcgacacgctcttcctctccatgaaccagctcacggggctgataccgccggagctcggcgggctcaccagcctccagtcgctcgacctctccatcaacgacctcagcggtgagatacccgacagcttcgccggcctcactaacctcacgctgctcaacctcttccggaaccacctccgcggcgagataccggagttcgtcggcgagttcccgttcctcgaggtgctgcaggtgtgggacaacaacctcaccggcagcctcccgcccgcgctcggcaggaacgggcggctcaagacgctggacgtcaccgggaaccacctcaccggcaccataccgccggacctctgcgctggacggaagcttcagatgctcgtgctcatggacaacgccttcttcggcagcattccggactcgctcggcgactgcaagacgctcacgcgcgtccgcctcggcaagaacatgctgaccggcccagtcccgcccgggctcttcgaccttcccctggcgaacatgctcgagctcaccgacaacatgctcaccggcgagctcccggacgtgatcgccggcgacaagatcggcatgctcatgctagggaacaatgggatcggaggccgcatccccgccgccatcggcaacctcgccgcgctgcagacgctgtccctggagtcgaacaacttctctggccccctgccgccggagatcggcaggctcaggaacctcaccaggttcaacgccagcggcaacgcgctcacgggcggcatcccgagggagctcatgggctgcggctccctgggcgccatcgacctcagccggaacggcctcaccggcgagataccggacaccgtgacgtcccttaagatcctttgcacgttcaacgtgtcgaggaacatgctctccggcgagctgccgccggcgatttccaacatgacgagcctgacgacgctggacgtgtcctacaaccagctgtggggccccgtgccgatgcagggccagttcttggtgttcaacgagagctcgttcgtcggcaacccggggctgtgcggcgcgcccttcgccggcggcagcgacccatgccccccatcattcggcggcgcgcgctcgccgttctcgctgcgtcagtgggacacgaagaagctactggtatggctggtggtcctcctcaccctcctcatcctggccatcctcggcgcgcggaaggcgcgcgaggcgtggcgtgaggcggcgcgtcggcgttcgggcgcctggaagatgacggcgttccagaagctggacttctcggcggacgacgtggtggagtgcctgaaagaggacaacatcatcggcaagggcggcgccgggatcgtgtaccacggcgtgacccgcagcggcgccgagctggcgatcaagcggctggtgggtcgaggctgcggcgaccacgaccgcgggttcacggcggaggtcaccacgctgggccgcatccggcaccgcaacatcgtgcgcctgctgggcttcgtctccaaccgggagaccaacctgctgctgtacgagtacatgcccaacggctccctcggcgagatgctccacggcggcaagggcggtcacctcgggtgggaggcgcgggcgcgcgtcgccgtggaggcggcgcgcggcctctgctacctgcaccacgactgcgcgccacggatcatccaccgtgacgtcaagtcaaacaacatcctgctcgactccggcttcgaggcgcacgtggctgacttcggcctcgccaagttcctcggcggcgccacgtccgagtgcatgtctgccatcgctggctcctatggctacatcgccccaggtaacaaaactcctcacttcaaaaccacgtgttgaaattccactagtactactatagttaaaacaagcatatggacaaattttgaaatgctagaggatcatgatttgaaatttgcagttttttgatcctctagcatttcaaagatcacatacagtagtacactggttgcacttgcagtcttgcacaatgtttgtactggcattgttttgccttgtgcctggcgtagcatagtcaactggagctggagccacgttaaaaggcaaaagctgcgtgcagtgaaaaccaactgccatgctatttttgctgtgttttttttagagattatctttgctgtatgatgttgcaatgcatggctgtactagttaatgtacgtagtgcactggagatggatagagacagtggctaatcaatgtggttagtgtctcgctctagctctgtgtccttggattgtgtagtactacagcatggatttggcatgtcctagaagcagatctgtgaaggtcaatggggggacaaaaagcctgccttgggatcacacaggattggggtttctggttgctcgtgctgttggtttgtttgtgtatccttgtgggccctttcatgcagctagcttgatccgacagggattaagagcttcccttccatgtccatgcttggagtgttgtcaaaaaaaaaaaaaaaaaattgtccatgcctgcagcagatctgcccacatgtttgacttgtcagggtttaaggttcactcttcatttcttcaatagtactaacaaaatctataataataataataataataatgttaatatttagtactgagtatcactgaattaatgatgaaatttatttttataacatatccatttaaacctgtaaatattaataatatttttctgtatgcatggagcaaggacttgtgatctgtaaactctaatcagcagcaatgacttcaactgatggccttgatccgtctcgcatgcagagtacgcctacaccctgcgcgtggacgagaagagcgacgtgtacagcttcggcgtggtgctgctggagctcatcactggtcgccgccccgtgggcagcttcggcgacggcgtggacatcgtgcactgggtgcgcaaggtgaccgcggagctcccggacgccgccggtgccgagcccgtcctggcggtggcggacaggcggctggcgccggagccggtgccgctgctggcggacctctacaaggtggccatggcgtgcgtggaggacgccagcacggcccggccgaccatgcgcgaggtcgtccacatgctctccacctccgccgccgcccagcccgacgtcctccacgccttctgaacctcctcgattaaccatatgatgatatgatccggggttattaacgcctgctatttattagcggctaattttggtttgtattgtatttactggtgccttttggcgtcgttaccgtgtgtgatgatggatggatggatggatgtgttatgtgtagttgtgtgtactactacgactaataaccagcaggtggctactcgtgatccctgcaaggtgaaagtagcgtacgtgtgtcttattgcgatgcgattggttattgcgtagctgaatgaatatgtgcatattactagtagtaaagttgaagctgaaataaaatgtgtccatgatcttacatacattatatgctctgctttgcaattccttgtcaccttcacccttcttttttcccctctccgtgtctctcgttttatttacaccacacgtgaagccatggaatgggatcggtaaaggcgtaggataggaatggagattggccttagttcacatgaaaactaaaaagtttt

SEQ ID NO: 3518 - DNA, 7569 bp, Sorghum bicolor
cctcctttgtaaatgtgctaacaccaccaagtgtccaccaccaaagtgcatgtgtgttagcttttcacaaatattttcaccaaaggagttaagttagcactccactagatcctaatgcatatgctcaagatatgaacctagtagcacttgattcgagagatgaccatgattttccctcttgatagtcggctatctatcctaaacccggtcaatcacttctctactcatcttagactggcaaaagtaaaaccctatgtttatacatttgccttgataactttgctcctcgtctatcaccatgatcttcacttcatgctttattcctttgtgatcatgtggccacctttccatgccaccatgcaccttcatcacatgttttgctatgcctaactcaaatcacttaaacacaagacattagcaacttggtgtcattaattaccaaaaccaaacttgggctttcagcacggctcctcgccgtgggcgtggctcccgatacgggtacacctccggcgtggccgcggctccccacaacggtgccctccacaacggttgcagggcaggcctccccgagcgtggactgcccgcggcgctcagcggcctcctggcgcacggcctgtggcaagagcagcgaagaggatgacatgtgggacctacctgtcattctctattgggatatgttttggatagctagatttaggtagtactgctgaagttggaaggaaaatataggtggtagagaaataggtgactacctaaatagacatttaggtagtctgatttaggtagtactactggagatgctcagcatctccaacagtttggcacattggttttgcatttttgttttttgccaaaattcacgaaatgatctctccaacagttttgcatattagttttgtatttttggggactttgcaattcgcaggggagagttgccatttatgcgagttcggttagacttggaaaacgctcgttcccgtgactcccccgcgctaacgattccttcttgcgtcaactcgatcccacgaaagccgtgcaggggatagcgcggctgcgtgaactctatcccgcggaagccctgcagtggatagtagcgccgccacgtcaactcgatttgtgctccatacgatcaaatgtaatcaataggtgtctcgggtgagccgtccaacaggatcctttcctcggtgatgcgaactcccctctgctttgcggtgaagtcagcatttaccagattgacaaaaacactggagcagcgattggtgttggattcgtgttctgtacctacgacttgacgatcggtgttgaaactgagcaatcggccgagagaacttgcagaccgagggcaccgcgcgacgtcggagaacctgcacaccgagggtggcggccgagaacctgcacaccgcgcgacgatagaaagcgcgcgacaaaaaccacgcgcgccgtcgacgtccgactaaaaaatctcacggcaaataatcacctgggtccacacttttaataaatgcaaagttatttttgtaaaactcttggagatgtctttttttcttctccccatttggtttttagatttggcaaactaccgtaaatagcaaataaaattttgccaaactattggagatgctcttacacccctgattgagtgtgatttttcatgctgtggttatagcgacatagactccctctgtacctatccaagtgtcaccataaatttgtgtcagttaaactttcttcaatttaactattttttataaaaatgttagcaacacttgtatttttgaataaagttggtctaaaagaatattcaataattagtttagtgatattaattatgtactataaatgctaatatttattatatatatatttagttaaagttattgacttctccggaaataaaaacgagataataaagggagtacagtatagacacagtgcttaactactccataccacttcaggtcaagtcagaaacaagtgttgtgccttgtgggtctagcgctgcgtggatcagaaccttaaccaaactgcacctttcaccctccttctctctcccgttcaccccgcgtgcacgctctcttcctcgtggcgacgaccgggcgaccgccgccgccgccgccgccgccgcccccaggtcttgatcgggccactcgccggcgacgagtagccaccaggtatgccgcctccttctcctcccttcctgctgttcgaaaccgagcacccaaaccctaacttaagctattgggctatttgtattcggatctgatctaattacaggtatatacatgtattatgcctactaactccgattttcgtggataagttatcgggtgtacatgtgtacagtcatgtcctttactcgttccgccctgggtcgagggctgtatggaattggaaatggaagtcaggagcagcgaatggcacatcttgtgcgatttgcgtgctctgctagtatgcgtgccgcgtttatgggcttactattcaaatgcaagttgctatgcattttctgctacatgagatcctggagatggtgtggcaaaaacaatttatcaatatgattcttcttctgcaggaaatgttgtgaggactgatgctataactaagctccctggatggacggatgtgattgcatcgagccactatggcctactgatgatcttctcgtcaagtatcagtacatctcagacttcttcatagctctcgcgtacttctcaatcccattggagctcatctattttgtgaagaagtcgtccttcttcccgtacagatgggtcttgatccagtttggtgcgtttatagttctctgtggggcgacccatctgataaacctgtggactttcaccacacatacaaagaccgttgcgatggtcatgaccatagcaaaggtttctacagcagttgtgtcctgtgcaactgctttgatgcttgttcatatcatccccgacttgttgagtgtgaaaactagggagttgttcctcaagaataaagctgaacagcttgatagagagatgggactgataaggacgcaggaggagaccggtaggcatgttaggatgcttacacatgaaatcagaagtactcttgataggcatacaattttgaagactactcttgttgagctaggaaggaccttgggtctggaagaatgtgcattgtggatgccatctcgaagtggttcaagccttcagctttctcatactctgcgccaccagattactgtcggatcatcagtgccaattaatcttcctgtcgtcaatcaagtgttcagtagcaaccgagcaattataataccccacacatctcctttggcgcggattcgacctcttgcagggcgatatgttccgccagaagtggctgcagtccgtgtacctcttctacacctttcaaacttccaaataaatgattggcctgagctttcagcgaaaagctttgcaatcatggttttgatgcttccatctgatagtgcaagaaaatggcatgtgcatgaattggagctggttgaggtcgttgctgatcaggttcgtgctctatctcttgctatggttactataacatactacctccatcctgaaaaggatattaatttacttctatctctattcaaactctctatattttgattacgtttatcagaaagattatcaatatgtattacatcagataggtgtattttgaaaatatattccacgacgaatctcggtactatgctagaattacattcttttccggatggagggagcatatgcttgtaggagaggaaaaacgtgtttacatctttcaaattcatatcatactgctcagtggtcatgatcaatcaattaaggcatccgttaattgaacaggaaattatattcacaggtgcaatgcaatgatggcaagaataccttcaaatcaatacataagttctttcttgaaagcatagcattctgaactcaactacccagctgcaaaagagacatgctcttgcttgtttatcagtatgtatacctttctgaaagttaaaagtttaaaatggtactttttttttgtttcttcatcaggtagcagttgcactatctcatgcagcgattcttgaagagtccatgagagcacgtgatttactaatggagcagaatgttgccttggatttagctcgaagagaggccgagatggctatccgtgctcgcaatgatttcctagctgttatgaatcacgaaatgagaacacccatgaatgcaataatagccctttcctccttgcttttggaaactgagcttactcctgagcagcgtctaatggtggaaacagtactgaaaagcagcaatctgttagcaacactcatcaatgatgtgctggatctttccaaacttgaggatggaagccttgaattggagattaaagcattcaatcttcatgctgttttcaaagaagtatgcaccatcagttttgtaatattctttctgttctaggttatagattactttaactttgccctaagtcaaacttctctaactttgaccaagtttttagaaaaatatgtcaacttctacaaattcaaataaatgcactaataagacatattttatggagaattaatcaaactagctgatgttattgttggtgtatttttctataagtttggtcaaagttagagaagtttgacataggtaaagaaagtgacctataattggtaacagatggagtatcaaacatcaagatacacaacactattaactaaaatttctatttggtattacaggtgatgagtttcattaaaccaattgcatctatcaagaggctatctgtatcggttatgttggcaccagatttgccgttatgtgctattggtgatgaaaagagactcatgcaaactattctgaacatatctggcaacgctgtaaagtttaccaaggagggacacatcacgcttgtagcttccattgtgaaggctgactctctgagagagttcagaaccccagaatttcatccaactgcaagtgatgaccatttctatttgaaagttcaggtaatattctagaaaggcttgtttgaataatctgtctgggacttttgccaatgagctcatggtctttccatagtatccataaaacgagatgatttctgtgcaaatagttgtatgcactgttctctctttaataataataataataataaatggaactgagccattcatttcgttgtctcaagtaactgtttcatgaaccctaattccagcctattaaaaatctcaactatttcattgtacattctgttgtcttgtctccttatgtgcaactgaatttatcatgcactctggttttggatccacaatgttatcctcacaatgaagtctttaatgcttattcagtagtaaaagacagattttctttttcttttttgaaaatcctcttgattaatatgtgcattttcttgtatgaattacctgttccttttaatcatgtgtcttggtcattaattgcatatgcatcgttaaacttggctacactcttaagttgcttgatagtccatttgtccataaactatgtgcatcatctctatgtaggtccatgtacaattgtccaattcttcctaccaagtttacaaaaataggctgtacctgttcagctgtagctgactaccagtagggtaccgataatactgtagctgttggtggttttttttctaaaaatatatatttttttgttcttataatctcatgatgtaagttgggcctgatgatatttggaatctgattacttctttgcaccattgcgacattagttgactgtattgcttggattgaattagtcaggactgacataggacctaaggctgcctaagcaaaagataaaatagtccaggattagaagtgctataccaaatcttccatgaattctagaccagctctgagccttctattatgctaaaacacaaagcttccatgtgttgaaaaaaatcctaggtcagccaaatcaaagtatcacaacatttactcaaactatatcacaaggcacagatgcttatgtaaattccattttagttgatactattggtcctgggtttcatgcttacaactggaaaaggttttatatttgcaattatgaacatgggatggacacatgaagcagagttttacttctatgcttagcagttattatctgttgtgttgctttacattctctgttacttcactcttttgcaggtaaaagatacaggctgtggaattagtcctcaggatctacctcatgtatttacaaagtttgctcatcctcaaagtggaggaaaccgagggttcaatggtagtggtcttggccttgccatctgcaaaaggtagttcgatcttacagctcctttcttgtagttccttctgaaaatggtgttcaggtgttgttattggtgactcggcttcttcatatgcagcacaattatttatttattttatattttatgcattgccagtacgggactcattagtgataacttggtcatcaattctcattagaactaatcagcatctctgcaaaattttgttgcaggtttgttagtctcatgggagggcacatctggatcgacagcgaaggaactggaagaggttgcaccgcaacattcgtcatcaagctcggcgtgtgtgacaacacaaacacctaccagcagcagttgatccctctagtctggccaagcagtgcagactctgatttgtctgctcctaaagtgcttcccgacgggagagggtctgctacttccctgaaatctcggtaccaaagaagcgtatgagcttagtgtaaatgatgattgacggcatagtgccaattaggggaccgattagtgccatcgtctaattttgtttgtaaccctgtcatagcaggcatataatgtacaaataatgtaaagcaaatggagactgcggctgtgtatctgggtggcaacgctgacttgctgcattgagtagtatatcctaccagcggattgaattgcttgttctggggtgtgccgcgcgcgcccgtgtgcgacccccgtagctctgtgcttgttctgttgtaacttgtaatcacatattcatcgtgtaatatgaaattcaatgcaaatacacggtaacaagctgctttcggcgcccttgctccgtcacttggttcatatcgtggatgccagttggatgagttttaaacgctaattgtcatgtatgcaaatacatttgaggtcttgtttagatgcacataatttatttgtgttagtggttaattttcatcatggtccactgcaatacgatacatgcccagggacatgagacattgaacctgttcaccggtctaaaaagttagtgaaactattattcgctgatttattataagagaaaaatattgctggcaacagattataagataaacgaacagagtcatattcaatgataaacaatatgacttataagacaaacgaacagagtcaattcaatgacaatcgacacaattttttgtttttaaaattgaaggggccaatactttttaagcatgatcaatataccttgcattttttgttttagcatgtggattggcactaccacgagcgtgccggctacgatcgctatttaataataat

SEQ ID NO: 3519 - DNA, 5471 bp, Sorghum bicolor
tgcaatggcaaggacgacggggcggattagatttctgttttgccatgctgtaatcgcctcgcgttggggcaatcaattctcgcgcgcaggcgcagaggcagctgcctacccctgcagatcctgctttgccatgctgtaatcgcctcgcctgcccggccggccggccctctgtcgccgcggccggtggcctcaggcacgcaggtcctcggccggcgtcgtcgtcggcagacggccggggcgagtggcaacaaacagcaaagctgagcctgaccactgaggtactagtagtagctaagctacctagctaccctagcgtggtactccctagtccctatatatcaagtatcaacagtagcgaccctgtcctcatctgatatataggaccgctttgtgtgcggccttgtttattcctaaaaaagttcacaaaattttttcagattcctcgtcacattgaatgtttagacacatgcatgaagtattaaatctatacgaaaataaaaactaattacacagtttagtgagaattgacaagacgaatcttttaaacctagttagttcatgattgaacaatatttgtcaaatataaacaaaaatactatattatcgattttccaaatttttttggaactaaacgtggccatagagagatagagctttgcttttgtacaaatcatgcacggccaacgcacacctgctggggtcttgtttagtccaaaaaagaaaaaaatttcagattctccgtcacattaaatcttttgacggatgcataaagtattaaatataaacaaaaataaaaactaattgtacagtttgatttgaatttacgagatgaaccttttgagtctagtcagtgcatgattggataatatttgtcaaatataaacgaaaatggtactatttctattttgcaaaaaaaaaaaatggaattaaacaaggactgagtaggatcattggaatgaagtaagatcgatgcatgcccgaactcgaccgtccatatgacgcttgatcggttgctccatactatgatggtgactgcatgcatagccacaagaaaatctacaacatatacagcgatgtgggcagttagtaaatcggtgcccgaaaatacatgcactacgtggcaccgtgtgtaaggtaactaataaccgtgcaccgaacgtgtcgaaatcgcggccacaccgggacaggaccagacggcatccatatcgatcatgcatcatcaggccggccgcggcgcggccggtgcccggtgctggtcgatcgatcggagaggcgggcgggccggggcagtacaacgtggcccactgtggctctggctctgtcgggctgcgccacgatcccccaccactcattccggccctgcccgcttttcagacaaacagtcgctagcggctactgctgctgccacagtccggcagagacgccagagagggtgatggtggacgacgctctcggctttgctgcctgtgcggccgcctcggctgtgcccggccctggtgcctggcctcgccctaccaccgatgcctttcccaatttgccccccgcggtcgcggtgtggcctgggcgcctggcctggccattcacccacacccacccgcaccccaccccaaggagaacgaacagcgatcagggcaggcaaggcagcctcgcggcgccgtttgtcgctgctgtctctctctctctctctctctcctcccgagagcgagcatgcatcatcattcaaatcggcgggccgggaggcaacaacagatccgatgctttctcgaatcgggcaggtccatcaatcaaatccgtcagggggacgagccccaacacgtcaaatccaacgcccgatcgatccgtcggctcgtcgtcgtccatcacatcgagataccacatcgatcgatccatcgatcccaggggggacctgctgggaccgaacccagccggccgaccgcccgccacgcccctatataaacccccccctcctccgtccccccctccccacactcccgtgcacacccatccatccactagcagcctgcccaagcggccaagcccttccctgcttcacgctccagccgcatcatccactccgtccccagtccactacaccacaagaacgcgtgcgtgcgccggctgttgccgttgctgtgagctgcacaagctaggagaagcaccggatcttttgcttcttttggcgccatgatgtcgtcggtgccggagacgttcaacctggaccagcagcacctcgtcgtgcagcagcagcagcctccgccggcggagcaggagcagatctgctacgtgcactgcagctactgcgacaccatcctcgcggtacgtacgtacgtacatacggcatactagggcataatacatatactacgtgcacttcagttacgtgccgcgtcgtcgcctgcctgatcacgttcctccgatccggcggccgtttcttccacaaagattattaggaattaaaactcatctctgtatactacacaggtgggcgtgccgtgcagcagcttgttccagacggtcaccgtgcggtgcggccactgctccaacctgctctacgtcaacctccgcgccctcctgctgccggcggccgccaaccagctaccacccttcggcggccaggctctcctctccccaacctccccgcacggtctacttgtaagtatacgtatatatactgcttattactggagtaccactctgtatttattactagtatttccagatgtttcctgctgccatgcctgcgttctatatatttcaccgtattactattgtgttgacgcatgccatgaactatgtatatatgcgtaggatgctgagaccatgtcgtcgttccaagcgccgaggagcctgcagccgagtactgatccgccgagcgcttgcgtgagcaccatcacaagcatcaacaacacctgcggtggtggcaacagcgcgtcggccatgtcgtcgatggcgccgccgccaccagccaaacctgcactgctggagccgcagcttcccaagagcgcagcgtcaggcaacaaaagtgagtgcctatagctcgttgtacttctctcatctccattatcgtcgtttcattcggtgttgcactagcaagctagccaagaggaaaactgcacggttctttgggagctcgatcctcttgatgagactttggaagtcttttatttttttttaaaaaaaaagacataccagttttccatcacaaacgattgctttttattagtggtcaaaagtaggacggtgaatagtttgcaggtcaggtcaatagtgccttctgtccgtgtatgatcccttttcagtacgttcacggtaggctcttccaaaatcccgacattaaaacacgcacagtgagaactaaattaaaagtgaaaataaatagagcgtttaaagccctgttctaaatagcgcgctatatgtgacgctatagcgctatttagcgtttctggaagagaactgctaagctaagaagattttaacgctaaatgattgttcccgctattagcagctaatagcgcgctaatttcgctaaattggattagtttagcgccgctatttggccttgggcttcatttccatcggcccaaatagcagagatatgtccctatgtgatgtatgttattattgatgtatcatgtatgaactatgaactttgatgtaatagactttgaaatatctatttctattggtattcataatgttttcatctttattatgtgtaaaatgacatgatgtttgacatattttttgttcaaccgctaaatggcttagctcgctattagcacgctatagctttttttagccttttagagatgctgccgctaagaggcttagcccgctatttaaaacattggtttaaagatgctggtgcgaagcataggagatccaacagtgatctccacgggaccaatgagaacaacacacgcacagaatcttggccaaggttgcccttgcatgtagtattgatttttttttttggagtgttagggacttgctagtacgttgttcatcagttgttgtaataactggattgctttggttgtgtttcccgcagcttcagagaagcggcagagagttccttccgcgtacaaccgtttcatcaagtgagttcatcgctgttgctttcacgcataacttttaacccttttaattagcatgcatgaggcatctactgacgaacttgctgctcatgtttatagagatgagatccagcgcatcaaggccagcaatccggacatcactcacagggaagctttcagcgcggctgccaagaatgtaaccctctctctctcatcaaatattgggcatacttcttactctcataaatcagaactgcacatatgtactgacttttattttccccctctctgtctacccttcgatcagtgggcccatttcccgcacatccatttcggtctcatgcccgaccagggcctgaagaagaaccctatgcaaaatcaggtaagatcctacgaagaataaaccctaatcgatcggaactctcagagccggcacagatgagcaacacttatttttcctgctgtgctttgtaggagggagctgaatgcatgcttttcaaggacggtctctacgcagcagcagctgccgctgcagcagcagccgccgccgccacagctgcgtccggcatgggcatttcaccattctgacttcaccgtaccccacaccgcggaatgatctatagtgttctacctttgtgcttaaccgcttagggttctgtttcgatcggtccctcgatcagtatcccggttgcttgagagatagcttaataataatgtctatctaatccggataatctcaagatgtctctctcagtaaccgtatatctatatgtgtcctctcgttctccttacttaggttgcagtttctaattttgttatttattattatgtaacctagagtggtttttatgtgtatgctgctgcctgttatcttatatggacatgattcgagctggatattcggctgagcatctacgatttcaactatttcctattttttgtcgcaaaattaatcattttttgtgaacaaaataaatatataattttggctacatgcatatatatgtgctttgaaaacttttaaactatatatttgcctatttctatccgtaatgttttcagtggaaaacatgaaaatcatataaagtatgatatatggaattttattagtccaacaactaaatacatttccagtaaaaatgtattgagatcttctcaatgcattgtcaagtctttttagctattcgagtaccattctatcttgatgttgagaaaatcggtgtctcgacataaaaactgaccttttgaaaattgtgacatcactttgaacttatacttttcgaggtgacctagctctggcatggagtatatttttttttgtgagagcatggagtatatcgtctttattacattaacatggggatcacataattgtaaagatataaaaggtggtgc

SEQ ID NO: 3520 - DNA, 6112 bp, Sorghum bicolor
actgacaatatgaaatcgacaaggggtctcttcggatcactatatgagcttgccattactcaccacatatgtatagtcttccacttggttcacttcctaatcttgttgcaagcttaacctactgttttggtgtgatgcacatcaagccaaacacgatgtaagggtagtcctaatcccaaaaccaggggcatagccaaggcctgcctaccgtgggccggtgcccggtctccaccgcaacctgcactttaggacaaaaaggcccagtacagataaagaggttagtgggaggtgcaccaccacaacttcacactatcacacatcacgagaaagttgtttcgcccagcctctagaattgctggctccgccactgcccaaaacaacatatctattccaatactagccatatctacaaagacactccatctataaaaccaccctttccttcactgcatcatattctttatgtgtgccttctctcccctaatactccgtccctcccagatccaattagctctctctccctccccctctctctcagatccaagcagctctcaatcaaaggggctaccaatagaaggatctcttggtgagggatggtgcgcggatgtcgtagaggtggcgggcgtggtcgatcacgaggtgggcggaccactcgctcggatgcgaccgacggcgaggcgggcggtgtggcaaggatgcaacgtgcaagcacacaaccctcaatggctatagagcaagctccacttgaatggaaacatgcgacacccgaatcgctgaaaccactcgtttcctacctttcgtgttcgcaaggcgaaatggtttctcaggcatgaaaaaacttacctttctcttatttttttcttatttagttagcaatatgtttgtatggtagcccatttaaagcttagttcttatggatctcaaaagatttaggaatcttacttttcgtagagttaaaatatccaaagtttgaccaataaaaaaataatgatattagtcatgaaatatatttttaatgtattaagcctatttataaaagtatgaatgttgatattatttttataaattttgtcattttttaggattatttgatttggggaaacaagatttttttttatgaaggtagcatctggttccgaatgtagtgtttggactaccaaaccgacgacgagtattgtattggacacggcgctgtatcacgaaatctagcctgcccacaaattgcccagattatgcggtccaacggctgcttttgacaaagggcctgtttagattgggaacgaaaatttttggggtgtcacatcggatgtgtcggaaggatgtcgggaggggtttttagaaactaataaaaaaacaaattacatagctcgtcaggaaactgcaagacaaatttattaagcataattaatctgtcattagcatatgtgggttactgtagcacttaaggctaatcatagagtaactaggcttaaaagattcgtctcgcgattcttaactaaactgtgtaattagtttatttttttatctacatttaatattccatacatgtgtccaaagattcgatgggatggatgaaaaaaatttgggtgggaaactaaacaggcccaaacaatattactgcaaggccagcatgacagtgctgccacccccagacataaatactctccgggcgtgcacacgcacataaattacgcggacaaggcaaccactgcatttgttttcgcccggtcattgttaaagaatcaatccccaatcctttcgcacaggtgctgcctcagggcgaaagttaccgagcttttctgttggcctggtatcagaagttaccgtatcagtacatggcaatggcatagtaaaaacttttactactcgatttaaaactttgccactccaatccaaggcgccgagagacacgtcgagcctagttctcctccctctttttaaagaagggaaccgaaagcagggcaagagacgggcagcggcctgacctgcgcaaaacccccgctctcatcagtcatctctccccaaccaaaaccccaacaagccgcaagggaacggaaccttttcgccagcggcctgttcgaaagcaactgcaggggagaagaagctgcgcaggagaagaggaggaaggcggcggcggtgtgtaggctgcgcagagagaggcagcgagggatcgtaagcttttggcagtggtggtcttggaatgcagcagcaacacctgatgcagatgaaccagaacatgattgggggctacacctctcctgccgctgtgaccaccgatctcatccagcaggtcctgatcctaacccaaatccccccatccctccccgcccccgcgatatcctcgtgtctttgaatcttttcttctttgtttgtgccgtgatcttgccttcgcaatcgattttggatttgctcgtttctgcaatcgtctggtcgtcaggctatcagatatgagtcaaagttctctcctttttcgttcttttcccctccctgaattttttcccaatctcttgctttcttgatttttctctgcactaatatcttcacttttgcttgcattttttttcatctgtaaatgactaaatgcaaatattctttttggcgaccggaaaaatactcccatatctttttatcaatcttgcatgatattcgaaatagttgtactagttcacacttcctgatacttagggctttcagtttatccctcctcttctgttcttcgtgttgatttctttttcctcttttttttttcatctttcgattaatcccatgtccttgtgccattttatattgacgtgttttcagatggtccctcgtttctgatttcctctgcagttcaaactgccgcagtctattcctttgctgttgtcgcccacatgatttgaatacctccattatctccacatctaaaccccaaccctttgtagctcggtttggttggtgaccctttgtagctcggtttatagtgacctgctgtttttcgcaagcagtaacgatgccaggcctgcaccctgcacctgtctcctgcctagtagcgatctttaaagcctggccaggcggcatcatggtggatatttccatcgaaggaaatatataaaagctgtgagatttgcaccgacatcaaatgtttgggatattccatcaatcaatggaaacatataaaaggactattagtatcaaatatattattacatgcttgttttttctctatgaaagtaattttgcagacactgagtggtcacaagctctcacacggcccttattggccgtgctgtggcaaagcatgatctggaccatattctgaaattcatgtgggtaggagcgaatgtaggttcgcgtgcgctgtactgccggccgcccattggagtttgactgttactccgtagacccaaaaagctccgcttcacagccaaacgccgaaatgctaacaggcaggggcccggactggggactgcatgaccttgcctgacgccttatgtttgcatgctcccgtgtcagtcaatgattgatctttagattgggagtggcgtactactacgtttgagtaggaaaccagcggtatcaatcattgaaacgccacggcagttcattgggggatgaactgccgtgttggtcagtcgttgagcaaatgcaccgcctgacgcccattgttcactggtctgcaaagtatttgagacttttgatttcttcgttagctgaatagcagtacatggatgagatcgtaaatgctccgtctgtggtcagtgatgatggatacagtacatccgtctactggattgtattgacatgctaagggggtgtttagttcaccttgtattccaattttttttgagtttagtttgtcattttacaaaatcgaactaaacaccatgcaaaagttttagcaaaaatgtggttcttctccattttgtattttggccacaagaggcaaaaagaaaaaaaaaacaaaagagccccataaggcggcaataaattctgcattttggatgtaactatgtatttcatcattccaagtagttgacattttactttttttttaactaaacatcccctaatacgttttcgaccctgaactgtgcagtacctggatgagaacaagcagctgatcctggccatcctcgacaaccagaacaatggaaaggtggaggagtgcgaacggtgaattcctgacttccatgttaatctcccggcatgattgttatttgttatggatgtagtagcagctagactctagcagctgtaacttgtgttaacatggacaagaatgccccttcgttcagtctagcatcaaacaagcctaatttgtcgactgttaaaacatgtttcttgctaaaatgcttctttggcgatgaatgattccatatctgcacactccaatactggttagtctgctgtagctcgtacattgattaatatatttgccaagtgcacgtgataaagcaagttactagttctgtagcaccaaccatgtactgttttgttcagtctactgtttttatggcctgtaatggcatcatgtcaatgtcatatatcacaccttctatagtttttccataactgaggcaacttctgatgtttctttctcaatcatcgttccaagtaatagcaagcatgttcatctgttcactgtttacttgcggcaaccggtaaaagagacttctttagtttatatgtgtcaacaatccatgattatgtagtgcgatggactatagatatcctcgtccgctgagtgttcccgtgtttgccacctgatgctgtcttgcaggcaccaagctaagctccagcacaacctcatgtacctggcggccatcgctgacagccagccaccacagactgcaccactatcacaggtactgctaatgctgctcgtcggcttggccctttctactataatacccaatcattttcattagcgaatcaaggattgcgtcgctcatctcacttggcatgtctgcagtacccgtccaacctgatgatgcagccaggccctcggtacatgccaccgcagtccgggcagatgatgagcccgcagtcgctaatggcggcgcggtcctccatgatgtacgcgcacccgtccatgtcgccactccagcagcagcaggcagcgcacggccagctgggcatggcttcagggggcggcggtggcacgaccagtgggttcagcatcctccacggcgaggccagcatgggcggtgctgctggcgcaggcaccggcaacagcatgatgaacgccggcatgttctcaggctttggccgcagcggcagtggcgccaaggagggatcgacctcgctgtctgttgacgtccgtggtggcaccagctccggcgcgcagagcggggacggcgagtacctgaaagcaggcaccgaggaagaaggcagttaagacgatgtcactagcactggcatcggctcgggaacggtatggcatagcagcaggattagcaggtagctttgaggaacgaggagggggtagtagcgtagtaatggtagcattagctagcagtatgtagtcggtaaggtagggttgttccatagaacctggaggtggtagtgaccagcatgcatgcatgatggtcacttgttttggatgtacgttgcaggttctcccccaagatgtagtatggaacgttgctgttgacctctttgcgcaaacactatgcagtgttgatcttgaccaaaaaaaaacttttcgcctactgccttttgatcttgtgattgttgtcgtaacatttagttttgaagaagctggacacattatgtggatgcaaggagtgtctgatcatggcgacttggatgtgtttggtttgatggatattcatggatggagataacaattcatattttgaaattatgagagaatattatctctatatggtggatgaggctacaagaaaatacctgatgtgcttatctatttttctaatctttgttattattaataaattaaggattattagtatgctctaatttttgtcattatattaataaaaaaggatcattagtatgttatattaatatacttaattatgatgggcttctatgttaactagcgcatgatttgtgtgccaattaacatattttattttagttagtatttttcttgaaaaaaatagcg

SEQ ID NO: 3521 - DNA, 5150 bp, Sorghum bicolor
gggaattgactcgagagtgtaaaaagtttctagatgtcggtatgcttttccacgctgccgtttgaagggcttaaattgggctcagtaagaaacgcacacgtagacgatcgagcgcaagcaaaagcaccaccgagcagctgccttaattaatgaatgcgagctggcgtgcgagcgtcgtcggccgccgttggatcgcccaggtctcgcatccgcgcgctggagcgagcgagcgagctggcgtcgtgctcgtcgtgctagcccgtgccgcgtccggccggtggttcggcgtttcacaccttgggttggtggctcaaactggactgccggagtggcagtggcttactggcacgttagctggaccctgacctgaattccatgtctcggaagtcagaacacagattctggaattcagcaagcgtcaggaacaggcaccatgaactggtggttcaggtccaatggcctagtcagcgattctcgatcgatctcagtgaatccacaaggttggttggtgcggttaagccgatggtctgggcggccaaacacagtatttgaccaatttgcagggaacgttgcttgacagttgatacgacactacttttgtacaacacaaagtccaccaaccgccgtgaaatttgttcgttcgatcggacctgactacatgagaggtggcgagcaaataaagcagactactttgatttgaactatagagtcgtgtatatacactcgtgcagattagaacaccacgacagcacatcaaagacccggaaatgaatcacaggtcagcctattcgcttgagcttgtttgccggatctgccaactattcaatattttcatatccagtcattacttattaaccaagtgaacatgaaccggtttcagtcataccaaccccggccatatgtacgtagtacatgctagctatcctgtacggcacatgtatcaacgagagcagcctgaacgagctgcgcatttggaaaatcggacgtcacgcagcgagacagacagacgcgaaaagccaggagcatctctggagttcagtaattcaagcaagccgtcgagcgcgcatctagttgtttatttagtttagtttagtttagtttagcgtggctttcagttctgaacccgagtgaagtgaagctgcgcggaaccggctcatcgctggatgccacgatcaggcgcggcggcgcgccgtgcgaacgagatccgtcgggcggcgagcacaaagccacgtaggctgcgggaaagcgcggccggtcaaccagcggctgctcgacttcgagcttttcctcacgtcacccggcgacttcatacttctgaagttctgagcgatgacgctcgctcgtgtcaggtactcaggtggtcatggaaccgtcaaaacaagccctaacccttttttttcacgagagaggcaacttgggccgaatgtgcaaacccaacggtagcccttccaagcctactagccaacacgtgaaatctagccatgaacctcgcacaagggctgacatgaatgaaatcgtcgaaacaaggcctaaagccgaaactggacgtcggcctagcatggcaaacaccaggagagacagtgtgggccggacctgcaagcccaacgtagactgggctaccgccacgtgccactgccaccgtggcacgacctaccggcttcgcttctgcttcgtttcgtccgcacgccgtctccgtcttccccatctcgcgctgcgctactgccgcggctgtcccgagtcccgaccaccgtcctccgctccccgcccttcctcttctcctcccgcgatggtaggtggccccgtctcccgccctcgtcgtcctcccccgttccttctcgctctaccgcgcacgggcggcggcgctgccggtatcttgatctgccccgatccatcgctccgagatccagccttttgtggcgggccacgtcgttgtcctctcgcccgtggctcaagatccggctgtccttctctctctctctctctctctctctctctctgttgcaagcgctatgggatctgcgaatggtggtggcctcgattttgtttaaagggttgaaggaattccaagggttgaacctttgtttgatgcaggagacctgcccctcggtgaagaacatcctcttgctggactccgaggggaagcgcgtcgccgtgaagtactacagcgatgactggcctactctctccgcgaagctggccttcgagaagtcggtctttgccaaaacccagaaagcgaatgctggaacggaaggtaattttacatctggtttctcttatacggaaggagttgttttccaccgatggtgagcctcggtgagcgttgttgtgctcgcttgaggcaatccagagtatttgattagcattatcatctcatagtgaataatgaactcatgagtgtgatactgtgatgtattgttataatccattctatatttgctgatgctgggcaagaatgcttccatggaatatgactttttttgtataggggtagaaccacttcttcgatgttaaattacagtattacaccattcttgctttgactctcttgctgtgcagcatgttaatttacggtccctatgccattttattcattgttcactgacatggcttatattcaaatttacaaatcatatgctcctttactcctccattccaaattgtaagacgttttagcttttttagacatagcttttgctatgtgcttagatatacactatgtttaaatacatggtataaaagcaatgtatctagaataaccaaaacgtcttacaatttggaacggagggagtatatattttccgtgtcctcccttgtatcctcttttaacctcagtcatgacactgtttgtactagctcccactcacaccacaaatctgtaaatgagccagggctaaatttacatctgactgaccttaattgtccttatacattgaattattttttattttcttcaacttcaggtatttcatatatttatttgtttctctttaacagctgagattgtaatgtttgatggtcaaattgtggtatacaagttcatccaagacctgcatttctttgttactggaggagaagaggagaatgagcttattttagcatcagttcttcagggattctctgatgctgtcgaacgacttctcaagttacttcccctctattaaagtttatcttttcaactgctgtttgttctgttacatgttattgtgttagtgctgattgtatatgaatgtgtttccaatcttggtggtttcagaaacatggttgacaaaaggacagcacttgagaatttggacctgatcctgttgtgtcttgatgaaattgttgatggagggtaaagccttgtcttactacatacacttcttttcttgttccccctaattgtgtacatttattatcctttctttgccatgaaatcagctgactgccttctgctgcatgtttgatttttgtagtttggccatggcaatagagttcacttagggcctctattgtgtaatggttgtattcactggattcaaaggtttaggccttgtttacttccacccaaaatccaaaaacttttcaagattccccgtcacatcgaatctttagacacatacatgaagtattaaatataaacaaaaataaaaactaattgcacagtttggttgaaatttacgagacgaatcttttgagcctagttagtccatgattggacaataattaccacaaacaaacgaaagtgctacagtgtcacgaaaaaatttcgggaaggaactaaacaaggccttactccggtgttctgcttccgtaccccaagcccaagcatgccttagctttgaatggggtttcacaatttgatatgtgaaacaatggcttagtctgctaaagacattaacaaaataaacatcctattacattgatattttcgaaatggaacaacactgattatctacatgaggaattgtatatgtttgattttaagttttgagatcttgaatgactgcagctaccaaaaccttgcactcacctcagtgtgacttagataaccccattgatttctgaactctgaaatgtgagagtgataggatgattctttgtcaagcttagagatatgaatagcatcaaacattgtaagcagcatgtaattatttgctgcattatacctaattttcttgaatgattacacaggattgtacttgaaacagaaggaagagagatagctgaaaaggtgtctggtcatggattggagggtgcttcatcagctgagcaggtaggctataggctgcatctacttcaattttgaactgaagaaattggtttcttttaacttactagctatcattatttgtgtgcagactctagtgaatgccctaacgcaagcaagagaacatttcgcgaagtctcttctcatgtgatgctgtgctttatactttggggtgacgatggagtatcaattattgtgtctggacaacatattctttttgttagcaacggagaaagaaaaatgtctgaaatctatgaatgtgtagaatggcatggtgttcctgaaattctcatgttcatttgtaagctttcaaagttgtgtagcatgaatattctaattttgactggctcagttattggtcgttttgtttaacctgttcctgttggaaacggtaaaaataacatgcttgtggagataacatggcatggcctatcttaacgaattagggctacactttcttcaagatggtagtaatgtctcgccgaaaccaaaacattattataatctgccaaaactcaacttacaattctgtatccatgttctatattaatgggtgcaaaaagcacaagggaaccaggaagctgacggtgagtgtttactcgctggcggtgacatgctgagacaggtcgtctctctgcttgactgcattgtcatctgctacattactgaactgctgcttgtagccatggtcatggttgcctgaaaacagcttgtctttgctcggagtcccgtccatgtcgatgatgatgttggttatcaagcagcagacgaagatgatccttggcagccggtgtttgtcaggcctccacagctctccctggatgacacgccacctccccttgagtgttgccaatgctgtctgcaccaccgccgttgccgctgtgtgccgcttgttgaattccac

SEQ ID NO: 3522 - DNA, 4990 bp, Sorghum bicolor
atcagatttgatatgattaaaaatgatattgtatagagacaaaatcaacattaaagttgtaatacccgacgaggtctacaactttttacctaacaactgcgcctgatattcggatgactcaagcgcaggggagaccgtgtgggccaattgggccagaggctatgtggctattgtgggcctgcggcccacggatggatagtttgagctgatgacctgttgcgctcacaagctggttcgttactgtaacgagttgaaatactggcttagctcgagctgactgcctgactcaagtcactaacgaagcgagttctacgaactagtacctcccccgtcccaaaataaatacacaatacatgtcttgcatcttaagaagtcaaacattctcaaatctaattagattttttagaaataatattaacatttatatctttaaatataatatatgtttactataaaattgtgattgatctagcgttgtttgtttacaattaagcattaatatttttatttatatatttagtcaaacttacaatttattggatcctcaaaaggcgaaatgtaaacttatttgtgacgataagaatggttttttttggttcaatgcgagagggacgaaacaagtggaatttgaatgattttgttttgcacttaaggcgggtacagtaaagccacgttagtggtcgtaacgccaagatagcttagcatattccgacgtgagagagagtacagagcaaagagaataagtttgtcattgcaggctacgccgatcgcttgcactgttcgtagctgtgggtcccgttagtgagagaaaaacaagatagagaaaacaaactgttgggccctatataaatttaaagctatggccatgtttatatccgaaatttttttggattttgacactgtagtactttcgtttttatttgacaaacattgtccaatcatggagtaactaggcttaaaagattcgtctcgtgatttacagacaaactgtgcaattagtttttgttttcatatatatttaatgctccatgcatgtgccgcaagatttgatttaacgaagaatcttgaaaagtttttgtttttggggtgaactactaaacaaggcctatatgtggaattggaggagagcctagattgttgtaggacttgtctcatacgctagtctcttgatgactcaacttatgtcttgtttattttgtaaaaaattttagattcaactgtagcacttttatttctatttaacaattattatccaactatatgggctaactgggcttaaaagatttgtctcgtaaattacagacaaattatgcacttagttatcttttttacttatatttaatacttcatgcatgcattcaaagatttgatgtgatagagaatcttgaaaattttggggaactaaacaatgtctagcccctgcttataggctatagccaagcttaaacctgctcttatcgtgcatatgaggcgtgcgtgtactctttctatacccagattaatagacgtttagaacagaattgtggtaatcaaaaagtgattaattaggaggtagtttttctactttgcgttcgcgtggtactaggacagatgcgttccgtagctcagttaattggcttctcgtgggccgaggcagctggtcgcgagttggagttctggccgcgcgctcgcgtccacacctcccgctgcacgtgcacaacgtctatctttgtgaaaatggctggcctaaaacaattattaatctgggtatgaaaggagtatgtgtggagtctgtcttcaccgaaattcaccaccgcaggaaatccggattctgctggtaagacgagatggcgactgcgatccgatcacagccacgatcaggcgcagtgctccaaacagcgagcaccagccatcccaaaaccatcaggattctgccacctggggcatctccgagccaacagtagctctccccgccgccacgagaagaacgtgctcaaaaacataaaactaaagcaggaaaatggagaaagaatccaactcgccattgctgaaccggaataaaagataagcccagcgcctcttcatttacgcacgcccagacgacgaccaaaggaaggggaaagaggaggagagcgacaacagcacctcgagcaaattgaagcaggttttgtgttgattcggagtggagatttgaggcctgcggcgacgatggcacctgcgaaatccggggagaaggcgaccagcttcgccatggcctgcagcctgctcagccgctacgtcaggcagaacggcgccgccgccggcgatctcggcctcgccatcagaggtgaactctcttctcttgttgattgaggaaaagttcaggagtctcagtaggtgttctttatctgttgggagtttagcagtgtctgttggggagaagtggtgaattgggatgtgattcgggctaaaagttgctatttcgaggtgctctcgtagtcgtctcgtgtcagatctggtcccaaagtcttgatctggaagccaaaatgtcacttttgtttgatttggatcaagaatttcggcctctgtcagttctagcatccgaatctgatagcttcctgttcatctctggacggcctgtctgaaaattatgtgctaagcgtttactgaagaagagtgctctattccgatttcagctgaagccgatggaaagagggcgtcggcagacacggaaaagggggacacgacgaaggagaccatggatctattccctcagaacgctgggttcggctcggaggctgccatgaaggaagcccctgatgtgaggtacttgacgaaacagatacctctctgttccattaggtttcgagccattcttgttcatatacatgttagtatgatactattgctgtagtcagtcatcgactgaaaacgtaaacaatctaactgttgtgagaagcagctcttggtggccaggttttttttcccaacgagctgtatttcagatatggctcttatcctttgtatgatatagatggttcgatcatcacacatcgcacagatctttgtctgcagaaaattgtgagaagttaatttatgatctgaaactgaatattttaagaatattgttcataaggcttctcagatttcaagccaggctctaccaaaaaatatatggtcgtgtggcagagcacagtttctgtgatctgtgctaaaactttcttgctatgaagtagtggttgaatggtaggaaatccatccaaaaatatgtagaacctggcactgcaaaactaatcaatgaaaaattggtgccacccaagttctgaaacttaattttttttaattgatagaagttgttcttgtgtagtataagttgggtaccaaacctgacaactggaaacatcctgattctcagggagccagagaagcgccagctgactatcttctatggcgggaaggtccttgtgttcaatgacttccctgctgagaaagcaaaagacctgatgcaaatggccagcaagggttcgtctgtagctcagaaccctggcatgctgccttcccccacagttgcaacagttactgacagcaccaagatcacagcagtgccagccgcaccaattgctgtggtcaatgcccaaaagagtccagcaggtaactaacttgtgcaccccttattcatgtgcgcggtgtttctcttgatgattaatttctgtcttgatcactgttcccaaaatgtatgtgttgcagatataccccaggctcccaaggcatctcttcgccggttccttgagaagagaaaggatcggtaggttactcttgctgttgggatgacacaattgttttcaaatgatacaacttgttgaggaggatctaatctgtggtattctctatttcagccttaccgcgaaagcaccataccaaggttccccttcagatgctacacctgtgaagaaggagatggcggagggtcagccatggcttgggctgggacctcagatcgccaatcctgatctgagcttgtgcaaggaggggagccaatgatcgacaatccagcatcaccatcttcaaaactgcgatactcctgtaccagagtaaaggatcatagagagactcaacagtcatgtgtcaaagtgttctgttttgggcctattgttccgtgtgtttttcgcgtggatacgtaggttgtacgaatgtaaaggacgtagctaaagatggacttgactaaggattaccggtgctggggcaggtttgctggctgatcagcgtgtggtggcctgacccaaatggccatgttagaaagatgaaactgtaatgtagttgctagaacaagttcatattttgggatgttctgtgttgtttggctttggcactggtgtgtgtcacaaagctatttattgtaacagatacatcccgtatgattgttttatttttattttcatgttatactcttaatcttctggttgtctctgtaagtctgtacggtcaatgtccctggactataaaaatgctgatctccaaagttataatttacttgtattattaaacatgcttgggatcttacgcttccgccgagtatgccgccactgttctggtagtgagcagctggctgtataatagtagtggctcactgacccgtgtggggcggtgtggctcgtagtcatgggcaaaagaagctgagcgcggaagttccggtactccactgtccgcagaagttccggtactccactgtccactgtccggtgctatggcgtggtcgctcaccgtcagtcgtcaacgacgtcgtgcacgacctggccgggggtgctagctcgacgcttccagtcatacgccactatcaaaatcgtggattttttctagtgttttaacactaaacactagtcatagcatatagaaatcttaccagaagacatttatcagaaaaaatatatactaaattttgaatgttaaaataggagaagcccacctcactccaactgcaggcaaccgtagcgtgcagttgcctatgaatgtatagattttatttttgccgtgc

SEQ ID NO: 3523 - DNA, 8187 bp, Sorghum bicolor
  misc_feature (6553)..(6950): n is a, c, g, or t
caaagaaaagtatcctcaccctcaccaatagtgacagcttgcttgatcttttactaaaaaacaacaggattggtagtaaattctatgacagttcggataataattaataaaagagagaagaagaagaaaaaaagggctgttgatgcatggcagtcgccgcgacaggttaggatcacctactggttacgtgcacacgatcaggtgggcagttgagctggaccccgtccatggacgtatgctcgggaaaagacttgcagtagagcctccgttatccataaacacagagactcgatcatggtgtcaagctgcgcgtctccgtgggccgtgaccgaccgaccgaccgaccggctgtggtcaagccgaccaaaattaatttaactctagtttagagccgggcagagcagcaggtcgcgtccgccgtccgccgcgacgacgacggcgacgacgacggcgacgcggattgatacgtactcctaccggacaaaccgtcggttaatcagggatccgccacataaacacgcgcaccggtgtcttttaggtccctagtccagcccatctccgcgtggggccccgccgccgctttcaccacctggatggcaatgggccatgggccatggctggatgggtcgcggccgcccctgcaccgggcacgtcgcatgcatgtgtgccttgccgacgacggcgtcagggtcaggtacgtgcgacgaacgagaaattaaacggaacaaatcagccgcgcgtccggaaactttgctgccggcgaccgcgggctacggcacgtgcccacacacacacggccacctgtacgttggaattcggaaacaggcggacaatgaatgaaaccgggtgcacttgtcgtcggaagcaaccgcctaatgccgttacatgctacggaatagtcggcctggtttagttttaaattttttgcaaaataaatactataaaaattttagttatatttgataaatattgtctaatcatagactaattaaactcaaaaaatttgtctcgtaaattatatgcaaactgtatagttagttattgtttttatctatatttaatatttcatacacgtgtcacaagatttgatgtgatggaaaatatgaaaaatttgcggagcgcggcgggcacgggcagcagcagcgcaggtggggagggggagcggcgccgaatgggattagggttaggttaggacgtctcctcccggcctcctctcagcttatatactggcccgggccgctaacgggccggccgttgttagcgggccgggccgtgccgaggcatcgccctaggcacggcctgctacgtgccacaggccggcacacgtcgtaccgggccgtgccacggaccgtgtctcggacccacgggctgcatgcacatctttacccccatcccaaaaaaaacatataaattttggttcctgaggtgtcaaagattcttaactttgactaaatacaaataaaaacatattgatatttatgacgtataacgagtatagctagattaattattaaatatggttttataataaatctgttagagatttaaatattaaaaatatgattcataaatttgattagatttgaagattctttgactttttagaaatcgagatttacatattttttttgaccgagagtagtatcaaacaaccactgctgagcttgctctcgtatattattacgcgaatggtttgggcttgtagttggccggcggcgtggacgcgcggcacgggaactgactgccgccgaggcgggtgtcgtgtcgtgtcggcgggacgtgggagtcggagagggcagcgcagagggagggcgcccccacgtgagaacgggagcgcgcgcggccgggtgtctcagcggtgacggtgcccggcccgggtgatggtggcacactgaccacggcaacccgaagcgacttgccagcgacagccacgtcggccggcccgggccccacacgtcagaccgggcggcgcctatatattggcacagagcggccctcctctgcaacgctgataagaggagctctttctattctgcatctactactcctcacctcatagatcgattgccgtgggcaccggcagctccgacctcgcctcgcccccctttggccgatcgatactagtatagtatggcgcacgacctgtgcgacgacttggagctcgtcgccgactgcggctacgacgacgacgactacttggacgacttccatttccatgacgacgacggcttcccctcctcccctgccaccaccaccgctgctgcgtccggctccggcctgcaggtatatactatcgcctcactgcctcacctctgtttcgttacggttcgatgtcaagtttaccttttccaaaaactagtttcgtttgaatttaagttccaaccaacttctgtggcatgatatatagtggacaccgtagcctatgttattagagaaaatatattatgtttctttgcaatcattattttgataggttaaggcacctaataaaaattaaccctacatataaaacagtgatgaaaaatcataaatcttttttttttctgacacaagatatgctatccgctatcacatctcaaaatcaagaagttagattcaatattttatgaggagaaacaaaacaaaaaaaagaatcaaataggagtttattaaagtgtacataggacaaactaaaacgggggaggaggttaaattaaacaggaattcagtttagggggggttatctagacaaaccaatgggttggtggaaatttgttccttatctatactagcaggtgccccgagcagtaaatgagtttctttaacccgttatgttcgaaacccgtaaatatttagtaacgggtgtaactgtttctagatggggtttattattttttatcgggtagtactattccttaacgggttgtactgttctttaatggatttgtactgttttgttaacgttttcactgttccttaacggacttttactgttctttaacgggtttactgttaccataacagtgttttgtgagagggaactgttcataaacagtgatctgtgaggaggcgctatctccagctataggagtatagtatggccttgtttacttccaaatttttttacaaaatatgaatagtagcactttcgtttgtatttgacaaatattgtctaattatggactaactaggatcaaaagattcatcttgtcaattccgaccaaactgtgcaattagtttttattttcatctatatttaatactctatgcatacatataaagattcgatgtgacggggaatctggaaaattttgcaaaacttttagagaactaaacaaggccaaggaagttcagtccttcctcgtgaaaaaatggaagtttagttattgactcagggtaatgagaattagatacttggatttgtcctcatatatcaggtctattggattgagtgactacaaaaaatagatgggtcaaggtattacttgttacatacacaatagtactatactatataaggtggacaagtcagtggttataaggtggacaacaggacaagtcagtggtaaacagtaacacacaagactcactgactgataaggttttgtcatccagacaatttaactgaaaattaacgttccacctacgtgaatattctaaaattacccattcagtctcatctgatagaattttactcgatctttctaattcaagccaatatgtagttgtggtccattatctgggtgtgtttctcaacgaatgaagataagaagccaggaacgacataagtcttgtttattttcaacgtatggggtatgatataaaaatcagtatcttaacaagtatattttcagttttggactataaacaagtttttttttctacgtacagcagcatgagcagatggataatacttcagctttggactataaagaagggaaagacatgcaaggaataccctgggaaagactgaactacactagggagcagtatcgtcagatgaggttgaaagaatacaagagctatcagaacctcacgagatcacgcagcgggctacagcaggttatatcccttgtcacatcttccatgctcgctattggaattcttgttaaatacaatttactttgtgttttatgtaatgtctgatatgtttgtttctttatggaaggaatgcaaacaagtggagaggaaggatactttctatgatttccatttgaacacgagagctgtcaaatcaacaatagttcattttcaggtacaattttactctatttttccattcacacagtcagcatgcttaccaagctgccattagcataaagatataatttgggcgaggatgtgaaggtgcatgccatttgattaacacactcaaatttaccatcttttcatcccatatagcactgacacaaatactgtcatgacagtagtcattccgttggccatggctcatgggtttagtgggctcttacacctctcattaacttggaagttgccatgtcaagatgcattccgctgtttatgggctgggtgggttgttacacaattcatttacttaagagttgccatgtcaagatgcataactccgtgttgattttgtgttgcttcacagttgattagttcagtttgcctcatgaagcacagtgcaatttagctcttgtgtgttctctgtatctgaattcaaaggtcgcacagggttaaaagttagaacatgttgtgccattgtgtgcctctgtacattccatgttcaacaagttcaaagacctatacctagtgattaaaaaaaacacctcctagaatattatatctaacttgtccatgggaccatggatttttatttttactactgtgcataccaactcatacgaatcattaagcatatttcatatgcattgaatgatgttgctattgttctgcttctatatatggacataacactgattgcaggtcatgtgaggagttgggttgcactatgcaattagtcttgtgatactaggacatctgcagtatcctgttttatgaggtccataagcaggtggatgagcatcctcgagcagccgggagaagtgtgactacaggggttggaaacttgcaatatggtatgataggacgttttaagatgggcgaatctgttaaatggatcaccttgagtttccttttttgcaggttgtacggggagagagttcacaatttttttgctgcatgctcatttgtgtctgatatgcttttcatgttaatggaaattatgctcaaactaatgctttttgttaaagattatgggatttatattgtcgaattccttcgttggggtgatattgtgtggctaaccgttctgaatgctgaatggcaatgttaacacttggaccttcacaacagagagttaatatttctagattgtagaaactgtacttcatgttaaaaaagaaaaaaaaaatgaacttcgaacactgaaagttcagtttgagcctatgtatggtccatgattacagtgctaggtagtagctaccagcctaccaagactaacatcactgtaagacttaactgtgaaacttgtcacaagggggtgatggttgaaattgttttatgtgcatctggatgtttcttttttccggtttgtctgtgtactagctccgtcagtgctgtgaattataagttgtactagtacattagtggaatcacgcgcaggatcacacaagttcagtcttattttcttgactctgtgcaagctcactcggcagttgttaagaccccaccagcgtcatcagcatttgctgttgaataattgaatggatggggaagattcacaatattacatgttcttgtgaccactgtgaaaaacaagtgctattgcatcatcgcatcccgtagctctcttaatttgtatccttttgcattctctgaagcatgtatttcaagtgttgcaataaccgtgttccgaacatctgcagctgaggaacctcctgtggcctacttcgaagcacgacgtgtacctggtgcagaactactccgtgatgcactggtctgccctgctccagagaggaacggaagtgctcaatgtggccggccgattggccccgacacaggtctgcggccttccatcgtcgtcgtcggcgttgtgtcagcgacataatttctcctcctttagcttcttcctctccagtctcctaatcgtgcaaacgctacctgctgtgcagaatgtgaagggggctagaccattgtcgagggttcagatcagcaccatggctgtgaaggacaacctcattgttgccggcggcttccagggagaactcatctgcaaggtaggattgggtggcctgcagtgcagactcgtcagtgttttttccttagttctgtcagcttacaggtctctcactcctgcgcattactcgttcatcagtatgttgataaacccggggtggcattctgcacgaacctgaccggcgacgacaactccaccaccaacgccgtcgacatctaccaggcacccaagtaagcgactgggatcgtcatttcagccttttcaggcaatgcaacctctaaatatgaccaatgttctacaactactatatatatnnnnnnnnnnnnnnnnnnnnnnnnnnnnnnnnnnnnnnnnnnnnnnnnnnnnnnnnnnnnnnnnnnnnnnnnnnnnnnnnnnnnnnnnnnnnnnnnnnnnnnnnnnnnnnnnnnnnnnnnnnnnnnnnnnnnnnnnnnnnnnnnnnnnnnnnnnnnnnnnnnnnnnnnnnnnnnnnnnnnnnnnnnnnnnnnnnnnnnnnnnnnnnnnnnnnnnnnnnnnnnnnnnnnnnnnnnnnnnnnnnnnnnnnnnnnnnnnnnnnnnnnnnnnnnnnnnnnnnnnnnnnnnnnnnnnnnnnnnnnnnnnnnnnnnnnnnnnnnnnnnnnnnnnnnnnnnnnnnnnnnnnnnnnnnnnnnnnnnnnnnnnnnnnnnnnnnnnnnnnnnnnnnnnnnnnnnnnnnttgtctgatgaccacgacacgatgtagcggcggcatcgagtgatggcggcgaacaacgactgcgtcgtcagaacattcgacgccgagagatacagccttctcagtcagttcaccttcccgtggtctgtcaacgtgagtgccctgccgatgctctggagcagtcgatctgatagtgttgtcgttcgctcgtgaaccgaatccctgacactggctatgtctgcatgcagagcacgtcggtgagccccgacggcaagctgctggcggttctgggcgacagcacggagtgcgtgatcgcggacccgcagtcgggcagggcgacggcgacgctgcgcgggcaccaggactactccttctcgtcggcgtggcaccccgacggccgcgtcctggcgacggggaaccaggacgggacgtgcaggctgtgggacgcgcgcagcctgtcggagccgttcgcggtgctgaaaggccggatcggcgccgtccggggcctccggttctcccccgacggcggcaggttcctggcagcggccgaggccgccgacttcgtgcacgtgtacgacgccgcggccgggtacgtcgggcgcgagcaggaggtggagctgttcggggaggtggccggcgccgcgttcagccccgacggcgaggcgctgttcgtcagcgtcgccgaccgcacctacggcggcctgctcgagttccgccgccgccgggcggacggctacctcgacacgtgtttcttctgagctctgagggaggcgcgcgcgccattatatcgactgtgcactgtgcatgtgccggccggcgatgtgcacgtatatactgtatacatacagaggtttggtgtgtatagtgtaggtgtggtgcggcctgcattcgctccttttagaacggcgtaatggcaggtgcttgctttcaggagctagctagcgcctctttcttgttggtggtttcggacttggggaagcaggacacttgtgtggtgactggtgtttgaggtactgtgagcttgctgctatagaggtgctgtgtatgaattcacactcggtaatgtaagaaatgtaaattattgctaggtgttcttaataacaaataaatatcagggtctaaagatttgacgagtgagcttctatatacttcaaataaaacatagcttagctaaaagaaacagatttgcgagtcaaaagtgtgtttcggtgattacataatgaacacatttaacatcctttttagtgagtaggtatgc

SEQ ID NO: 3524 - DNA, 3804 bp, Sorghum bicolor
agaaaaagcagcaggcccagtgtttttttctaaaaccagacagttcaacctaattttctcaattcaattacacatgtggtcttttaaatggactgatccgagtgaggctttgcttatgggcttctctttctattgaaccgctgctccattccagccctcataatcgggaattcatactcatttttctgttaaacctatcttttataattttgaaccttggtgtttcttagacttatgtagcaaaatattatataatacattttttgttttttttcaaatgttaggagaattttctcatgatgctggaatctttcttccttctaaacttctaattattttttctcttgattttggaatgattttttggtgaacttgattttttaaaaacattttttattggtgaacaagtctatgtttttttaaacatttttatcggaattttctataagaaataagatccggcaatgaatcgacaaagatgatacaccctaactatggctaaactgctccttcacattgccagagggcctagggtggtagtcatgtaggagaaaatggagcaggtgatgatgacgactatactgttgcttctcagttaaatctacatatggcagacaattcgtgtagaaatggatgagtatctattattgataggagagaatgaaatattccaacgcacatatgtttttaaataatggaacgagattatagcctttacactactatcgtaaatatgtaaaacgagttggccaaataagataaaacactttatttgaaggttgtcacacaacatcctccgttttgagggtcaacctggaaagtttttttttttaatttcgaaatgtgaacagccctactaaaaaagagaggaatgcgaccgactataccaaaaaaaaaaacgctttgacgagccacgtaaacttcttgggctgttggctagctagtttctcggcctctgctcaatgcgtggtggctaggcctgctaagagatcagactttagcaatggcccaaaatagcctgaaaaggcctagtaagcacgattgtagaaattcaagctgccggcccgtggaacaaccaagtggtattagcagcctaggagtttccactcaaaaaaaaaaaaaccagcctaggagctttcatggccctctaaaaaaaggagctttcatggtctgcacagttttttttgtttttaaacttcatgacgaagagatttcttgttttttttttgaattgcagaacttggcagctttgcagtgttacgtgtaacgcgtgtattatacgagtcagaatcaagaatgccgtccccgagaactttctgacgtgtcgtcatcgaggcttcgtattttccaaacacacctgtctccctggcatgcccgtcatcttcccccgcaccacttcgcttgtgcacatcacaaatctgaaaacgatacacgttcgtgttcgtcgaagcgagcgcgtgagcacatggcatgaccaggccacctggcgctcgcgcgcgcgcaccgcgcaccgcgcattgctccaccgcaccaccaccaagtggcctatactagctagttgatcgagagcaggaaagccgcatccaacttgtagtcgccactgccagcatttcttcctatccatctgatcatctggtgatgagatcgatcgtgatcatcatcgggccggtccggggatcatcggtaccgtgcaccatcgcatcgagaggaacgcactcgatttgtacttgtacttgttcggggtttctttattatctcctcgcgtgcttggcttttagtgtctgcatgtggtggtggtggtggtgctggtgaccaacgtctatgggcgcgcgcgagcgaatcagctccatctacatgggcaggcttcgcgaaggtacggagccgtgacacaacgcgtgtcctttctacgtggccgtcatgtagcagccccgccacgctacgtgtcccacggctgcagcttataaatatagcccgtgtaaagcccctaggcatcagtagctgtttgaagcttcagctgagcagcagcagcatcatcatcatcaccaccgtcgtcagtagccaagtgtatttttcctagcgatttgcattgcgcgatctgttcctggccagtttaattagttgcagagcgagctgagcttcacgagcttttgagagacccctgctgcgtgccatggcttcccaccaggacaaggctagctaccaggccggcgagaccaaggctcgcaccgaggtatgaatggtggccatctcccatcatcttgtgttgatcacgaattaagttaccttcattcttatctgcttatgtatgaattggaatatgcaggagaagactgggcaggcgatgggggcgaccaaggacacggcgcagcacgccaaggagaccaccaagcagaaggcgtccgactccgacaccggcagctaccttggccagaagaccgaggaggccaagcacaaggccggccagaccacggagtccaccaagcagaaggccggccagaccacggaggccgccaagcagaaggccgccgagaccacggaggcgaccaagcagaaggccggcgagacgacggaggcgaccaagcagaagaccgccgagacgacggaggccaccaagcagaaggccgccgaggccatggaagccaccaagcagaaggccgccgaggccgggcagtacgccaaggagaccgtcgtctccggcaaggacaagtccgccggcgtcatccagcaggtatggttggtccatcagttacggccatttcacgtgcctactaatttagttgtaaggattgaacgcaacagcgggttgctcatggcttttctcctgtgcttcgattcccaggccaccgagcaggtgaagagcgcggcggccggcgccaaggacgcggtgatgaacacgctggggatgggcggggacaacaacagcaagcagagcgacacaaacaccgacagcagcaaggactcctccaccatcaccagagatcactagacacatgcacacgcacttcgtcctgtaccatgatcccgtttgcttgttcaggagtccagtatgtatgcatgttttcagtgtcatgattttcgttctacggatttggtgctgtaagtttaattcgccgttgctgtggttcttgggtcatgaagagtgtctgtaaacgagtcgcgtggaagtgttctttgttataataaagttggtaaagcctaatatatagcatgtagcttgtggcctatatatgtgttttgtagtttacatcagtatgcactagatatgatcttcaagtttgccgcttcttgcggtcgcaaagattggaccaaaatggttactgaccaagaataaatagtgaccgataataatcggctgaacaaagaacagtgaaagcggtttggtataagtatgtataggaattaagctactggcatgatgtatatagctttcctgagacatatgacatatgtatatgtctctgaatgagaccagacatagatgtatacagctatgacagttgtattatatatatatatatatagcctacacaagtctacgggagtgcatctcataggaactgaaacatactacggccttgtttagttcccagaaaattttgcaaaatttttcagatttcccgtcacatcaatcaaatctttagacgcatgcatggagtattaaatatagacaaaaataaaaactaattgcacagtttggtcgaaattgacgagacgaccctagttagtccataattggacaatatttgtcaaatacaaacgaaagcgtcactattcatattttgcaaaataatttggaagtaaaca

SEQ ID NO: 3525 - DNA, 2956 bp, Sorghum bicolor
tagtctagttagtccatggttacagagtagacaataattatcaaatataaatagaatgttacagtatctaaaaactttttacccaaaaaactaaacaaagtcactatttttttgtcctacacaactcaaactgcctggtgaggataaaatcctatatgaaagtccatgaaattcttctatctatacttagccaaaacttaactactcctatatgatagtagttgcaaatatatgtgtgtataaaaactaaaatttttatatatatatatatttatatatatatatatatatatgtgtatggatataaaaaaagatagtattagtattacacacacaagagagatatagatatataaagaaatatatcaatatatatatatatatatatatatatatatatatatatatatatatatatatatatatatatatatatatatatatatatatatatatatatatatatatatatatatatatatatatatatatatatatatatatatatatatatatatattccagattattccagcttagctcacatgtcagattattattagactgataattgatatatactccattattctgcatttcacttgaggatgctacgggttcaaagagtggtctatgaaaagaaatgtataaaatccaaagtaccaataagagcttacttattactccattcatcccaaattataagtcattccaaaaatcttagagagtcgaaccattttaagtttgaccaaatttatataataaaacaataatatttatgatgtcaacttagtatcactacattgttcattaattatattttcatattatacttattttatgttataaatctttgtaattctctttatatttttggtcaaagttgagatgctttaactctctaacattcttggagtgacttacaattggagatagaggaagtagataatactcctattttagggccttgtttagttacaaacaaaattcaaaaacttttcaaaatttctcgtcaaatcgaattttgcagcacatatgtagagcattatatatatataaaaaataattaattgcacaattgctttgtaatttgtaagacaaattttttgatcgtagttagtctatagttagatgattacggtaacaatttttttttaaaaaaattagatgcccactcaagcaaaatttcactttggccttttttagttcaccctcaaaacaaaaaagttttcaagatttcccgtcacatcgaatcttgtagcacatgcatgaaacattaaatatagacgaaaacaaaaactaattacacagtttagctgtaaatcacgagataaatcttttgatcctagttagtccatgattagataatatttgtcacaaacaaacaaaaatgctacagtatcgaaaactttttacttttcagaactaaacaaggcctttgttgcagacacaaatatcttttcaaagcctacggagtaggagtagtgagcaccggaaacacgtctgcatacacgtacacgtacagtaggccaaagtcaggaaaaatccgtaccccctccaagtgtcaggcttctcgtgaagatcgaacatgcgcctgcctagtagcatcacgcaggaccagagcagagcagagcagtgccactcctacggcactgacaaaccggcacaggtgtgcgtgcgagtgggagcgcaacaggtgtgcgtgccccggcgtggtggcgtgaaggtagcagaaaccaggcacgcgagtactagtacgcgacaaataatatcaaggcgccccgccacgcggacccttcccagcggcgtgacgagtcggggagacctgcccgctacggcgagggccccgggccaatcccctcctccaacctcgcttcttcccctcctcctcctcctcctcttcccccacccctgcttctttccccttcccccttccccctctctctctcaccccaccctcctcctcggcttcctcatcatccgccccaccgagactgtagtcccctcctcctactgcaaggcccgcccgtccgacccgccgcttcctcgcgtctcaggttcgtgcctggtggccgactctcgcggtggcggtggttctccggcgcctcggttgggcaggggacgagcgggttagggacagagggggtctttgctgcgattccgtgatggcggcgacggcggccatctgcgtggatgacgaggcgacctgcgccgccgcggaatgcgcgccgggggtcgagaagctggatctcgctgccgccggcgccggcgccgacggcaaggccggcggcagcaagaggagcgtctacctcatggactgcgcgccggtctggggctgcgcgtccacgcgcggccgcagcgccgagatggaggacgcctgcgccgcgttcccgcgcttcgccgacgtgccggtgcgcctgctcgccaggcgccgggacctcgacggcctgggcctcgacgccgacgcgctccgcctgccggcgcacctgttcggcgtcttcgacggccacggcggcgccgaggtacgcccgcgggcttctcaaaagccactccatcgatgagagctgttgctgattcgtcgcttcttgtcgctgtacaggtggcgaactactgccgggagaggctccaggtgctgttgcggcaggagctgaggctactcggcaaggatttgggggagacaagcgaggtggagatgaaggagcactgggacgacctgttcaccaggtgtttccagaggctggacgacgaggtgtcagggcaggcgagcaggctcgtcggtggcgttcaggagtcacggccggtggccgccgagaacgtgggctcgactgcggttgtcgccgtcgtgtgctcgtcccatgtggtggtcgccaactgcggggattcgcgtgttgtcctctgccgtggaaaggagcccgtagagctgtcgattgatcacaaggtgagctttttttttagt

SEQ ID NO: 3526 - DNA, 5043 bp, Sorghum bicolor
ccggctcgagttgttcggcgctgcctcgttggagcaattggtcgagcaagctaacggcggcctccgggctgggttctcgacgcagatgcccgagctcgtcgctgtcgaatcggcgatcgatgggctccggtaagctggtagtcgtgacagaggcggagggttcggggtatgcaaagcggagcgccgggcggctatggtcgcggtggtgacgagaagccgtgtcggccggtgcgtggaaaccgcttcgtctccgaccgcggatacctggacgtgtgagcgtggtggtggtggtgagagtggaggaaggggaggtcaaggaagcggccggtgctgctagtgttggagaaatcagcatgtttggcggtggcgtgaggtgcaggtggagacggggagcgcgcagatatcagaggacgcgacaaaagattatccgagctgggtggaagaagccgcaccgtagtggcagttcggcaattggactgggccggagaaaggtagcgcccgcggccctccggcgcgcgctctctttgggccgcgctaattttcggttgcaagaaaaagtagctgcttcccctaaaaaaaaaaaaggaaaaagtagctgctgccgttgcagctgcttttgtaaatactcaatccattctaaattataagtcatttaacttttttaacatcaaatttgatcattcatcttatttaaatatttatgcaaaatattatttcttttgccgtgacttggtttattaataaaagttctaaaagaatgatttaaatttaactatgtttgcgcaaattttttgaataagacgagtggttaaacttgaagttaaaaaagttaaatttcttatattaggatggaaggagtacataactactttcctgaaaatagaaaattaaaaattgtaaaaactgttttacttaaagactcataggaattgtttatcttagaaaaatataaaactaattttacttttttctaaattagggtctaaattactgattcaatatggattgtgagcgtgacaatgtaccgtagttcatggtaaggcattggacatcatgtggagtctaacaaaattaaatctactcatctggagtctaataaaacatactctcgtggagtctaacaatattagatttttttattttataatttgctatgatttactataaatttttatagattcaccagaaagaaagaaataaaaagaaaaaaacaaaaccaccggtttaaaaaaattaaggggtagaaaatatagttttatagtttagggggtgagtaatccaccctatatagttgagagagttatgtagactttttattttgattatttttagggcaacttcaagagtctctttatatcattcctgctgataaaaatagatatcttcgtgaaaaaaaacattgcatctaacaggttctctaattggacgttcaaatattcacatcttctattttgtgttttttttgctagattgggtaaattgattctctaaagtgcataccattaccagataaaaaaaataattattgcgatggaaagatataaagagcgattttatttaaatggttctcttgctcgggaaaaaaaatattaaatagctcttaagatgatgatatagagtgtgatttaataaaaacttttgaaggtgctcttagccaaactagttgatttaaatctactggcttgcatgtttttgtaagcgaattacggccctatcagtatcggacaaagctggcaatggacgtccataccgtttttatttttgctacgatttcttaattattcaatcaagtcggccacgtacttgattaaaatgagactacattacataatgtggatcgcgtggccataaattaaaagttgctgaaatatatacgtggctaaaagatagaagtcaaaaaaaataaaaaataatgcaatacggtcgctagctctccacgtgggctgtacaaattgacccgctggcctcgaactgtccggatccagcgggcccgacagttcagcaaataagcgcatatccactgccaacgaacccgatgcacaaatcaaacgcgctagtaactagacgcggctagacgcggcttgcacggatcgatccacgaggaggggcgagagctagcgagagagtatcggtgaaggcgaaggcgaaggcgatggggaaggggttcgcgtcgtacctggcgatgaagacggggccggagggcggcggcccggcggcggcggcgcagcaggcgctgatcgacgccgacctgcgggagctcggcgtcgccgcgcggaagctcgccaaccatgccttcgttctcggcggcggcctgggtttcggcacttccttcctcaagtggctggccttctttgcggcagtgtgagtgtttccgctcctttcccgtttctctgtagattcctctaagaaaggggatccctgatcccatttttttggttgtggtcttatgattcgcgaatcaaaaaaaaaaaagggtccattggcaatttgctatattattgtcgaattcgtatcataataagcgatcgctctttaattgggaggatttagagaaaattgggggcacgtgtgtgtgactgcagcactcatatgcagatggacctggctcctgagtcgcgaggaacttggatttgaagttaacaccgctatagtgaattgcgtgttagtgaatcacgagccaagtccatctgacgcttagggtgtggttactggttatgatctaattgttcttgcgaaattcctagccactgttaagatgttggtatggcttgtacaacctaattatctgcacgttcaattgtcagcgtttataagtactctttactacactgaatcaacaaatggcatgaatcaattgttagctggacatacttttaatgttactcgaattcattgggacctgcattactgtgttgtaaatgggacatcttgtaaaaaaaatcatctccaattttataaaataccaggtttgaatgaatttatatgctatttgcaccgagtgacattgttagaacaatttttttttttaagattgttctcactacaattaattggtgacaacactgttctattccactacaggtatctcttgatattggaccgcacaaattggaagaccaacatgctgacagctctcctggttccttacattttcttcactctgcctaatgtgctgttttctctgatcaggtgattaggcgcataaaccctatctcacgaacaaatctattgtgcattgtatggatcaattgttagttaccgtgatagtttttatgtcactatgggtagcagaatgtgtaggatcaaagcactgccactaccatattgtcatactcttttttagattagttaataccatattgtcatactctacacctcgtagaatgacagctacaaagtttatcaaattcagttatgtttttgtggataagttaatgtaggagttctgttgatgtgaatcaaattcaattatatttctgattttatgtgaatcaattaatgtaggacttccatattggttcatgttaatgtgaagtctgctgtacggatagatcaaatcactttcagcagaaaatgttctctcttgatcacttgatctataatagagaatatgaaagtagaatttcttgtatcatcaaacctttgaattttcagaggagaggtggggaaatggattgcgattattgctgttattctgcgtctattctttccacgccacttcccaggtacattccagtcctatttcgcatcctgtcaaatttccagatatctgttacatttaccttttatttattaagcttttgtagttttgccattaacataaaatagttacagttgatccttttgcttagtgattctcaacaatgtttcatcctgtgcaccagattggttagagcttcctggttccatcatcctgctcacagtggtcgcccccagcctgttcgcagacaccttaaggggtgacatcgttggtgtcttgatatgccttgcgattggatgctacctgctccacgagcacatcaatgcatcaggtggattcaggaacgccttcaggaagggcaatggtgtatcaaactccattggcatccttctactcttcatctaccctgtatgggcttttgtgctgcaagtcctgtaggcaccaccgcaccaatgcctcagcgttcccctctgcagtccaggcgtccagctccgttcccattcgtccttgtgcaaatgtttcctctatggtgatcatgatcctgtgtcatcgcctcattgggagggtatgcgttatgtgtgattgagtcgatcagttggacctgttgccatgttggtgactcgtttgttatctcagcatttggttctttggagtacataaacgttaataaaatcattagccgtggcttgatgtagatcgagatgttggccatatttatcccgtgtaaatccatgcatattttatgttggtttgaggatggatgtttatatcaattgtatcatccagtgttattctgaatatggtggtgccaagtagtgacaaatagtgaaacaacattaactggacttgagaacattttgtgccgccggcgatcaacttgtggacgaacttttttggttccggcatccactctgtcgtctacacccggcttcctggcgtccgttggttcagccttgccattcactcgtacccgtcggaccacacaaggtggccggcacattcctcctcgccaggctcgtatcctcttgcccagttgcaacaggggatgggatgcgatgttcttgtctgagaggatcgtgcacaatgatgtttctcaattttctagtactctaaccgaccgaattctctagcagctccagttgtgcttgactggttggataatccatccgacgtgtctacccattgtgatcgctgaacatggtctaacgcatccttcttccgttacatgtccagcttgagcgtccacctgttctttaacagtcgcgatcagcgtggagcagtgtgatttacgtgcaccagtttaacttagcagctgccaaaaggatgagtgggagacgcgaggt

SEQ ID NO: 3527 - DNA, 3320 bp, Sorghum bicolor
tcactcttactgaataaaaaaatcactcttacatcgccgtagctacttaccaagtaaccattgattggtggatcctaaggcactccacaacatcgtaggggtgcccaaaagtcaccaaatctttgcaccacaattgaaggctcacagcggaagcaaactccaggcatcaggactcaaccaaaaaagaaaaaaaccaaatgcataaaaaacaggcagcacggatcataaacaacatttaatgaactggcatcggttcctctacttgctccgctccttattttcttagcattattgaaattggcatcacttgctacaatggagagagtggtgccagaatcatctctcttattttgggcatcacttaagcaaaatattatggagggcctaagagggtgtttggttgagtaatttacaagacgaattttttaagcctaattagtctataattgaacaataattttcaaatacgacgaaaatgctatgttaaactttaacaatcccaacaaaacacctctaatgttcgatcgaccctaccgttacattagcaggacccccgccacctagcacgtgcccaatgccacgccctctgtccaccacaagtcaggccttgtttactttcaaccaaaatctcaaaaattttcaagatttcccgtcacatccaatctttaaacgtatgtatggagtattaaatatagacaaaaataaaaactaactacacattttggttgaaatttacaaatgaatcttttaagcctagttagaccatgattggaaaataattaccataaacaaacgaaaatgctatagtgtcgcgaaatctttttgtccacgaactaaacacggcctcaggcgtcatgccatgtgttgctccgtagcgtttttttcatataaagcattttaaaaatttgtagaaatgattggatcctgataaaatcttttgaaaatacataattatttcattttgaactctaaacttatgaaacatgtattgaatgttttactaaaagttgacctttgtatccaaaaaattatttttctagttcttttgtatttctggtgcttcaatacatcaatatattcttcttcccttgtgttagaaacctatatgagctctcagaggaggaccctactgatccaatgtatgtagaagacttcgacaacttgtataaggtgtcatatcccacccacatatgtagaatcatactctctccgttccaatctataagacattttaatttcttttagattcattgcttttgctatgtatctacacatgtatatctaagtaaataacaaaaactatataaactatgtacttataaaaaaacccaaaacgtcttgtaatgtgaaatgaaggaagtatgtaggatgcaaacttatgtgctagggctagctatttctgtctgatgatctgaaacgtatgcaaaatggtccaataagcgtatatacatactagtattttcttcttatttctgaatcattgtgtgtacatctgtacagcttgtcccaccctgcactgcccctggcaccaccgacacttcaagcacaggcagctgaacaaacaactgcaactgcccttctatttttttctttgctagaatgagcgcagccgccgcacttcgagaggcaacatcaaaaagtggcgtccactgaaaagaatgcccgcgcacgccgatcaggttacgccggcgggcacgccatggcgttcagccgttcacaccctgttccttcgggcccaaagctgcctcaccacatcgaaccaccgggccgcactgagccggctgagatgtgtgtggccgagcttgcacgacgccaatggcggaggcacggcgtgctgccacgcgcccacgccgcgtgacggtgcgcggctagtgctcgccgcaccaatcgtcgccggccatcagcccatcacgaggtcggttcatggtggtcgccacacctacacgctcgacgccactatataagaagggggccttggcagccatgaaggcgccggcttacacagctacgcacaactcactaggagaagcaagaaaggggtgaggtgacgatgaggagtctctttgtggtcgctctgatgatcgtggccgcggcctgcatcgccgcgccgcggggtgccgacggcgcgggcgagtgcggggcgacgccgccggacatgatggcgctgaagctggcgccgtgcgcgtcggcggcggaggaccccagctccgcgccgtctagctcctgctgcggcgcggtgcacagcatcgggaagcagagccccaagtgcctctgcgccgtcatgctgtccaacactgccaagagcgccgggatcaaggctgaggtcgccatcaccatccccaaacgctgcaacctcgtcgaccgccccgtcggctacaagtgcggaggtaattaaggaagcaacaaactgatgtgtgatattattcttcactgtttgctccggtcgtttattctgtgattaccatgtatgcatcagcagtatcagcaagatgcagtaacactgaatgagtgtctgtctgagattcttcttttaattctttattacagattacactctgccatgagcggtgaggattattccagggatttgctgcatgacgtgcatgttcgagtatcaccaaagcgcgagctcttgtggcgtgtgttcgtgtgtgtcagtctctgtgtgttgcccataataaacaagacatgcgagtaccacacatgtggaactctagtagtatgatgatgtgtgtatcactagatacgtgtacttagttgtgttcagtgtccacagatgtagtcttgcattgtcgaatcaataaatcctgtctttctgataagatcgattgagagatagtagatgttgtgcaatataatttatgtctccaccgtttgtcaactgaaaagcttgatgctcgactacataagatttattattttagatgatgataaataagaacatgtgtaatacggaccttgcaaaagaaaatcaaggcaagtacgtactgtgtcttgttttgagcacggttgttttagagtgacgactaagatgagttgttgatttaggcttgatgtaatttgcatttatgatagaaagtgatttgggtaattctcaatacattactgtgattaattgtcatatatatatatatatatatatatatatatatatatatatatatagaggctagtggatacatattagccggattacattccaacactctcccgcagtctaaactgggagcaccgcgaacattgagactggatctaaactccgtgaagacggatgtcggcagacctttggtgaagatattggcgtactgagacgtagtggg

SEQ ID NO: 3528 - DNA, 7136 bp, Sorghum bicolor
gtcgcgaacgtggtggaaccgtggaagtggaagcccctggaccattcggtgcactggtgcagtgcagctctttggccccgggacccggcccagacagacgcacggcgcgcggcggaaccagcggctgacaagttgccgagcgaccgtgccacgcggtggacgcgcactcgcgcgccgccgagcgtcagtgcgctaccgctgcgcacctgccgtgccggcggccgcggtattccggtcttccagagcagctccgcgtgggagcagccgccagccgggtgggggtgggcagatggcgcgagccgggtggtggagccgtggaacgctggagtctggagacatggccgtgcgcccgtgcccacttgccgctgccggtgaagagaatatccgggggtgatgcggtgcggcgaacgattcggcccaggggtatctcctgctgcgccgtttcgggtcagatgccaataaacgatgtacagtaggtttcgtccaagttaccgtaactgtaatttggttagttatttctcgaattggactgctgaagatatataagagagatgactggctagtacacggcatgacgcggggacgttccgagcacacgctaattaagccaaatcctctcgtaactgaacaatggcaaggtcgtgaattaaaattcatcttgactagaacgatgtccgtgcattgccgcagaagctacgaatgattccgagtaaaattagactacttctaattaggccctgtttagtttcccacccaaaattttttcatccatcccatcgaatctttggacacatatatggaatattaaatgtacataaaaaaataaactaattacacagtttggttaaaaatcgcgagacgaatcttttaagcctagttactccatgattagccataagtgctacagtaacccacatgtgctaatgactgattaattatacttaatagatttgtcttgcagtttcctgaagagctatgtaatttgttttttattagtttctaaaaatccctcccgacattcttccgacatatccgatgtgacatccaaaaaattttcatctccaatctaaacagggccttacttgcacgagagatagattattttaaataggtttaagtgggcaatacggtatgctgtcatagacaaataaaaggcatgttagtggatgttgatatatcttagtaacatggataacttacgtgaatgttgctgatgtcaaatgtcttgtatgtttatatagagtgctattggagtgttatagatatgcattggtataaatataaatatatctcacacgatgccttgttcaataagcacctgatcgttttttttatatagcagatattaagattttaaaaaatctcttgaagtttatcaattgctacaaaaaccaatgtctcgctaaaagatatatgggatttttttaaaagtagactgtggatatatcgatactcatactatttgattaatgcagatacgcctaaacatttaaagtaaagggtgcaccctatgtagctaacgacagcaatatataatttttctttttttttcaaaggtcattgagagaatttacacacattaaatttctaataaaatataagtgcacactgcaatttcgtaaacaaactaacccactaaatttatcatacaattctcctttcacaccagtgcacaatttaattaagcggtttaactagaatcacaaaaaaaacttttattttttatatatatctataaattagaaggcacgcacacatcttctgcgcgttcttgaaaaagcacaaggctggctgatagaggaccagctagtttcccttctggataacgaggaaaagccgtgaatgaagaaaatcaaaacgagaaagaaaaggtactacacacaagaaacaaaatgggagtggaataaaaaatagccgcgtgccctagctgccattccgggcctctcccgttcccgtcccttccagccagcgccgcttcttccttcgaaccccgcactaccgctcgtttatacgccagcgacgccgcccccatctcgtcttcctctcctcctcaagcaaaaggcgagcgcgagagaaacctgaagccacttcccagcccgctccgcccctcgccgcgatttcctcacatggcagcgctgcttctccgcgagtcactcgagaggaacgacggcccctgcttctgcttctccgacccctgtccctgcgccgacacgcgtcgcccctgttccgatctcgccgcccccgccgccggtcccttctcctccctccgcgtccatcgcacctgctcctgatcccgctctctttcctcccttctcccgccgttatttgtgattgcggctctgattcttgcttccacggtctgtctcgcggttcctgggagcttctgagttctggttctgtccctgaccggtgttgccatggggaagagtgagtttctcttgacgccgattgattggtggtgtcttttgatcgatgggtggtgtagtggttggttctgaatttctgattggtgatttgggggcgttggtttgtgcaggcaagaagagcaaggcccgcggcggcggggacgacctgctcgacagcagcgacgccgacagcgtcggctcctcgtccaccgcgctgtcggatctctccatctcgtatgccaccgagcacgtcaactcgcaggagttcgtcctcgacaagtacatcgacgcgctctacgagaagaggtcaggaggtcaccctttacgcttctaggattctctagcatatcgttttggttgtttgctgttcaggcgctgatggtcaagtaggcatttctgtgcgagtgctgttcacttcgacttcgttggctgtacttaacttatgtggaggcatagatggtttactatgtggcatcatattgtagctggctgacccaattgtagttggcccgggcaacacggttttcttgtttgtttgcatgatgttccctacttaatgcacggactcgtattggactatagttcactgtacttaaattacagttgtctattgtttttgttttactttgcaaggtccggacccatgataatctgatgactacttgtatttacttgcacgagaaatagattattataaataggtataaataggattcagtagtgcatagagtttttactgtggttgaaggtcttcttggccattaatgctcattgtgttttcataaactaacaactatgcattgcgctgatgttactgtatgtattgtcttctagggggtctacaagagaggcagcattggttaaactggttgatgcctttgaaagttttatgctccatggccttgtggagaataggtatgttatattctgttagtgagccatgaggccttaaattatgaaatgttgcatggattttttttgcttattttcctgtaagtcatgttgtgaattaccatgaactcaccaaccttcccatgtgtcacatggttacattatgtgctatcatgctagctctctttcaggtatggtatgttttatctgaatccacttggtgaaatgtataatcattgtgtgtgtttatgcttttgaaggtatgccacactgctgagtcaattcaataattccatcaaaaagggatctactaaggaggtttttctggcatctcatgccattggtatgtatatatactatcccttgttcacattaagtagttcaaagcaaatactgttgttttatgacactgtatttggtcattttgagtcattagggttattggctattacactcggtgctgggagcagttcacgtgaaataatggaggagtcgcatccccaactctgtaggatacttcaagcttggtctgatgcatcaaagatgatatctgtatgtattttttgttgttgtcatttgacttccaatccttctgcactcccagtgaagggaatctaaactgaccttctgtaggcacttgattgtttggctatcatcacatttgttggcgcaactgatctggctgaaacagagttatctttgaaagccatgtgggatgtgattcatccaaagtctggttcaaatgtaatgtttcccatttacttgttattgtattttgcaagctaatgttgaaaggagctgcatccagttttctatgatgactgaacatggttgtaatctctgcaggtgggaactgttcggaaacctaagcctcctgtgttagcagctgctctatctgcatggacatttctcctgactactattggttcatggagaataaatactgatagctggaaagagttagtgttttctgtttttctcctgttgtatgttggtgcacgctaacctatcggtggatttatacctaacttacctttcttctacttgctaggcccattgcatttctctccactcttttggaagcagatgatcgtgctgttcgaatggctgctggtgaagcattggctttgtgctttgagttaaatctgcttgatgtttcttcttgtgaggatggcgatgttaacacgggaggaactggtggttctaagaacaagcttttcttggatatgcaagcattaaaagccaaaatatcaggtctggcctctaatctctctgctgaggctggggggaaaggtgcagacaagaaaaaccttactgaccaaagagacttgtttcaaaggatcttagattttgtcaaggtttgtttgtatctgctctagttaagagtttcaaatccttgtttctgtttcacttaattggtgatcctccttttgtagtatggtgactgccctgaagaatcgatcaagattgctggaaaacgtgatgttttaagggtgtcgtcatggtctgaattaatccaggtgcttgtttttctcccctccttggcttgcaaaatgtaaatattctttcatgttctcattagctatttgttttccttgttaatcagttgaatttcttaaagcggtttctggggaagggctttctgaagcatgttcaggttagtgtcttctgaatggttatttataaacgatgtatttagtagatggtatgacaaattttgagttcctctcatacaggagaatggacttcttcaggatatctttgacattaaggttgacaaagctgaaaccctgtcgtccactgataaggtaataaatccctgacatagatgttgcgagttgcaatggtagttctaagtttgtcaaagttgaacatttttatttatgagtccataccagtagtctttttactacagactggtcatacaatgcccaaaagttcactcgttcagtaaaagctgattatataaccaggatagaagtctagaaaagtagagtacaattggatataaaggctagcaagatggaatctaatagcttctttgggtttaggcttccattgttgtattttaggcaccttcctgacctaggcataatgttgccttcttgtctccttgtttgctttgtgtaagttggttggcaatttaaacaatggtacaggaaaaatgctatgttggcaatttcatgtgtgatttcagtaaaaagctagataccattattggctttactgtatcccatgtagtaaaattcattttcctttaaataaagttttgatctgtctgtatgaactgttcagatttgattcctaaaactctcttatgttcaagtttctcatgttgatctgcctgttctcttggtttgcttttattattatatatcaatttcttatcacaaacaacccaaacctcttgcagaaaatctttaggtctgaagaggaaaaagaaagagctctgaaattaaacaaggaacgtcgtctagcccaggtaatgctaacatgagatgtcctcttcatgtgaagaactctccttgtcgtcaccctatgtttcttcagcgtcaaactataataattaaaataattttatggatacctggacacctggttccctaacagcataaggaatcctaactggcgctctaagagtaatccttgtaaatgtttttggtcctcttcggctggctactagctggccgtaaaattttgactgataaattcaagcgaacagggcctttgttttccctcatgttactgtgggtttgctggggtggtgtttggttacatgttggtctcgccttctatgcttttgatagccagcgaaaacatatgcaacaactatagtctgaataatactaatacacgtatgatgttttgatcatttcaggtaaggaagaatgccgtcatgttggacgactaacatggtcacttgggtgggaagaaccattctgcgtctcctttcaaactactccgtattattactggcacatttcactggaggttgtgccatcatgattgtgtactttgagatactggagttatactattatagtgcacctaaacaaattgctatttcgtgcatatggaacgtcagatagcacgatttatgttgaagttcagcatgatttggcgggaatagtcaagaattacttcgaagttcactaggcagttttgttctgaggcccacctcattcgaagacgttctgttgttgcgtgacagttgcatcaactgtacccagcccgtcgtcgacaaattggcacggcctaggaccgtcccttccatggttcaaggcacacaccaaactgttactactgtagtaaccagtattggatttagaagttgttttacataaggtttgagttaaatattggaaatctaaatcatcaacaattttaaattgttaagtttgtaaatgtaaaaattatatgagtagatttgttttgaaaaatatttttataaagtatacatatattatttttttaaaatatttttataaaataagaggttaaggccttgtttagtttaccctaaaaccaaaatttttttaaagatttttcgtcacatcgaatcttgcggcacacttatggagcattaaatataaatgaaaataaaaacggattacacagtttgtttgtaaatcgcgagacgaatcttttaaggctactttatgattgaataatgtctgtcaaataaaaacgaaagtgctataatgttgttttcttaaaaaaattttgaaactaaacaagacctaaagttatattagagactgtcgctatcctaaacgacttttaaattcgatataaaagaagtaaataaataataaaatatatacacggtgattggtgaat

SEQ ID NO: 3529 - DNA, 9970 bp, Sorghum bicolor
aaggtgcatttttttggatttagttattataacttttttattttatttagcaattagtatgtaattatggataaatttgactcaagattcatcgcaaataatatgcaaaatatataattagttattttttaatttatatttaatattatatatatatgtctaaagatttaacataattagataaaaagaaaatttttagctaaacaacaaaattgactctttgtaggtgggcaaggttctcgtgtctcgtgctagcaaggcgaggccgaccatttctgaggcctcgtttaggccttgtttagttcgcaaaaaatttcaagattatcagtcacatcgaatctttagtcgcatgcatggagcattaaatatagacgaaattaaaaactaactgcacagtttacctgtaatttgtgagatgaatcttttgagcctagttactccgtgattggacaatgtttgtcaaataaaaacgaaatgctacagtacccaaaaacaaaaaattttgcgaactaaacaaggctttagttcactcaaaaaccaaaaattttttaagattcttcgtcacatcaaatcttacggcacattcattaaacattaaatatagacgaaaataaaaacaaaattacacagtttgcctgtaaatcgtgagacgatttttttaactctaattagtgtatgattagacaatatttgccataaacaaacgaaagtgctacagtagcgaaataaaaaaaattcgtctctaaacaagtcctaagcccgaatagcagacgagcccagagcaccaagcatgctcctacacttttttatacttcctgtatcctataaaaatgtcattctcgatttctaaaaaattaaatattttttgattaaatatataaaaaaatattaatatatataatatatttagagatgtgaatattcctaatattttatgtaaacttaatcaaatttataaaaagtttgaccatcacgacttcacgagtcaatagccgatcctttgtataggaagaaggtagtatatttaccgaactataggtttagatctaaaaggttttgatttggatactgtaacatttttatttgtattcgataattattgtctaattatagactaactagatttaaaaatttatttcataaattacagacaaattttataattagttactttttatatctgtatttaatgctttatgaatgtattgcaagatttgatgtgacgaggaatcttgaattttttttttaattttaggtataactaaataacttatatgtgatacctattgcatgagtttgtttttttgtgtaaaaagtcctagctgaatatactgttcactaatttattattagagacaaacaatgttgttagattcggcagataagctcaactctacaaaggcacctcatgtcttttgatttaaaaaaattgaaattgtttgacttaggccttgtttagttggtgaaatgaaaaaatttacggccactatagcactttcgtttgtttgtggcaaatgttgtccaattatagatttattaggctcaaaagattcatctcgtgatttacagacaaactgtgtaattagtttttgttttttactatatttaatattttatgcatgtgcaataagatttgatgtgacgaaaaatcttaatttttttttgtttttttggatgaactaaacaaggccttaaaaaatgagaattattttagagtaatgtgactagaaaatagaaactccctgcaaatccaccacaagccctttgatttgacctgaaaaagaaacccacaaacaccactccacactactgcactgtctctctccaaaggcgcattggcgtcgcccagccttttccctactgtgccgcgcgctctcccttctctctaatgatagcatagagagagaaggcatacttcgaggcatcctcctcctcctttccctctccttcccccaaacccttttcctctttccctcgccccaagaacttcatctcacctccaggcgcccccttttgcgcttgcgcaggagctcgcggggacagtgggcggagagctcgatcgctgcaccactacttcactggagatccgcccactcccatggaggagatcacccaccactttggagttggcgcaagcagccacagccacggccacggccacggccagcaccaccatcaccaccacccatgggcatcctccctcagcgccgtcgttgcgccgccgccgcagcaaccgccgaccgcaggcctgccgctcaccctgaacacggtggcggccactgggaacagcggcgctagcggcaacccggtgctgcagcttgccaacggcggcagcctcctcgacgcgtgcgtcaacgtcaaggcgaagggcgagccctcgtcgtcgtctccctacgcaggcgacctcgaggccatcaaggccaagatcatctcgcacccacactactactcgctcctcgccgcctacctcgagtgcaagaaggcaagcaaagacctgtactagtagcagtctaacagtagcgcactactagcgctgctgcttccggttctgctagagaagtttcgccacatctgatgatgtcaagaacggcgcacgcatatgcatatactttctgcttgcttttacatagcatactatagtttatgcatgctgctcatgtagacatgtgcatccggtgttcagaactttctcaaacggcggccgtgtgggtgcttgcaggtgggggcaccaccggatgtgtcggcgaggctgacggcgatggcgcaggagctggaggcgcggcagcgcacggcgctcagcggcctgggcgcagcgacggagccggagctggaccagttcatggtgagagctatcagctaaccgtcaatgatcccctttctgcaaaagaagacatcttttctgtgttttgctctcgaggtttattcacgcacggtggcattatttgtcgttgttttcaactcggttttaatttgcgtgtaggaggcgtaccacgagatgctggtgaagttcaaggaggagctgacgaggccgctgcaggaggcgatggagttcatgcgaagggtggagtcgcagctcaactcgctttccatctctggaagatcgctgcgcaatatcctttcctctggtactgaaattgctgcggctcatgctcctcttatattagatgatttcttggatcggttgcctcctcatgcagtgatgacctcttgttgatttttttttgggaagggtgatgccctcttgttgagatcttcatgttctcttggttgtccatcatgccctcttgttcatcttgccgtcacgagatcttcatgtcttcttggctgcccatctatcatgccctcttgttcatcttgctatcctctttcttggttgagcatatgttgttgattttttgcatctaaaaaagagaagaaaaaattgatgtggtttctcagcaatttggcatctatatggttccctttttaagagcatcttgttatgcatgcatgttttgagtatagctacctgcgcagcgcagatgaatgtcttgtctgtgcttcatgttttcctaatccgggtttcccaaagaatcttatccatgcttgcttttcctggccatgcatctgtgagattcttcgctccggcttccatcgatctttgcttctgctggaaaggaatagtcctcacacatgtgcagcagtgcaggtgcagctcaatctagcacgacaccatacggcccattccttccttgcgttctgctgtaatactgcatagagattaggatgaaatcacctgtgttttactggtactactactactactactttggctgttggcagggatgccttgttcgtcgtcctccattgattgattccatttccaatggaatatgtgcatgtgtccagagagtagttcctggttcaggcagccatcttttcccatgatgggaaccccagggaattacggagccctttccttgttctagggtttggggaagggcaacagtacagcgtgctgtgctgtacaggcattgtgcaagcaacagttcatggccgaggagtctcactggcgtatgtcagtgaaacacgagtactacacagacgtactccgcctgtgaatatgggaggagtgagagtactgggccggtagatagaaagagatggggagtcatcccccatctgtcacgcaagcttgtagcctggccagaacattcttgtcatctttctccacctcaagagatgtagttacctgttgtcctagaatctatagtgtgttgtgttgttgtcttcccagatgtgcttgttctgcatgcccagtagtctctttgctaattttaaatgaacacatcaggtggatcgagacgatcctaggggcctttctaatgacctatcacgaggctatagtaacaactcgtgctaccacagttaacttccgagcccagagttttttcacttcggttctggagcactggctacttggctagtagtagttgacagcaacacacacaatcacttcatcattattggagcatgttagcgaagaagctgccatctgatgatgtcgtagaatgctgcaaaaatggccagtaagccaagaacgctgcaaaaattgaatggagcttcatatgcggctcagttttttgtgttctgaaccggtccatgcagtggacaaaatggtctgtgtgcctcgagaaccatagaaacagttaggctagtacatcaacgctgaacgtcccccattatttgatgtgagatctctcttgcaatggatgtgtgatctgctaggccttatattatatgcaacaactagtacttctttgtccctgtattttgtcacagactttctccccgtgcattctctctcataaataatgacggtcaaggaacattggatgccggcagtccaagttctgcgatacatttttcagctgtcaactcagatttcttctcagctccaactgttctttgaccttctcggcagacttttttatttttgaaagaaactatttgtagaccacatagattcttttcttaaacataatacaatcccttttgtttatgagggccacagacgaactattgaactaatcgcaaaacaacactgcattttctgactgatgttgcccatgtaccccaagattcttggttgcatctactctttcaaggtcatgcaaaagcagggacacagatatcacgagtttccatttgtctcgaggtaagaccaaaaaagataccagaagcaaacaacataaaacaaaacgatgaaaaagaaccgatgggttttgcactgagacaccagtggaaaagacaacgcccgactggaggaaaggaacaatctggcacgtccatctgcgtgaactcttttatttgatctgcatctcgtgcatgtttatattcttggttactggagtcaggtgcattcatttttattttctttgagattgatcgtcggattctgattctcgtcacttctgctgttggttttatcattttcatggattctattatatctatcgtaatgttcagtatcacaaaaaatgatgtgatcagagttgtttatcacataacttatatttttttcattttccataacagtggaagtgtttgacaatattatccagaaacaattgataaatttaaacataccagcttttttaaaatatataactttatttaccttaaaaaccagctgtattgaaatgaaacactaggagatcaagggcgttaaatgtattgaaatgaaacactaagaaaatatttgaaaaacatctggaatgactatggaacagctcctaagggttccttcggcaatactatttcttaagtgtaccatgaaatcttttccagaagttttttagatactgctgtaacatgtactcactcttccctataaacaactttgactaaatatacattaaaaaatattattgtttatggtatataattagtatcattggaaagatctttgagtctagtttttaacaaatttattggaggacaaatattgcacgtattttttacaaatcgagtcaaacttatggcacggaaaccaaaaacgacaattaatttgtgacgggagtacaagctgtgacactcttcttttttattttggttttccacattttcaacaagtccaccaaatatttccacaaagtaaaatgtcttatccctgtggtatcccaaaacaatttcatattttcatgggttactatgtccattgtctaatgttgttttagtgagcaaatggttctttcttcatttcaaagataaccacacacatttcgcataatttttaatggatcattaaattattatggtcatttactattaccatatctgttgtgacctcacactgctttaatctgttccaattaacagcataacgaacagatactcatgtcgtgtcacatgctcaaaaatcattttcaaaataaaatgatattttcactgttgcttcatcagaatgcacaaacataaaatatttatttcctttatgcaaaaatatatacgaatgttggtttcatggagcgataagaagatatttatacagttaaagaaggtcctgttacccttttttttccaaacatatcagatattttctcaacattccaggctaaatagacctgcatagtatcatgctcacaaatgacaaactgtggttgacccatggtcatggtaggtatgcacaggactgagtagcagcacaaggtccaaccgctgtgctgtatgaaatgaaactaaaagaatgttgacatcctggctcttggtctcgaatgtgtgttgttattttctagttattgatcttatctaaagataactaagtgtttgattttagtatgcgcagcagggttttgcactagcttgccaagcttatcacagccctcctttacctgtgctcctgggctaggcaccggatgtgttgaaacaacacgagcagagttgttttgttagaacagataaaaatataacttaatattggagaacatacttcattttcccatatatgatagggtgctcttagataggcaaacattttattcaagtcttaaacctgtgttcctttgcttatttctatattgcttccaaatttgttgccatcaagatgtttatagataattggcaaaacaactgtacatgggtcatttatgcctgttgtcaaaagcataagttaaatattaagatgctaatatagaaaaacaaatgcagtgctgactgttgagaaaagaacatggtgtgcacatacagatgcaatataatattttacccacaatataaaaatgatcaaaatatcatgcaaataaagtaatatgcgcagaaacatccatactttttatattcattcactaaaatagtgcaaatgcacatgtccgtgatatctgtacttcaatgggtatactggagatgttagactgattgatggacaatagcccaatgtaaattcccaaggctgttgtcacgtgggagttggatgatatttgttttgtatagaagcagattgctgtgctacttaacttttagattatcacacttcacattcataaaatcatagttaagttgttatgtggctgttgggattgagagaagagagttgaggggagctccagcggctgccgcactagcgtacccgcaggtactgttcatggctagggttgtgagggcacgagagggccagacacggggcctttgcccacggctaggcaagagggaaggattttccttcttaatgtttgcttgattagattgatacatctactctccttatatagagaggtttagttaacttacaagcaaggattacttgacccctaagcaaacaactcttatctctaattaatcctaacactaatgggctatggcgccagcctaggcccaatagatcccttaacataagttcacttgtttaactgttgcacatgaaaagtactgtttattgctttgcttgtatgggacatgtatttagaatcttagtaaataagttcagtacttggtgctttgccagccaaatgttttctaatctggctatgaatgctgcttgatcacttcttttgttgtagctaacacttccatctgttatgcttgaaggctcttctgaggaggatcaagaaggtagcggaggagagacagagctccctgaagttgatgtccatggtgtagaccaagagctaaagcaccatctcctgaagaaatacagtggctatctaagctcgctcaagcaagaactgtcaaagaagaagaagaaagggaagctccctaaggaggctcgccagcagctccttagctggtgggatctgcactacaaatggccttacccctcagtacgtcttctttttattcttccatttttaaaattgttggcatcacatgattttgatgcaaagtcttcatgagcttttatagccagcaaaaatccaatgttagtgctgattgcacatggtaattcaaggggaagcatgcataaaacaaatttggcaaatctaagctagatatgggtctttgatgttccatggttgtctgttcccgaatttgcatattagcatataataagtgagtcaaagtatgccagagtctactattgatcagggggtggcaggcgattattggtattattaaccttatttcaggtaattctgaaacttctacggtggtcttgctaaataccattaattttaagcaactaaatttatctgaaaggtaagccttctcccagatacagattaaagagtttccattggtttcacttgggaactacatggctgaacagaaaattatagtgctctgaagtatgtgttggtacttcagcacttgtataagtcaagaccctaatatgctattttcaagttcagggttctaagtgaaacaagcatcaagtcaggagttcacaataaactttttttatatatcttcattttgttggatgttttgtatacgacatagcctgcctttccctattggatatgtattaactcttcacatgggtgagcaggagactcagaaggtggcactggctgagtctaccgggcttgatctgaagcagatcaacaactggttcatcaaccagaggaagcggcactggaagccgtctgaggaaatgcaccacctgatgatggacgggtaccacaccaacactttcttcatggacggccatttcatcaacgatggcgggctctaccggcttggctagccgccagcatcgcttccatttcgcaccacgacctagctaaaggactaatggttctaagtgtcgacagggctagctatctaatgatgtgtgccgcatgcatgagctgtaaggaggccatgcttaactattttgttaccattgctactctatctatgcgcctatgcttccgtgcatgaactatgctttaggtgctgctccacaatgtggtggtgtgctctgcttttgtgtggttgtatgcgtaaccagacagatggatcgctgattactacatgtttgaataatttgcatgatctagctagtttctgccaaatctaaggatactgctcaggtttcctcatttctgtatgcacattttatttccaagatattctagttctagtctcagttggctttgttatatggctttttaccactttttagagcatagaatagcatttgactacgaagatattctagttcagtatctgatcctttcgaacgcaaaaaagtcacatgaatctatgaaaaaaattatttacacaggaaacaggaaaatagctaaactctgtggcgttatcatcgtgttgtcctagtgatgtccttaactttgaattgaatctacaacgcgtttgatcctgactatacaatggtctgtttgatttcccatagatagctggtaggaatgcagataaaaaaaacttaacaagtttagagatcaaaatatgtaaatcaatagtttcaagacaaggatcaaggtatataagtcaaaatggaacctagatgccattacggttgacgctaaaacatgctacgacacgagcacgtcca

SEQ ID NO: 3530 - DNA, 2712 bp, Sorghum bicolor
gcctgaatccaagtatccgtctctgccttgatcaccggtagcagctggcttcatcgtggtggacgcatcttggaagcatcaagcattcctttcctttcagattgtccacgatacaagcgtgaaggagagggtgtcaaggccttgctgctgctggctggtccataatgatcgcagccgtcgccagagggtgtgaattgttggtgcagccggtggaagctgtcggccgagagcttggcagatgtgatgccatacttccttggtgtatggacaacatgctataatatgatcaatggtttcaatcgccttgatcacagaggtagcattgctttgcgtcagaggccatggtgggcacggcggtcaccggtccagtgtctccttctgaatgccaaccataaaaagatcttgacgcgcaacggtgcctaagtcttccagatcaaacgttggactagaaattttgtcgatccagaatggagtaataataatagatagttgagtgtaaaagtttagcaaaagctaaataaaatttcttcaataaaaaagctataaaaatagtactgtactggaatctgaggcggtggtacaccatgaataaggcatagacggagtaaagatacctgaataaggatggaagcgactatcagccaggtgaagtcgtataatcatcaatcaacaaatactgaatttattagctaggctgtttttttgggcagctttcaacgattttgggaatttgggctgggctgttttgggcgtagatgaagatcgggcacaatttgctatagtacagctttcaaaatattttcatccaacggatcaattggctaatgagggaactgtgcaggtgcaaaaggctgggcctcttgggcctaatttggctctccaggcgttcctatctgcggttacaggcggatgggaatttgtagcaggcctaatgctcgtgtgtaattgactgatttatttgccggcccatttcattgagcaaaggtgaagactgagcaatttagtatttgggttcgatcttaaaaaatgagatatgttaagattgaggtgagtcaatttatcatgcaaatatatttttttaataacatacatagggtcatttttctaaatcaactagatgaaattccacttcctacaccatgaataaggcatagaccataaaaaaggtggctttcaataacttggtcaaaaatagctagtgtcataaatattgatactcttctctataaatttagttgaaattgaggacttatgacaaagctaaaatgttactcttttgccggatgaagataataaatggctactccttccattgcaaaataaaacacacatatctcttttcgaggagtcaaagttttttaagtttgattagaaatatagaaaataatatcaacactacatctccaaatgagttcattgcggaagtatattcaatgtttaatctaataatacttattatacattataaatattagtatatttattgtatatatatatatttttatcaaactttaaaaggcttgactcttcagaaagcgagatatttttgggacggagggagtacatttatgatgtgggatggagaagataggtccctgttatgggatggagtagatagattcctatgatatagaggtgatttttttttaaatgagtttatttctgtaatactatagctagatagacagacaaatagatacaatacaatggtcaacagaccttcgtaagaaaaaattaaatatactttaatctaaagatagatagagatagatatgtataacttcagacaaagtctgatcccagtcgacccatagatttattctttgtcaatgacaatccacagatttatggtgttttttagtcatataatatatctccttgtgggacgaagaagccaccggtcagcggtccggcctgcgtctgcacagtataaatagcatcccccgtcctccactttgttgcatcattcacctgttcgtgctacctctgtgtgagggcaaatgagatcggcacttgtagtgagctttgcttgtgcgtggctgctgctgttgcagctcgcaggagcttcgcatgtcgtctacgacgagtttttcgaggccgaggctgcgacagcgaaggtgccaccgtccatcgtcaacccccagctgaggacggggtaccacttccatccccccaagaactggatcaatggtaatgtaaagctactaagtaatcatcaaccagagccaaatttttgaaggcgatatgctgaacatgcatcttctgaaataaagagagggtagtaataggctaaaaaaattgtttaaagggtcaactgagcaaaaacaactttattaattagtactatgcgtcaacaatttattttagtgcaaaaactgtgttcatgtgttagcactagagtcatagggtgtgtttggttgggtctcttgggctggcttttggtttagctgggccaatgtggattgtttggttagctggccagcctacttagccaggctctaggaagccaaaagtgcctccctagccaggtccagattgaatcaccaggttgatgtttcttctggagccaggctacactcggccttctttatgtgtctcctaaccgcccctgctcggctcacgatcccctccctcctccgccaccgccgctctcctccacgcgcgccccctttcccccgccgccgcacacgacacaggcggagtccgagccgg

SEQ ID NO: 3531 - DNA, 7694 bp, Sorghum bicolor
tttttatttcttatgataaaataataggattcatggtcatttagatatagcggatatgcggaactttggggcagcggcaattactccagcagtcctccatcgttataaaacaacttttgtgtgaacagcagtagcagtaaccccaactacagacttcattgttgcatgggcacatatgaacaacattccgagctgcatgcacataagggcattcacttaaacaatttgttaatgtaaacctaatttttacagtacttttaaagatcgattctctatttctcgaattggatatcatggaaataatttgtatttaataaaaaaacaataagtaacttcatccgaatgcgtgcctcgacgcgtgatgtccacttacagtgtgttggaatcatgaaacatcccaggatcaccatcaagagtatgaccgccttgcttccatccattgtaattttcaccatacaaggatcggagtttctctagatcagagattctatatgtttggccaccaaatgtttgctgcaaggttcatatgtactgtaaaagccaatacgacttaagtaagaagtgatgaaagcaaggctagtgataactatcttcccaagttaagtacagattggagtataaatcaatgtctggtagcagaaatggtccactttctagtagcaactaattactacttccaagcttgtggtaaccagaacaaccctatgttcccgtagaccattttgatgacaatatatttttactccggttacgacatccagcgtatttaagaaattagggccagtttggtttgaggtgactaaactttagtcacctggtttagtcattttttagtccctaaaattgccaaacatgagactaaaaggtgactaaagtagtttaatctcaaggggtgactggacctgtttaattagctgaaatgagctatgttggatcgaaacacctcagctactagttcaactaaaatctcaaggtgaactatttagctaataaaaaaatgatccggcacaatttacctaagtaccactacttcttgttctaaattgtaaatcgtattggtttttctagatacaatacttttgctatatatctagagttatagacatagtgtgtatcacaaaagttattacttatctaggaaagctaaaatatcttatcattttgaacaaatagagtagtaactatcagcgaatagctcctctagcaaacacctattagctggttttctttcaactggcagctaacatttagctttgtcgatcaaatagtgcctaaatctagatgatataataaggatagggccgccctctggattcaggaggcaagcacaccgtgcacggttgatttatatttggggaaaagaagacaagaggagtcattgtttagtccataagtggcagaattcgagtatagtttagatacataattcaaacgtatagtttagttaaacgcctcaaaacatatggcgaaaaaagaatagagtaattgtacttttttacttaaaaaatgggcaagggtaagatagctgctgatacgtaaaccctacatatatgagcacctttgatggattaaattggcagatgttgagattcacgaagtcaccatagacgccttgctatcgacaaagacatcacctaccattaaaaagcgtagcactattaaattttaaaataaaaataaaatacaaatatccatatcaaatcgaacacttaaatccgggtagataagttgcaccacttagaaccaaccagctgatctacagaggaacggagcccagagtttgtctgttgcaatcggtatcacacgagtcacaagacttcaaaattcccgtgaaaaaaactttattagtagtgggcttaattgggccatgataatctttattagtagtggcttcggcccatctcagtctcaaccgtcttggccacgatccaacggcggcggacgccttaaacccttctccttcctttggtccgcctcctcccccgccccaccccgcagtcgcagtgccgcaccatcgtcgcccatggctctcctcaagaactccctcgtgctccagggtctctctctctctctctctcgtacttcctccccccctcacatttccttctcggatctctccgccaggctgacctccgggtatttgcggcgcagggcggttgcgccatgcggcggcggcggcgttgttcacggcgcggcgcggcgcggcgacggcgacggaagagtacgcgcgccggaactacgccgataacacctccgagtacaacacggtcatcggctcgctcgtcgcccagcgcaggcaagagaatgttgttcatcggtttgctgcgtcccgcgttgcgcgctagctgttcgacgcattgccaagcggggggacgttttcgtcgatatgccttagtttggtttcggttgcttcgctcatgctgtgctgtgcgtgctagcatgtgtttgctcattcgattgttcgcctgcactttggtagtattatgcagctctaggccagtttacccttttgtgcatgggaattcccaatgctgactcgggtagtctttttgttcggtgtgtcagtgatcctggccacctgagctagactgccatgaatacccctacccccctgaaaaagaagggattgcctcggttactcccaaatggcttaaagcattgtatgcattgtatgcattgtcaaattgtgagaacataggggcctacctgttagcttctcatatttctttcttggttacgcacagatgtccatgcctgtttcaacagcctcctttattctctatatatgctgaggggaaaatatgtggttatgcggttgttttcttaaagttatgttttatattacttttagcaaattacttcatgtcctattgtactgtcatttttcttcatgcctgtgcttatcttgacttgaatttctgtttgagtagagcgacagctccagtttcagaaacctctattttctaaccatgtatactttgcaagtctgacagttacattctcattgtttttaggccctaccttctgcgtgatgcttatgacgacatgatgcttgatggcgtgaagcctgagcgggatacattccacacactcatagtcggtaccatgaaaggcagccggctacaagatgcactctacttccgtgatcagatgaaagaaatgggtttgcagcctgatgttagaccactgacttatttgaattggctccagttattttttaccttcgagagactatcagtctgatgttcttagtgttttccaggttaacctttacaacttcttgatctccacttgtggaaaatgcaagaactcagatgcagcaatcatggttggtttttctgtgtacctaaatgctagctgtgttgtatcattgtggtaccgttttcatgcttgaacaggtttcgtttgttctttatgctcactgatgctcctgtcctttacctgtaacgaagcttttagaagaaatgaaggcacatggtgttaagttgaaaggagaaacctacatttgtctactgaatgcacttgcatcaacagggcagactgatcaagtgtaaggcacacttcttgacagtatttatatgctccaacagatataagaatgcacagttgaaattgaaatattacatcacttgttgcctgccactgccatttatggtggttggccacttttagcacaatgacttgacgtttaccaaacacaaactagcaaaaaagattagcgacattttgtgagttgtacttgttcgctgtgcattttgtttgttagaggttcatccacacaactaacagttagctatcatttgagaatacaagatatgtaggactgatctcatggatttgaaggcctagagtaatccaactttctggtaatttcttgccgataacatcagagttggagtctttagtgtctagggtatggttgccaggtaggactgtcagatgtactatttgtgaacacattagcagttttacacatggagttttgctctagagattacattgcgacttattagagtttttcaagaaatagtttactctcagctgtcaacaccttccggtttacctatttacttgctcacatgaaaaactcttatataacgagaatttgttttgataggtatgccatagttagtgatatgagtgctgctggtcttggattaaacaagttttgttatgctggactgataactgctttcaagaacaagacaccaaccactgaggaaactatggcaaaggtatggtgcacatttgtaagaccgcaaggatgtacttaaccaaatcttaatgttctataacttacttctctttcaagcagattcttgactttgtcgggcagtcgaaaggttggcaatatgttgaaagagcagcaaaggacagtgctgagaatataatgatgaatgtgtcagaggaagagctatacaacctcccaacagcagaatatgtaaatagacgaggaggatttgtctttaaacagcatacagtttatcatgttgctatccatgcttgtgcagaactgcgtagtaaagaggtgatcttttgcttgtgcattagtgcattaccattttccatcatatattttggttgctgcacattggccgtgcacaatcaacataaccctaactttgtaattgtttctaccactagtatactttttttttaaatcaccaaaaggtggtgagtttagcttattctgaaatttctttacttcaaaattttgcagacacttgaagcacttctggaaatgttcaataaggataatagagatggatctacttatgatgcctacatggtgatgcaagctatgaggtaatatgtaatgttgatattttgctattttcttgaagcgctgaaaattaaggtctgatagtttgtgtatttatcattattaactttgttgagatatacatgaactcattttataagcatgccacaatgagattcattattctaaatttataataatgacagaatcattgtatttatagagatgagtgggcatcatacatggccatgtggcccgcggcctgatggcccggcccatagctcggtgatttggctcggcccgaacacgatacggcatggtggccactaggcccgggccggcccggcttgagggaccaggctgtgcctgggccgtcacctaggcacgcgacacgacccgggcacgacccgttccagcggtcggcatggtagcggcccgggtgaacatgaaccgttcgtgtagttatgacttgtatatatgtgttgttaattgttatattggtgaaaataataaataattgatgaaaatggtgaaatgaaaatgagctgttgtcggtttgatgggccgtgggctggcacgacacggcgtgcttgacgggctgacacggtacgaaaaccggcccgcgggctgtgccttgaggtgaaggccaggcacgaagcccgtagaggcatggcctgctaggcatgacggcccgtagcggcccgccgatctgcggcatggcacggcatggcccattggacatctctagtgggcatagcttaagtgactattttcttggcattttgtattctgattctataatccctgtgtctatccttttttgtcttatcatgctttctccattttattctagttattattgatttgatgtcctccaattgaaaaaggtgttacctacggtgtggtgattttgattctgctgttaagatgtttgaagagtatttaagctcgagatccccacccgtggagttgtatgcggtgagtcacacctaattgacaacaaatatgcccatcaaggaattggcagagcttagccggacttgtctactgccaaatactgtgaaaaaaaattaagttagatagtagattaaaagtaccattaacaaacaagaacaaattctgctagccaaaatgaaaccagatgcataaaaccttgggattgttaaagatgacattcctcattgaatggtaaaatgacttttctatggtcataataaaataaccaccttctatcaagtcaaaatcagtccttattttgcatcatgtgctgctgcatatgtttgcctgaagtcttcatctatgaattgcagacacttgctgagggagctatgattgggtacactccgagaggaatgcaacttgctcaagaaactatagtaactttctgttctttgcggtttcagttttgctgtatagttttgactggcttcaaaattttgaaattttacgtcaacaatatttttcaggagaaaatggtttcaagaaatttcttcttgaatgccaggctgggatctgatctcctacttgcagctgccggtgaaacagtaatcaacacaaactccttccctttgactacaatgaatgcatgaattgtttttcgatacatgcttagcattttgaaatgaacataaattgcttcactgagatggttgaatgactgaagttaaattgaccaatttatctagactggtggatatacaactgcaaattatgtctgggatctcctgcaaagccgtaatgtcactccatatcttactgctgttgaggcataccacaaaggtttgatggtaagcttcagtgtttcgaacttgtgacttagtacattttcttcaccttgaaggcatctatgaataattgaatgcttcttaactagagagagttaactatattggtccttgatgtacatattcttcatatgtgtctcaggactgtttgtactttgaaatcatttgtctgcagtcacttgttagcaatttaagctctctggatgtttgtgatttgtattctgctcatgctctcttgtttattcaaattcaggcgcgagagattccttctgatgatccacggcttctcaatgtttcccgcgttttggacaacttgcagctccgatttggaccaagaagaaacactcagtaacataagaacagtgctgttgtccctgatacgatgcaatcagtaatttgtctttgttaggcttctgtatgcaaagacatgtttacagaccagaaaaccaaggaagttcattaggatgacgtaaagcagaaccatcaggcatctgaggggcatggcaggtgtggaattcaaggactcaagggttttctcgagaatttttcacctcccaagcctgaagatctgagccctgagtttttatttgaaattttaatgtgcccatgtttcctacgattgttggacaatcatttatcggagcttttcatgtcatctagacagcgagagtctagttgtgcgcgagtcaagctgcaggccgcaggccgttcgttttgacgctaaaactgtttgaacttctatctattatagtaataatatgagtaactttttttttctcgagcttggatgctatttttctcaagaaaaacgtgatgttcttactgttcaggtcagctgttgaccgagcgaatcattcagcaaaccactcgaccgacaagagctggatgctttagaggcttagagctggatcattcagcaaatcactcgaccgacatgtgctgtctgcctatctgagtccgagctggatgctttagaggcttagagctggccttgtttagttctcaaaatattttgcaaagtttttcacattcttcatcacatcgaatcttgcggcacatgcatatgaaacactaaatatagataaaagaaataactaattacatagttacctgtaatttgcgagacaaatcttttgagcctaattagt

SEQ ID NO: 3532 - DNA, 4630 bp, Sorghum bicolor
gagaaagagaaagctgatggattatgatggttaactgaaggacacggagcaaaggagatttggttggaggatcaaattatataagaaatgtggaagtgtacatgagaaatgtagtaatagagacacgtagtatgctactgaaaaataagccgtggcaaactaatgtagcaggtaagtaagttgagtcggtactggtatgtactcaatccatcccaaattgtaagtcgtttgacttttttaatatcaagtttgatcactcgtcttatttaaagttttgtataaaatatcactttttttatgtgtaatggtttattaataaaagttcttcaagaatgacttaaatttgactatatttgcataattttttttgaataagacgagcggtcaaacttaaggtaaaaaagtcaaacgacttataatttgggatggatggagtatgaattaagacaaccaaattttccgaggaaccaagagtatgtgccgagggcattcagtagacaacctagaggtgaaggtacggagcagcaccttgaaacctcgatcctaagaaggcaacaattcaaagttctgaagtaataaaatttttgcccagaaacaaagatcaattaaagaccagattacacagcatatagttggaattgttttgaagcatcgaagagcacaggttgaggctcaccatttcgtatagaagtaggagatcattgatacatcattgacagaactaactagcaatgccacacagttgtagcctgaaaaaaataaataactttcattgtaggaagaaaaaaaagaatcaagtttggcataagaaagcaaactgaactatttatagagatctcagctcatgaggtgcaggtcgttgctactgttcgttgtaaatggtaattgaaatgttgagaattcttttttgtgctgcacacaacgtggttcaatgcaattgttagggactgtttagattggcaatgaaaattttttaagtgtcacatcgaatgtgtcggaaggatgttgggaggattttttaaaaattaataaaaaaacaaattacatagctcgtcaggaaacttcaagacaaatttattaagcataattaatctatcattagcatatgtggattactgtagcacttaagcctaatcatgaagtaactaggcttaaaagattcgtctcgcgattctcaactaaactgtgtaattagtttatttttttatctacatttaatgttccatgtatgtgttcaaagattcgatgggatggatgaaaaaattttgggtgggaaactaaacagggctagtaaatgtagatggaatatagtcaggtcaggtaggttcgttgctgcacacaacgtggttcaatgcaattaattcgcttgagcttatatttactagttattcaataatatttttttcttataataaataaataaataatatttgtagttatagttttatgaataagtgaataaaatttgtttactgatctaaaattatagctaaaaactactgttgactaggggaaaaaaatactgacttacaagcgaacggcgaaaacaccggaggacgagtggacgacgtttccgaaatcgaggacatccttccttacttttttttttaggctgtatgcatgtttatcagttggaggcaacacgaaagttccggaagcgctgctggtgcgcttcggtggaggcaggccagcaacagtggccggaaactaacgcaaaaaaaaatcaacggtaagggaacagaggtgacgtggccggctgtgcctaagatatggtatacacgtgtttatcggtcggaggcaacacgaaagttccaggagctgctggtgggcttccgtggaggcagggtagcaatggtggctggaaactgacgtaaaaaatcaacgctaacggaacagcggtgacgtggccggctgtgcttgagatatatacgtatacaggaataaagataaaggtaaatttcacgcatctatatatgtatagaataggaaaagctaagagtatttcgtaaagcatagagcatggagtactatagaggatagagcgttattaagtcaaagcccaagctccagtagcgaaggaaaccctgtcaatccaccgtaacccctgcccttccctattccacgtcgcaactcgcgcatcccgtccaaaggcacaaacgcacgacgcacggcggcggcgggcggcgcgcggttccgcggctgcactatatctagctagctagctcatcacgcccaaagaaaaagacacatcaagatccatctttgtatagctactgatagctagttagtttcaggcttgcggctcgtgaatacctcatcttttttagccactttgccaccagcaggccatctcgatcgatcacgaggaacccacggccggcgtcgccattgttgctgtaacttgcaagctttccctttcgcctttttccttccacctccctcgctcgtcctcgtgtgcgagctatatatatatatatatataaaagcgcgccgatggagcagcagcaggtgagggggaggaggaggagaaacggcgtgctgcaggtgcaggacggctcggagatccgttctctcgtggagaacaaggaggcgttcactaggttcgtcgacgaccgattccagaagctcgacgccgatggcgacgggaggctgtcggtgagagagctccagccggccgttgctgacatcggtgccgccatagggctgccggcgagagggtcgtcgccgcaggcggaccacatctacgcggaggtcctaaacgagttcactcaggggaagcaagactcggtgagcaagccggagttccagcgggtgctgtccgacatactccttgggatggcggctgggctgaagagggacccgattgtgatcctgaggataaacggggaggacctgaatgagttcgtcgagagtccgaggtatgagcctgaagccatggccatattttcacaagtgggagtgggagtgggagtggggtctgacaacaacgcaacgccaaagctgcgccagtgcttgttggccgctcttggacagctcacggtcgaccatggcatgccaccagcttctgattcctgggtaattctccacgactacactgtactcaatattttttttaccacgaattagtagttaatgatagatgttattagttactactccatgctctttgggtagggaaacggagatggcacagtagtattctggagagtatggacataggagtatgcagtaactagcgtatatatgatgatgattgggtgctttattggatataggtcatggagaatgttgtggagcctgcgttgcaagagctgtctgctaatcagctcgatcagcctgtttcccaggaagtcttcttccaagaattcaggaaatttctgggcatcatggctctaagactgcaacagcaccctgtgatcgtcgcccatacagagaacacctttgacgggagtggtatcaggaggctactgtcgaacaagttcgaattagacaaggtacgtaattatatgacaagtactacactttagcggttttgccagtttcattttcatgatgatgagtcgtcgctcggttatacacgacatctctgacaaacaacatacatcactgaatttaattgttttatttgtagctgctggattctgtatggagagacgttccgaaagaacacaaagataaaacgtcgaaggagtacctccggattgcgcttgataggattgccgattcagcgagtctgccaccttttggagccgtcgatcaggtacgttgcagagccgttcatgctatctgcaagtagcaccggcacacggcactcaaaagtatatgaagcgtttggaccttctaaaataatcgatatatacacgtggatttccaaaaaaacaaacatacaacaggttgatgctgtggtgaacgaagcattcaagatggcgaaagctgacgaaatgaaggcggtggacgaagcagagttcaagaagctgctgacggagattcttggggccatcatgctgcagttggacggcaacccgatcggtgtctcaaccaacaccgtcgtccatgagcccatgtccacctcctccgcgctgttgtcaccgacgccgctgtctccaatggtgtcctcaccaagtgaataaggaggaaagtcgacaactgacgaaatgatggagacgaagaatctccattgagcaccggcccgtgtgatgctgagttttcttctgtggtcacaggataataataataacatgttagattgctagtaacttgtggattgttcatcttgcatgtaacttgtgtctgttgaaataaggctttcccaagccagacgacgtgcatattactaatggctgatgttcggttctttcttgttaaaaaaaaagatgggcgtgcagcggtctgcttcttccctctgcgattggcaatctatctgcagttctgcactgacccccgccgaggccatgctcggtctgactagcggcactgcaagtagaccacccactgcgttccatctcccttctatgttcctatcctctgagttcaccacaaactcggttctatttcgtggtttggggcaagaggacacttgagctctagatttcatttatttcttattgattgtagtagtagtagtagtagc

SEQ ID NO: 3533 - DNA, 3295 bp, Sorghum bicolor
ctcttccaactaaagcaaggacacattaggtcagtctcagtgaaaacttcatcaaagtttcatttgcatttaacgagctgctatataagtaattttgaagatgtggcaagatttttaagaaaagagaggcgaataccaactctctatgagttatagaattaaagagctatgaaattttagaatgaaactctccattaaaaataattgtttcattcatgatttatttcattgtacatgcctagtttagtttctacaaattttcaacattttccgtcacattgagatatattctcacgttgacattattgaacatgcatgtatgacaattgtgagctactgtactaggatactagccttgtttagatctaaaaactttttagatttaggtactgtagcacttttgtttgtatttgacaattattgttcaacaatggactaactgggctaaaaagtttatctcgtaaattataggtgaactgtacaattagttatatttttttatctatatttaatactctatgtatgtatatcgtaagtgatatgataaaaaaaaattgaaatatttttacattttagatgtaagcctcggaagcttcattgttgcatgtgggtactggccggcgggacagaatggaacttaataagaggccaccatggtgtggccgctgaaaaatcatatatactactctgtttcctaaggcttgcaggtctggttatatttgtcacaaacaaacgaaagtgctacagtatctgttttgcaaaattttttggaactaaacaaggccttaggttttgtttggtttctgctgatttctttagcatctactgcatcaaatgtttcgaaatatatgtatggagtattaaatatatactatttataaaactaaaaacacaactaagaataatttgcaacacaaatcttttaagcctaattagtctatatttgaacactaattgtcaaataaaacgaaagagctgtacctactaaatttcagaacctaatcaaacacccccatagtttatgaaacttttgggatttagctactatatcacttttgtttgtgtttgataattattatttaactataaattaatcagatttaaaagatttttctcgcaaattatagacaaactgtataattaattattttttatttatatttaatgttatgcgtctaaaaattagatgttagctaaaattttaaaaatttttggaaattaaagaagacagctggcccagacctcagtgcgcagacgcgtactagtatccacaccaacccaagagaatcaggacaaaccgcccaagctgcatgctcaagtcacacacgtgcgacacgtccctctccccaaccgattaccactgctcttcgccttgtttagttcaccccaaaactaaaaagttttcaagattttttgtcacatcgaatcttttgacacatacattaaacattaaatatagacgaaaataaaaactaattgcacagtttatctgtaaatcacgagacgaatcttttgatcccaattaatatataattggacaatatttgtcacaaacaaacaaaagaactaccgtagcaaaattcaaaatcttttcgcatctaaggccaactccaacagacgaccacccaccacgcaccaccatatacttaggccttgtttagttcccagaaaattttgcaaaatttttcagattccccgtcacatcaaatctttagatgcatgcatgaagtattaaatatagacgaaaataaaaactaattgcacagtttggccggaattaacgagacgaatcttttgagtctagttagtatatgtttggataatatttatcaaatacaaacgaaagtgacactattcctattttgcaaaattttttggaactaaacaaggccttactcctcatcgacgctagctagcagcaacccggccaccacgaccacatctacttatcgcacaacaagccaacgcaggacaggagagctagcttggccgcgcgagagatggagaagcaggcggcggcacaggcgcaggcgcaggagcaggagcaggagcagtggcagggcgcggtggaggcgactctgccgtcgacgccagcgtccgcggcgtggccgcacatcgccagcttctgcgcgctgcaccggtacctcgcgagcatcgacgtgtgcgagctcgcggaaggggaggacggccggcccgggtgcgtccgctacgtggcctccctggcgccgggcaccaccacgggggagatcggcatctgggcgacggagaagctgctggagatcgaccacgacgcccggcggctcgcgtacgccgtcgtcggcagcagcttggggttcggcagatacgtcgctactatgagcatcgtcgctgctgacgacgaggacgacgcggggtgcaggctggtgtgggcgttcgagtgcgaccccgtgcaggggtggagccgggatgggatgctcgcctacctcgacgccggcgtcaagggcatcgccgcgcggatcgaggaagcccatgccgccgccgccagcgccagtgccggaggagacggcggcgtcgctgcttgacaactccatctgcgggcgggtggaatctcaacagtcgccagatgcatttctatattgaattgttattacgtcgtcaaactaattaatgcattgttaattgctactagcttgcttgtttgtctctccttcattgtctaccggccggatttgtatgtatatgtatgtcgcgtcgcgtcagagtgtcagctgaatgcatgtacgaattaacgtgaaagggactgtgcttgttggctcatgcttgtttttattctggcgatgtccatgtcgatgcatgtgaagtcggatgtgcaaaaggcacaagatatttttatgatgaacatggttgagcaaggtgcaccatgttccaccacgtgtgaggagaggactgagcttatcgtactgcgattggggttagttggggacgacgtcaacgacgactcaacgcaacacactccgtaaatatttatcgtcacggtttccgtggacaattttgattccatttataaaaatatatataatatttttatctctaaataaatttattaaaaaactacattcaaatatctatctaataatattaattatatatcataaataatattatttttattatatatttagtcaaaattatttcttggtaaacgaaaacacatactaattcgacgattgtagtgcggattgagttgtttggctgataagttatgtcagaaagtattgttggctaatttattgtgagagaaaaatactactgaatt

SEQ ID NO: 3534 - DNA, 3331 bp, Sorghum bicolor
ttttatagcattgataaattcatttagttttgttttgtagaatacaatagacttgcaacaccatcttaaccatgggtgagatatttaactatggaggaataaataaattgatgagcagtccctttagggattttgcaggtgaattcgaatgaaaaaagcccaatagttatccttttatagtactgaatatagtcttgctttgcagtggttgaaaatagcgtgacacattggactcgaggactcgaaacacacgctactatccattgcgcttatattttgaaattcagctgcagtccgtgtaggcttttaggttacctaggggctaggaatagtttgcttaccgtcagcttagagcaaggctaatagtacagtcgaccgcaggttataaggtttctttgtagctttctcgtagcctactcatgtagtagttagctcatcactattaatacatggcccacttgtctctctcacaaacttttttggttcttatgcttgagtcggctataagcttacaactcacttctatcctctctcctcttctctctcctctacctcagcaatcagcacttagctagtttatggcctgctactacacttgctcttataggtgccgaagaagaaaatttaaaacaggcttgtctagaacattttataggattatataagcaggcctacaagtttagatgtttgctaaccactagagcttatataatctggattctagctgagataagtcagattctagtataagctgtgggggtaaacgaataggtcctaaaaaattgtgaaaatcttagcttgtcatggctgaaggtttagtaactagatttgatgaatgccacgtgaaccaactttttgttaacaatcttgttctaaaaagaactgtttttatgtttggtgcacctagccgttgtaataatgcatagggaaaaaacatcttttgaagtagagatcctttctagaagaaaattttattctagtctcgcaagagttttgactaatcaatacattattatatttcgaccccagcaagatttgaggagcttacaaaaagcactacttggatcataaggctccatttggtagaaattggtcatcgaattacagaaatggtacttttctggctaactcgatccattgtttgcactttatactccactggcgctctgtgaaaaagaaatattaagagatgtaatactaaacctctaaacgtcttagccactgtctatgtttatttcttgcaataatgtataaaaatggatatttatcttttagagtaaagtttcctaatcacctatcatcctagaacctaacatgagcactattgcaaaggtaaaaggaaaatagctctaataaaaaaatggcattttactttcataagggctggctataaatgagaatctcccggctcccaatagattttaccttcgtgcttgattaaacttcactaagacccgtttgaaactgaacgttttctttttaatttcaaagcgacctttaactgtaatggttcaaactccatacgagtaatcaggataaggctatgactatgagaaattagacatagaccatttcacatcatgaaattggtatgtttcttaatgtggcaattttcttaggttgccatgggctctaaatctgtcagaattggaagctgtaaaggggatgaagatttcttgatgctgtaactttcacagaggagtccagacttgttcgtgacacaagcatcaaaacttagctttaccacacggtgtaaaaaaggctgctgcagcgtacagtgctgcagatcaggaccagcaatgcctgtgttctgtgcaacgttaaaaccaggcggcgatcgagatcttcctgatcaagatttcttccttatatttgccgtatataactccccaaaactctggccttggcaatggtagagatcaaagaacgaaagagcgtgtagccaccaagccaggtagaggcagagctgaagcaacagcatgaacagcaggtgcgtgtccatgaactcaaggaagctcagcggccaccggctgccgtcgtcgtccgaagacgatgttctggagacgacgagagatcagcacgtcggcgactgcggaccggaggctgacggcggcgagacgatggtgcatttcagccacccggagcaccggctggcccggttcgacttcccgtacctgttcatgtgcatggggtgcaaggagtacggcgccgggaagcggttcatgtgccaggcctgcggcttccagctgcacgagttctgcgcgctggcgccgccggcgctgcacgaccacccgttccaccgcaagcacccgcacctgctcttcttcgtgaagccatcgccgggcggcggcggcggcggcggcgggttcctccgccgcaagtgcgacctctgcggcaagtccgtgcgggggttctcgttccggtgcgcgtcgtgcagcttcgacatgcacccgtgctgcgcgtccatggcgcggcggctggagctccccgccgtgcacgagcacccgctgctgctggcacaggacgacggcggcggggagccggagacgagcttcgtgtgccaggtgtgcaggcggacgaagcggtcggggcagcacgtgtaccagtgcctgccgtgtggatactacctccacgccaggtgcgccaaggacatggtgaacgggctctacgtgcacggcgtcgtgccgccggagaagaagaacgcgctggccaccgccgccagggtcaccgtcaacgcgctgttcggggtcatcggcggactcatcgaagggatcggggagggcatcggggaggccttcgtcgagagcattgggagaagcaggagaagctagtttcggatcagcaaattttactaagtttgtgttgtgttgtgtcatcgatctgctctgtatcgctcgtctcgtgcaaagtgaacgtaattacagtaatcatactgtatattatacatagtattatttggtctagcaactcgcatgtttcaaaggactatgcctgcttctcgaatctctacaaaaatgacgtcaaccttaatttctagttctagctcatctaaaagcctaacaggtgggctaattttttagccaagacttcaaccattagttaactagctgaccaatcatagttaatttagactaattttagtctctgttaataactagccctaaccgattaaacaagttctatgccctatttcaaccaaattatgggtagcttttgttacaatctatgcatccctaggatgtacatgttaattggctttttaataatctgtcccgttatgcagattttattttatctgttagttgtataatgatcagctagttctgatgaa

SEQ ID NO: 3535 - DNA, 4944 bp, Sorghum bicolor
aatgatgatgatgatgatgatgatgatgggcagtcccggtcccggccgggccgaggtatgtaattatctcagtgtgccagcttttcaacggactaacggaccaaggagggacggccgcgtcacgcgacggggccgccgccgggcgtacgtacgcttgcccgggcgcgggcgggcggaggccccatgcggccatggccacaccaccacatgcccaacaagcaagcccacgcagcaagcagtacgactatgaccatccatgccatggcccagcagcagccggaaagcgtggggaggacggagaggaagaggagcatggagcaagcagagcacacggatcagggagggcaggcagctgtgcggtgcctgtgcggctgatcctgatcggaccgaggccggtccggctgccccgtgcctctagctcgcgcgcccaccctgcctggcgctggcggcctccgacctgcttgcccgatgcgatgctatatgctaggttgggttcccatgctataggccatgacactgccacagggaccaggcgcaggagtagcccgagtaggcataggactaggagcgaggccgatggatccagtaggcatcggcgcatcattcgccatcactctcatccaaaaaaccaaaacttttttttttcaatattttccatcatatacaattttacagcactacatacagcattaaatataaataaaaaaaaataattattagttacatagtttgcttcagagacaaatctctaattaattaataattaaacaatagttacccaataaaaacaaaattactgccgtctcaacaaattttagcgtgggaactagacgaggccttggagcccagagggcagatccgatccagagacaaggcaggctgctccgtagaggcccttcagagtgtttaccacctctacgagctatactacactctagtgcctactactcctatactatactaccgctctacgactgggacggcgccaggcacaagccgacctctcgctctcgctgcctttctgcaatgccgagtaataccgctctgctgcacctgctcatctccatctccctactgtactactccaaaagagagatcacagcaaagcatctgtgacaatcgtggtctaaaagagatgcatatgtttaatactcaacagtcgttgatttgtatgttcattcgccgttacaaaaattatctaatgtttgatttcatcttcgagtgatgtttatgaactttaattaaaactgttcgtatgactttatcgacggaatctgtgagctattcaacagttttttatgtcacaacaaatcagtgaatattactccatgctgtttatcaaccaactcaccgagcattagtattgacacaaatggaacacgctataaagttcgctgtgctgaccctcgtgtcctcaacctcatccttcttccttcctcctcactgcacaaggccacgctagtccaacatggctagtacatccctattctattccctaccagcgtagagagggagacgcagacgttgcagtagcagtagagccaacgcgacactgcttgtgtgctctaccccctttgcgaggacaagccggagtctcacaagtctcgctatcctggaatcctcctcagcacgacgccagaccgcctgcctgttgtcgtctgcggcgcgccgcccgcccgccgccccggccggccgcttcgggatccccagagcagctctttggcataggggaatgtcccgggtcagccaccgtcgcttctgcagcacagcgaaagcaccgcatttatttgccacctagaaggggcacacctcgcgagagacccagcagcgccaggccagacacagccagcagcactccagcagcaatggctgctgctgctgctcctatatagcgggcgccggggccggggccggggccggtgctcgatccagttctgacttctgacttccttcccgaccgaggaggagtggtgtgctgtccgtttcctgttcgtgtggcgatgaggcccgctggcggttgttgccgccgcggcggcgggctgctggttctcggcctcgcgctctcgctctcggcggcgctgctgctgcgtggctgcgcggggcagcaagccgaggacgacggctcggcggacgccccggcggcggcggcggcggcggcgacggcccccatggaggagaaggagcgccgggccctgtacgccgccatcgagagcttcgtcggcaaggggtggaacggctcagggctctaccccgacccctgcggctggtctcccatccaggtgcgtccctgcctccctgcctgcgctttccctttcgcatcaatctatgctgctgtgctgtttgatttcctggcccgcgtatgttcatcatcatgttcttcagatacacgagagaagcttttctctttgtttgttttttcggctttgccagtcctcgtcacagaccctttctcggtgctcccctgctcccctgctttgagctccaatccaaaaccgtttgcgaaagcaggatcaagtctgtagcgtccatatcgacattggttgcttgtttggggatgcaggactagtcaccaacagtcccttgtcgaatttttccatgttcaaaaccttcctcgtcccacttgcagaatttctggctttcggtagcctctgttcttcacactcgtccctgttcctcactgctgcttcaagattgtggcgctgtttcgttgcttgcaactgcacattcagttcactgttcgacgagacctctgcttgatgcctttacttgaaaatggcatgttcccctcaagattttcacatacagtactctactctctaattttagtagtatcttgttccttttgctcgctgtcatgtttttttttcgcgagaacgaattcattcctgctattatgtttctactccatctccatctggttgttactagtaaagttaagacaggaccgaatttgtaggtggaccattatgaaatgtcaccatcttagatcatcctcatctacatgtcttactgccaatagttaccactcggcgtactgttcatcttgtgttacttgccgtgtctgcaagcgagggacactcagagtgcagcgagcttgtctgcctgttaaaattcaattcaatttctgtggattaaccaactggttctttcttggatgccaaaatccgtgcagggagtgtcatgtgatctcttcaatgggctgtggtacccaacggtgatgagcattggcccagttcttgacaactcgctgcagtgcgcccctgacgccaagttcagcccgcagctgttcgaccttcggcgcctccggacgctgtccttctacagctgcttcccggcgagcaaccccacggccatcccgaccgccggctgggagaagctgtcggggacgctggagacgctggagttccgcacgaacccgggcctcaccggcggcatcccgccctccctcggccgcctggccagcctgcagtcgctggtgctggtggagaacaacctgacggggcccgtccccgccgagctgggcgcgctgtcgaggctgagacggctggtgctgtccgggaacgggctgtcggggccgatcccggcgacactcggtaataacaacgaccgccgccaccgccacgcccacgatgacgagctattgatcgtggacctgagcaggaactctctaaccggctctctgccttcgtcactaggtggcctcacggggctcctgaagatggacctgagcaacaacctgttgcagggcagcatcccgccggagctcgcggggctcaagagcctcacgctgctggacctccgcaacaacagcctcaccggcgggctgccgcagttcgtgcagtgcatggcgtcgctgcaagacctgctgctgtcgaacaacccgcagctgggcggcgcgctgccgcagtcgggttgggagacgctggcagcgaacctggccacgctggacctgtccaacgtcggcctcgtgggcgccataccagcgtcgatggcgaagctgacggggctccggttcctggcgctggaccacaaccgcctgacgggcgccgtgccggccgagctcgaccagctgcccagcatcggcgcgctgtacctgaacggcaacaacctgacggggccgctgcagttctcgccggggttctaccagcggatgggccggcggttcgcgtcgtgggacaaccccgggctgtgctacaacatcgcggccgtggacgcggcgcacgcgccgtcgggcgtggtcgtgtgcaaggacctgcaggagcccagcgtggcgcgggacggggacggggaggaagagggcgggaggaaacccgaggcgagctccagcctcgtggcctcgtcgtcgtccggtgggtttgttggcagtgtcggtgggcactggtacctggtggtggttcagggaatggcggctgcggttcttggattgttgtcccaactactatagcaagcaacaggttgagacacttcgatggaatggaagaacaaggagaaacttggtaggttagcacgaattagtttctgcgtgttgtttttggtagttttttgactggtggctgtgcttctgctatgctcatcgtcagatggggcggaaaaaaaagaagtaaacatgaatctgggtggtggctgtgagccagattgcagtagagtaggagtaactactaggaaatgagttctttgtggactgaaggtgtgtagtggtggatattgtagcttctcttccccgaggggcttttttttttgtgtgtaattaggccatctttagatggtgaaggaaaaaaattctcgacactttagcacttttgtttgtttgtgataattattgtctaactatggactaactagattcaaaagatttaatgtgatagtgaattttgaaaaattttgaattttggagtggaagtaaacaagaccttaacctgtgttgccctgtggtcttgtgttaca

SEQ ID NO: 3536 - DNA, 4586 bp, Sorghum bicolor
atgcttcatgatagatcataaatattgagcatttataattttaagatatttcacctagaataaaaaatttaaaacatacttttgacaggagctgggcccttcctctgtctaaaggacctctataatatgtttgaatatccgacaaaactaatttgaaagcacataggcattattctgtttgttctcctaggctcctcgcatccctgagctaatacgtctgcttattaacctaacagtttgaaattttgaatgcacacgttaccatagaaaaaatgataacattgccaattctcaatagaggaaaaaggatacatataacctatttttgctaataattataacaaagtaaattactcataggcacacaatcatgtgggtaatttgtttagtttacgtggtaacatccttacccctttcccctacttgcattgcacgggtgtcattatagaaaacaaaatacgatatatagtatcatttgattttgcatagtacaaacattataaaaagaaatttccaacaacatatataccccaatatcaccactaggggaaaaacaaagaattctcataacaagagaaaatttggtcctaaatattggcgcacttgagtcaccactgacaccaatagtagttggatggtacatcagtacatgtttctaaattatccatctcttgcattataaaatttaacccaaaatactccttatacaggcttccaaattatctatatctaaaaggttaacataaattatgctaaatgcatctgtctaaaagcggacccacccattttatttcaggaaaacaataaaaaatcccaaagatccacttgtaaattatcacatccaccattatgaaaaactatcccaaagaaaccaaatgccttttattataaactatccaatataccattctaaaagtcttaaaaaatgttgctactatattgcatcattgtataatgctgacggtgaagacaatttatgtggtagtgaaacaaagtcaagtgcatgtaaaaagtttgatgtgttggcttgctgtcatgcttgcagctatgatgttcatgctcacctctgttcttactaaacacaatcaccacaagcaatgtttgcacaatccatgagaaccattttttttgcgtgcttcagaaaaaaggccattttatccgtatggtaggttaaggtgagctgtttttttttgccaaacacttatttccaaaacagcttcatgggtgaagctgtttttccactcctctcacaaagacataagttgggatgaagctggaaaaaagtagcttattgcaccttctccctcatttctctctcaactatgcatgaagtagttggtaaagctattttgccaaacactttctccaaaacagctcagcttcatctaaaaagtcactcatgaagctatttttttaaaaaaacagctttactagtgaagttgagctgtgccaaacaagctctaagtataaccaatatatccatgatagcctcaggccttgtttacttccacccaaaaacccaaaatttttcaagattcctcgtcacatcgaatctttagacatatacatgaagtattaaatatagacgaaaataaaaactaattacacagtttggtcgaaattgacaagacgaatcttttaagcctagttagtccataattggacaataattactacaaacaaacgaaagtgctacagtgtcgcgaaatatttcgcatcgggaactaaacaaggcctcagccacagtatgttatgcttcctgactaaaccatgacaccatgaccgggcaagaaatgccaaagcattattatttattattttattaacttgcaaaaaggcagagggaaaaacagagcatggtggatgcaaagtagtggaagagcatggggccctcgcctttgtccctgaacggccaataccctcctcctctctcccctctccgcagcccagcagcctacaaataccggaccaccccaggcccagctgagcaaccacagcatactgcaacaaagcttgtgttgtgcaccaacagcagcacagccatctactagctccagctccagagccaggactactagccaagagcccaagaccacacaacttccaagacctgaagaccaggtgcctccaaattccgagcttctccttgcggcgcagcagtgtgcatgctctgaccgcttctctgatctgaggtaagaagaagcctgacacgcccgttcacgtctctttgcaacaagcgccagtcatctatctgttgctcacgtctctttacgatcgtgcctcttcacagggagcaaacgcgacgactgccacttcacatctttctccagggcggcgaagatgtcggtggcggtgtgccgtggcccagctgttccggcgttcgaggcgccctgctggctgcgccctgtcgagccgtacaagcagccggcggaggtcgtcgtcgacgaccggcctgcgcaggtggacgtatggaacgccatccaggccgacgtcgacaaggtggcgccgaaggcgtcgtccaagccgtacgtgcacccgctcgtgcgccggtcgtcgagcctgatgagccagaagagcctcgaggtctgcacggagagcctcggcaacgagaccggctctggcgacttcacgtcgtccctggacatggccagcctattcgactcgccgctgccggcgtcggcggcggctgccacaccagtggaggagtccttctggcagcacgacgcggctcgctgctacgaggagcagcagtgggaaagcaaggatctcgcggccgtgaactaccactgctgggccgggaagcggtcaccgcgccgcgcgttcccgccgccgctgccgtccatgtcgcgcaccgacgggccgtgtctgcagatgcgcgcgcgccgccaggacgggcgcctcgtggtcgaggccgtggcggtgaggccgcgcgggtacctccacgcgaagcgccagggcggacgcctccgcctctccttcgtcgagtgctctgctcgcgaccagagcgcggcgagcaagatcaccgaggccgcagcagaggcgccgtacttccgcaccgtggagcccaggaacgtgcaggaagaagaggcggccgtggaaatggaggacgacaacgaggtgatggaggaggaggaggtggaggtggtggacaggggcaccgtcgtcgaggtcaaggtgagcacgcagccgcagacgcacaccgcggccaaggtgcaccgctcgacgctcgtgatcaacaagttcgtcggcagtacgccgctgtcagttgaccaaccccggtgcgacgccgacacgaacacgacactgcccgaggcggacacctgcaacgagacggcggcacaggcacaggcacagtcaccacgcccgaccctgcggcgggtgccgtcgtccacgacgacgctggcggccgcggtcgccgtggcctcgacggggaccgacgacgtcccgccggctccggaggaggacgacgacgagtgcggcgggctgcaccttcccggcgcctccgccggcgccgcggccgagaccaagcagctgctgctgtcgttcacgtcgcggaggggggacaagcaggacctgctgcagagcgtgcggcggtgccggcagctgcggcagaagaagctcttcatcctggagccctactgcattgccacctcctgaacaaaaaaccatccgtcacattcagagccacactacacagctcgcgatgaatgcgacagttcgttcggtcgcgtcgccattggtagccttaaattaatcactagcaaatcaagcacgcacggtcctgattagccgattataataacccttgtcagtcgtccgtcgtcgtcacacacagtggctgctgcatgctgggcattattaccattttttttttgcgacacatctttcccatgtgttgcttggtgtttcgctttttgactgcgctgcgcgtgcatcggctagcagtcgccgtttggtcccttgcagtgcagtggcctcgtgcgtgcgtgcgtgcgtgctgtagttgttgttgctctagtagtttgtctcccctgtatttgtagtgtgatttgagtaagtaatttttcaatcaattaacagatttgctgtcgtgaatctacaatctaatcgactactgtatttggattggatgaggcgtccatcagagagattgccaatttctactggtttccacagaatctttgtagacttctggtgatgatgggttcctgcattacgcctactctactactcgtgtcgtgtgttatatcctggagaagattttggagacgacgtacgtgcgtaccgaacaattgtcgaaatgggaaaaaagatggagataaaaaggcagtactactatatatacagtataccgtgtcttgctgctttgggtaaccctagatctatcatggagagtggataatacgtgacgttgctatattaatcatcataccaaaacgcacgtacgcaccgtgctttctttggggagataaatggaagccatcatgcatgtagcaacactctagacggagcgagcaagcgaccaatttcttacacgagcggcaatattttctctctcttgcatacacacacataaagaaaaaatc

SEQ ID NO: 3537 - DNA, 3653 bp, Sorghum bicolor
ctgggcggccggtcatgctggtatcctcatgttttggatgccttgatgatggaggcattggcctgccatgatggcatgctgctagcgaaggatagagcggtaatgaagctgatagtggaaacggatagccaagagctggttagcttgtgggctcgaagccacaatcaaagatcatgcttaggccttgttttaatctgatgtatgctagtcgtttgtgtaagtagctcataaggtagctcagcaggctacagatgattacatattactccctccgtcccaaattataaattattttctaaaaatcttggagagttaaagtttttcaagtttgaccaaatttatatagcaaaataataacatttttggtatcaaccaagtatcattagattctttgttagttatattttcataatgtacctattttatgacataaatctttatattttctctctatatttttggtcaaacttgaaaatgctttaactctccaagattcttagaatgacttataatttggaacggagggagtagatgagtggcatgttgtcccaacgtgtattataaatctgttggctgaggccggttcaccccaaagtctaaaaacttttcaagatttctcgttacatcgaatcttacggcacatgtgtaaaatattaaatataaataaaaaataactaattatatagtttatttgtaatttacgagataaatcttttgagtttagttagtctatgtttgtacaataattatcaaataaggccctgtttagattgctgatgaaaattttttgggtgtcacatcggatgtgtcggaaggatgtcgggaggggtttttaaaaactaataaaaaaacaaattacatagctcgtcaggaaactgtaagacaaatctattaagcataattaatctgtcattagcacatgtgggttactgtagcacttaaggctaatcatggagtaactagacttaaaagattcgtctcgtgattttcaaccaaactgtgtaattagtttattttttatgtaaatttaatgtttcatacatgtgttcaaagattcgatgggatagatgaaaaaattttggatggcaaactaaacagggtctaaaaatgaaagtgccatggtacctaaaatactttttactttctcagctagccctccaggaataggagattgttggtgaacatgaacacggcgtggcaaggaagccgcaagggagcatgagcaagatctgctgcatctgccattgcctgagctcgctggaggtcgctggcccctttgccatcacgccacgcctcacgctgaccgaccaagtgaccactactccgtcgagaccgtccctttctttctccctgttccgaaggccagtcctccgttgcgcagcgggcagcgcgtttgtgcgcaccagcaccactggcaggcttggccctcccagccccccagcccacgcgcgcaggcgcagcgcgcaggtgccagcgtgccagcctgcttgcctgcctgccccgagcgcctgcgcagctgctcccgctgctgcccctgctgtctcctgtctgctgctgatgccggccgctgcactgtctgcaggacgctgcagctgtgcagcgcagcgcacgcagattctgcagcgcgcactctgctctgcgcctgacctgaacactgaccgaagtgacccatcctctgcgccgactgcaccacccacaccacctcctcaggcctcagctcatcagagctcagagcacagtcccagccaaatcgcacgcctgccgcctgtgcctgacaccgccattgcatgatggcggatgatgatactagcacgtcttcccgttcccagagccctgcctgacaccagcacaaacctggagactactagtattggagtgccctccatttcatttccattcatttccctagcaaaggaaaaaagaagcgaagctgctcgtcgtcggcgccgtcgtcctctgtgtctcgtccttgcgggggcaaagcgggctcgaggccggagatgatgctgagcgggcacggcggcgggaggcgcctgttcacggcgtcgcagtggcaggagcttgagcaccaggcgctcatcttcaagtacatggcctccggcgcgcccgtgccgcacgacctcgtcctgccgctccgcctcgccaccggcgtcgacaccgcgccttccctcgccttcccgcctcagccttcgccgtcgcgtacgccgccctcgtccatgcgcgctcctctcctcctcctcctcctcgagttgtcgcctcatgttttactctgatcgtggctactacagtagtcgtcatcgctcgctgatgagtttatttgtacgtgcccgtgcagtggcgtactggggctgctacggcgccggggcgccgttcggccgcaaggcggaggacccggagccggggcggtgccggcggacggacggcaagaagtggcggtgctccagggaggcccacggcgagtccaagtactgcgagaagcacatccaccgcgggaagagccgttcaagaaagcctgtggaagtgacctcccccgccgccgcggcgtaccgcccgtccgcgctctccatctcgccgcctcgcgcggccgacgcgccgccgccgagcctagcccacccgcaccagcatctccgccacggcgccgcctccgcagcagctgctgcccgcggcgccccgggtcaggccaccgctggcgcgctccagctccacctcgacgcgagcctgcacgcggcgtcgccgccgccgtcctaccacaggtatgctcactcccacgctcactacacaccgccgccatcgctcttcccgggcggcggcggtggctacgactacgggcaatccaaggagcttcgggaagcggagctcaggcggcggcacttccacgcgctcggggccgacctgagcctcgacaagccgctggccgccaccgccgccggctccgcggccgcggagaagccactgcggcgtttcttcgacgagtggccgcgggagagcggcgacacgaggccgtcgtcgtgggcgggggcggaggacgcgacgcagctctccatctccatccccgcggcctcgccctccgacctcgctgcctccgctgccgcgcgataccacaacggtgagccgtccggcgagcgaaagactccacttttactggttccttagttgtgtgctaagtacaatcagtttgctgattggtgttgccgcttgatttctttcgtttcacgcaggggagtgatcggtgcatttcctagctgcaagccggcaacggcgagcagtgatgggtgcaagagatgattggtgttgcctttggggggcgacggcacaaagcctgaacatcgagtgaagcagtactaggacctatgatttgagcttcctttgttcctttgcagctgtactacgttacgtaccaaatgttttagctcgttttgtatgacattttcgttcaggttgctcctattgctacgctacctctgtggctttgtgtgctttcagtctgtgatgcaaacctttgcggtgaaattttttgcaaaatattaatatagcaatttcgtttatatttgataattattgtctaaatatgaactaactaagcttaaaaaatttgtatatcaaattataagtaaattgtcaaattagttatttgttttatctatatttaatac

SEQ ID NO: 3538 - DNA, 4570 bp, Sorghum bicolor
gagaaaaaatgctgaaactgggaaagacaaaaaaatggaggaaaaactgcagaaactgaaagacaaaaaaaaagtcaaaaatggaaaaaaaaataatattaaaaaaaggtgggaaaaatggaaatgaaaaaaaggtgaaaaaactggagatgcggggtatcgatccccgtacctctcgcatgctaagcgagcgctctaccatctgagctacatccccatgtgtgacaacaagtttaagcagtcacaaattattctatagttatttgcactcatctccggctggcacatagagatgggcaaaaggccaatatccaaaccccggaccccaagcattgatgctaacatcgcaccaccatactatccaatgtaaatctgagtacacacatattttggccctgtttagattgaagatgaaaaatttttgggtgtcatatcggatgtcgaagggatttttagaaactaataaaaaaccaaattacatagctcgtctagaaactacaagacaaatctactaagcataactaatctgtcattagcacatgtgggttactgtagcacttaagactaatcatggactaactaggcttaaaagattcatctcgtaattttcaaccaaactgtgtaattagtttatctttttatctacatttaatgtttcatgtatgtgtccaaagattcgatgtaatggatgaaaaaaaatttgggtgggaaaccaaacagagcctaaatatggaacattgtcttctaatatgggaaactgatcatggttgcatgcaaataataactgcgaaatccaaaaggtattctccgaaaaaaaagatatataggagatgagggtacatgcttattttactaacgttcttaatttgtctcaaaattttaaaaacttgtttattatgaaatgaagagagtatatataggagaatactactgcagcagattacctgaaacttgtctggtgtcctatgtttctttaggatagggagagttgggtgtctcctttatttaggacagatgatactttttttaagagttctcttaaaacgatagggccttgtttagttcctacaaaaaaaatcaaatttttttcatgattctcgtcacatcaaatcttatgccatatatatggagcattaaatatatataaaaataaaaactaattgcacaatttatctgtaaatcgtgtgacgaattttttaaccctagttattccattattgaacaatatttatcaaatgaaaaacgaaaatattttagtgtcaaaattcaaaaaaaattcacaattaacttttttttcttcctcccgcgcccgcctaagcccggcccgcgttagaggggaagattagcaaagcggaaaaagacagagggagggggagctgcatcttattctcttcgcgttcaggatcggagaagcattcggggccctaggtatagaagaggagataggagatcttctacctctcttttatctcataaaacactattttttattattagatatataagagaacggacaaaaatctgatgaagatgctcttagtaaattactgtacatcgtatcctgggaaacaccggtctgttcggtcattcaaccgctggcaatacacatgctttacatgcagcagcagcagcagcccaacaacggctgtaacaagctgaacaaatcgaaggccacatgtttccaggagcaactcctccggtgcaatgtagggctagggctatattgcatcgagattgagggaaagcggacgggtggacgatatcgatccagtaggtgttgtacgggagacacagcgtccaccgctgtgtccgctcgctctcggcctcgttgctctccacgtctcggctgccggcaggtacgtgtcgccgtgcggagcttgctctatccatgcagcagacgatccgatcctgctcgcgctcctcactgtcactggtgataacagagaggcgtcctccattgctgcgcacatccattaaaagttaagaaggcacggggccgggagcgactagcgaggctcgtcgtcttcattcgtagttcttccatcccctgtgcgcaactgagagcaagcaggcgaagatcgagggcgtcgtcgtcatggatctggtgaacggcgtgctcaactgggtggggacgccggccatggtggcctgcctgctgctcttctacccgccctactacctcttcaagacctgctactccttcctctcctggctcttccccgaggacctcgccggcaaggtcgtgctcatcaccggcgcttcctccggcatcggcgaggtgacacccactactgtctgtcttctactactattatgcaaggccacacaacgtggacctctgttctttaccagctcagttttgaatgtggacattggctatactactatttgctagctagtacttatgtgtaatttatttgatcttctttgtaaccttttttgtttcgtgatctttgttgtaaacactttactgttttaataaaagcacagtaggggctggcaccctcctgttcacatcttatttactgtttaattgtccattgctctttgaatcaccacgggattacgaagtactatgatgatgttcaggtggcctctgttttgaccactagatactagctagattcatctcatttgcgatgtcttctgcagcaactggcttaccagtacgctctgaaacgggcctccctcgccctcgtcgcaagaagggagtcgagcctccgacatgtcgccgaccgagcactcgagctcggcgcgcgcgacgtcatcgtcctcccgggcgacgtctctgcccccgatgactgcaacagatttgttcagaccgcgatcagtcactacgaccgatgtgagtgcatcagactcctgatcattttacagcttggcttgtgaaagctagctctgtcgttgcattgcaagcttttcctttgtctgtttcagtggaccatctcgtgtgcaatgccggcatcgcgagcgtcggcgcgtttcaggagattccagatgtcacaaaatacagctctcagcttgtaatgtttcctaaatccctggaaagccttgtttgtttgcttttcatttcctagatatatacatgtgcatgcaagttctgatctactgaagttcttcaggatgtcaatttctggggttctgttcaaacgacgttcgctgccctgcctcatctgaagagaagccgaggaaggattgtggtgactgcatctgcaaccggatggaacccagttcctagaatgagcttctataatgtagggcatttctttaacctgctcggccgatttcatttcagcatgttggaatgacctggaaatgctatcagtttcatttcatgtgtatttagttatctactacatgttcaggctgccaatgctgccctcataaacttcttcgagacgctgcggactgagctaggaaaccaagttgggatcacggtggtgacgcccgggtggatcgagtccgagatgtcgaaagggaagtacctcaaggagcatggcgaagtggaggttgatcaagaaatgcgcgacgtgagtgacaacactgatactgatcatcagctgatgagctgtgcgattgtgttggaaggaactaataacacattgattgacatgctgatgacgaacatggctgtgcctatgcgtgtttcaggctcagatcggtctgttcccggtggagtacgccaagaactgcgccaaggccatggtgcaggcggcgcagcaaggcgagcgatacctcaccgtgccggcgtggttcaggccgatgtacctgtggcgggtgttcgcgccggaggtcgtcgaggcctgctaccgcctcctgtacatgcacggccatggcgccaggcaggccgacacggcgagcaggacgatggcggactccggtggtaagcagctgctgtacccgacctcgctgcgctctgaggagatcaagagtgactgaggtcaggtcatgtgcctgatatgcagttgaaacttgaatggtcccatggaacgagtggagtatagaaactgtagacgagaacgaacatttgtggttatgtcaatatgctgtgtaccttggtaatgaataaataagctatgcttctggtggtgctctctttttctgctcttggtgagcgaagtttgcatcagatttggtgtgctccgtgcctcctttgcattggctgggtttggtaccaacagcctggatgccgctacttattagagcactcacaatgcaagactctatcacagagtccaagacaattaattacatgttatttatggtattttgctgatgttgcagcatatttattgaagaaagaggtagaaaaaataagactccaagtcttatttagactccaagtccacattgttcgaggtaataaataactttagactctataatagagtctgcattgtgagtgcccttagaggtgttcatgactttgtcaaggtaccagagctttctcgggggtaaatggcgattgacgaaaattgtaacttctaactaagtttttttcaatttaggaggcttgaagaggtaaagttatagcggtttagaataacaaatttttatgtttcaaaaaaaa

SEQ ID NO: 3539 - DNA, 5009 bp, Sorghum bicolor
ccgccgtccagcacactctctcatgtttttattcaaaatagtcctcgaattttactgaaataaaatatcagtctgtactcgcacactctctcagcttactgggcctaagtgggccgaatacggccctatgctatttttatttttcaattaatttctaatattttcttttcaaaatagagatatccaaaaattcgtaaaaaaaatatagaaaatcataaaaaaacaaactaattttgttgagtttcttatgactagatctatgcatttcacttaaaatatcatatggtttagtgcattttatttgatagatatatacatctataattttatgtcagtgattaattttttcctcatatcgcatatgaactaaaaataactctccaaaattaactctaaataaatttatacccttttcataatctctgctttctaattctccccaccttaactctaaatcaataaatacattttttcataatatttgtttcctaatcttttaattttatactgacttgtaatacaaaataatccaaaacaaataatcactgatatacatataagaagccaaatacttcactatatatatgacattccgtgcactcacatatatgagaacatcgtgtcaccatgtaaacaaacaaaataaatacacttaaaatatacgccatacaaagaaaaaaagaaaaacacatagacacatgtacgacgcatagctaaccactgcccataaagcggcaacgccgcgcacatttctagtacaaccgcaacagcgtttgctggtggcattttttctttaaacaacaacaacaacaatattccctagcacacagactcacaccacatataataaaaaattatattctattaaagaagacgatgagagaaagggtgagatagataaaatattttttttagagcaagaggtagagaacatttttgggacgagataggtaaaactcttttttttagagcagcaaggtgacctcgctcctttgattttaaagactggggaaaaagaccatttttttaagacaagcgatattgaaatatatttttttagagcaagagatagagaacccttttttaggacaagagatagagagatgttttctttttcacagcaagagatagagaaaaacatttgaataggacattcggccgcccggcacacactgacggtctgagggcttcagataaaataaaccttttatcaagaaatataaaatataaaacttcaatttctgcagcaggccatccatcatgcagctacaactctatctacgacatctatctaaaaaaaagaaaagctttttttttgacaaagacaaaaaagaaaagcttaaggatgggtcttccggtcgccgtcgatcaggctgctatcgccggtcgccgtctcccggacggaataatatcaatcaaaatgctgtggctccaacacgagggcgtatacgtggatacgatacgcagcagtcgcccactgtttcgtgtgtcacagagatacgtactagatcgagacagatatcgtgaccgacgacatgttctaatcactgcatttcgcatcgatccagaagatttttgcagccaaagcccacagcagtatccactttccaacggatgccaagtgacaaagtgaaatcatcagccgccgacgacgacgactctgtgagcgcgagcgcgaccacaggtcaccggtgcctgcgctcgatcctgggtggttgtgggccttgtggcgccgcggcgagtgactgcgcgcagcgcgcgtgagagccaaaaatctcgcctggcctgcactgtcgcttcccctgcgtgttgctggtcgtcgcaacggatagataagcatgacaccgcaggccacgcagtgcgcgtggactcttctgccgagcggcctgcaactgcaatagagatgccgtctgcgtgtgcgtctgcgtcggcatcggcgccggcgtcaccccagcgctataaatccgtcacctcgccccacccacccgccgtgccgtgcagtgcagtgctctcaagtctcatctgtgtacacagtctctgtctgtcagtcagtagttgagtgagtgagtgaggcagcggcgaggaggatggggaagggagcgcaagggagcgacgcggcggtggcggcggcggcggcggctggggctggcgaggtggaggagaacatggcggcgtggctggtggccaagaacaccctcaagatcatgcccttccagctcccgccccttggtacgtaacgtgcctccatgtcatggttctttgattctcgctgtcgctgcttattattgtttgctctgttcaaggaaggaatgatttcgcttgttactatttgctctgctctaggaatcagagaaatcgataggttttttattattattgttatcaaatcgatccataatctgcagtagtatgtaggaatctggacagccctggcaaagtttccatcttttttacattatcttatcgtgtttgcaagtgctaaaacgagggtggggtgggtatacagatgtagtagtcaggaatcgaagatttggatcagcctcggcgttttcttcccccttttgggatggaattagggcatgttcttcttctttttttaaggaaatggtatgttcttctttacattaaacaaaatctagggtcaaaaggaggggggtatttattccacaactagttacagtatcatcaaggctgcatcacatctacaagtaacatcagtgcatctttgttccaatattccacctactccagtacaaggccactcactgattcagtagattaaccagaacaacagaattgacagtaacttcaaagtttggatccctgtgcatcagcaacatagaatctgtcttttcactatttcctgtttttttttacacgaaagaattggatttacaacggtctacgcaacattacaaatgagcattcgaggtatgtcaccatgaacttgggtactgggaatatggatgctgccgccttcaggtagtctatggtttcatcgctttcgaacatctgcactacggtgtcaggacttgctgtggatgtgggagcgctagtagtcgaatatgacttgatgtagatcggttgcataccatgtgtccatgtaaagaaattgtttctgtcgaggactttaggtcggaatgttgggcgtttttgtttttgaggacgggggtaaactaaatatgctcccccttattgcttattaccactgacagtgaattttgggtggcattttcaggccctcatgatgtccgcgtgcgcatgaaggcagtggggatttgcggcagcgatgtgcactacctcagggtacagtgcgcgatcccatcgatctccttgttttttttcacatcccatccccattgagagtactcaattcgcatgtatctatccacaacgcaggagatgcgcatcgcgcacttcgtggtgaaggagccgatggtgatcggacacgagtgcgcgggcgtgatcgaggaggtgggcgccggcgtgacgcacctcaccgtgggtgaccgcgtggcgctggagcccggggtgagctgctggcgctgccgccactgcaagggcgggcggtacaacctgtgcccggacatgaagttcttcgccacgccgccgttccacggctcgctggcgaaccaggtggtgcaccctggcgacctgtgcttcaagctccccgacggcgtttccctggaggaaggcgccatgtgcgagccgctgagcgtgggcgtgcacgcgtgccgccgcgccggtgtcgggccggagacgggcgtcctcgtcgtgggcgccggacccatcgggctcgtcaccctgctggcggcgcgcgcgttcggcgcgccgaaagtggtgatcgtggacgtggacgaccaccgcctgtccgtcgccacgtccctcggcgccgacgcgacggtcaaggtgtcgacccgcgccgaggacctggagtcggaggtggagcggatccaggcggcgatggggtcggagatcgacgtgagcctggactgcgccgggttcagcaagaccatgtcgacggcgctggaggcgacgcgccccggcgggaaggtgtgcctcgtcgggatggggcacaacgagatgacgctgccgatgacgtcggcggcggcgcgggaggtggacgtggtgggcgtgttcaggtacaaggacacctggccgctctgcatcgacttcctgcgcaccgggaaagtggacgtcaagccgctcatcacccaccgcttcggcttctcgcagcgcgacgtcgaggaggccttcgaggtcagcgcccgcggccgcgacgccatcaaggtcatgttcaacctctaggcggctggctagagctagaccaccgccgccgcctcgatctctcggtccagccggccggctagccgccggcgcgtgagttgtgaccctgcccggctgccccccccccccccacccaggccccagccctggaataaaatgacgagaaaagaaaaactttatggttcaatgaatgaatgcatgggcagtttgccgtggtttaagaataaataacttcaactttgtgtgttctttcgtgtcgactgtcgtgccatttgtcttgatcgatttgagtttttttttttttttttgaactctcctgtttcggtggaaagtcggtctggaagtctgggcagcccacaggatggccggcggtttctgctagccgcgccgcgggctcgcgggcctattttagagcgggtcgcgccgcgggcctttttcttccggcccacaggaaagtacgtacgcggtccgaatccgaagttgacgtgcccatgtatgggcgacggaagacgacaaggatcgccttttcaggatcccataccggcataccgccttcgccgcgtcgcgccgagtttttgtttccctcggcgcatgacttcgggcttaaggtacctttcccgacggttgcatcgggagcaaggcactgggacgtgggcaagggaaacaaaagacccgacgccgtcctctgctctgccgccgccgaggcagaggaagccatcagc

SEQ ID NO: 3540 - DNA, 8454 bp, Sorghum bicolor
cacacgatacatactgcatttatgctttgtgatttttattcgatcataatagatttgctagttactctaaacgaggaaacatgatttatgtgctttgctatggacggaagccatgcatgtgtctacattttatatttaacccctcgaacatcaactagttagcacttaataaggagggtcatctcatttatcatttatcaagcaacctctgctctagcactttctggagtatgaaggtacacaaggattaaaaatttagtgaaaaaattagtacatacaaataatcattgattatctttaatctctttgtatttggttaacttattaatcaaggcgggcacgttaattaaggcaaccgcctccgttaatcgtattaaccaagccggttcctttacagcgcccgtctcggttattccattaaccgagacggttggtcaacggcctcggttaaggccacgattaactgtgacttttgctccgagacggttgacttgcctgccacggttaagctattttgcccgtcatagttaaaaatattgtagtagtgttcatttctaacataataccttttatatgctctataatttctaaatttctatacgtttgtgataaatataccaactactttatatctattttcatcattgcattgcacttactatatgggttcttaatatatcatattaagaacccatatagcttgaatctttacttaagttatatcatatcttgttacattccatgactcatgaattgatattttgacttccaaattttgatattattagtagtcgtgtcaagttcaaaatctaatattttttatactttattaacattttcatttgtgtgtcgttaaataacaaattcttggtcctagattacacacttagttctacaatggcacaaacaatcatttcttcatgcataccgcgttcaagacgttgaatttcttcatcaattttctgagacaacactttttcctatctagggttctattctattcaaataagctctgtgtacgtgcatatccattggataggctcaatcaaaaatatactatatatgacatcaatgcctcaattatcttgtaaacgctatttgtgcaacaatgagagtttggacaaattatcttgtaaacgctagctatttgtgcaagatatatatatatatataatatatatatatatatatatatatatatatatatatatgattttattagtaaaatcattgtactatatatgacgtaaatgcctcaatttttcggaaccgccccctgattgattacgatgctttgtacacgtagtacgttgaaggcttgaagctcccgtacgttcgttcgagcagcaggctcttgcatgcggtttgtgcggcgtacgcgtagtatgtacgtgattgtgtcactccatccatccccattccccggccaggacatatatcactctcatctgctactgcttggacgaacgcacgcagacgcagtggacggaccatgcacaaaaagacctacggttgtgcgttttctctagcgcgacgagacgacgccaacagatgagccagccagccacacccgatccggggcggcgcctcgcactgcatggccgaaactgtagtggaatcgctaggtgcaccccggggataaaaggattcgcacagcctggcgaagctagaccgcacgatctggaggcagcggcggcagatggataaggaggcactcctgctgactgctgtagcatcctttgccttgcctgcggccttccctgtgggccagcgcagacgggccggcgcagccctagtagtaatttaattaattaattgtgccctggtaggatggcggaccgagtggccgcatccgcctccgccccgcgcgggctcgcatcgcatcgcgtagcgtagcgtagctagcgtggcccgcgcgggccgggccgggctgggccggcgggggtcgtcgcgcgccacgccacggcctttaaatgcctctccatctcccccgctccacacccacacctcacctcaactcacctcacgacgtctcctcactccacgcgggaagaggcagcgcacctcgctctcctcctcccctacacacccacacccacacccacacccgctcgccctttccattttcgtctacctgtctcccgagacccctgcgccttcttccaaagctctgatctcctgttcgtccttcgaattcgacaatctatctctcttctctcgcgcggtcgtcggcggtcgaccggctccgtccatcgatcctagctgcctgccagggcgatcgtcgtctagctcggtggtggtggtggttgcaccgacgaccggggtcgtcgtcccgtacgtgtgctcgcgtccgccatggctcgcggcgacggcgagctggagctgtcggtgggggtccgcggcgccggcggcggggccgcggcggcggaccacgtggcgccgatcagcctcggcaggctcatcctcgccggcatggtcgccggcggcgtgcagtacggctgggcgctgcagctctccctcctgacgccctacgtgcaggtatagacgtctacctacatattttcttcatcgccaccagcatcatgcgcgcatgcgtgtgcatgtacgtgatcatatataaataaatataattcatacatactatatgtcgcgtccgcgtacgtacgtgcgtatgcggcggattttacgtacctgaacaccgcgcgcccgcgtattttacgtacgtatatacgtacagttctgcttgcgaatgaatattacacatatactatacagtaccgcgacgatcatgatatgcatgtttgcaaccattttattgaacctaatatggtcccatacatatgtaatcgagtactagtttgaatttgaaaaaggtatatatattagcttttcgatgacccgtaatgtaatggatgttttcatgttgtctttgtctcgtcaaactcacgggcgaaaaagtagagagtagtacgttcgccgagaataagaatcgtcagcacgtacatgtgtggccaaacttgccgctgatagctacacgtacacttttgtttctacttgatgtgggtggttttgtttagattatgttggaagctatcgatcgatcatgcatcgcgtgcgtacgtgttcggatgcacgtaccgtgatgcatctttcacaagtgatagatcgatcatgcatctccttggccacaaactaataattgtcctctgccaaaaactaacctaaaatcctgctccccttatttcctgctcctccacccaatatatatgtttgcctatttttcctctacaccagttgttactgccaccacgtagagctagtctgaacctcgagacgtccaacttcatctctctttttattttcatacaaaagtcaaacctttcaaaacatttctgtgcacggcttgtgtgtgacaaagtactactagctaggagtactgctactaggagtattgctctgacgtgccatatggtattgtacttcatctgacacctacgtatgtgccagtagctagctactccttcagtccctaatagcatgcatgaccgaagcagaatagcagatagccttcccgaaaagacgcaggaaggaaggaaggaaggaaggaagacggtgcctgcctgcatgatggtcggtcggtgtaccgtgtccctctgctgcactgcagagcactcctacgtccctctcgtcagccagacgtttcagaagcatatatacagcccgtccggcggccggataaggaaacctgtccatagccgaccattgtcccgccgtccaaagctccaaaacaaagaccacacgtcatgtatgggtcctccctaactaactgcaaccttccatactttccttgttaacataaaaactctagtgatctgtccatcatcatatcggatttgaactgtttcattcagggccaagaacacaattatttccaacaagaaaaaagaaaaggatgttctagaaagtccaacacaatttcatcatttcacacacacccttttctttagccatgcatgcgaacaaccgaaaggtggatggagttaagttatgctacacttcagtccgccgatgcatacaaatttagatgctaatctcttagcggataaataaaatatctatgccttctgtatatatccatgctttccatatggcaaacaaaatttaagtgttgttctagagcttccgttgattgtccgatcgataacaaattgcttattgagcgtccacacagagaaaaggaatactttcattattgtccgaacagaatatttatatcagtgccgactcggcgagcaactttggataaagtttatgctgcctgccgtagcccatagcccatagcgcatataggcttgttgagccaagtgccatggagccggttggtgcatgtgcaggcgtatctgacaggtttgatctggcacgttgcctaccttcaccctccaacctgaatggcctgattaaaagagaggaatctgctttagtttcaggccagatatattccctttcccctctgtttttttatttagatatgcccggtctcaagtacctcaacaagtcagcatgcacaagtgcacatgcacagtctaattaataaaatagtgtttttatctaaaaaaaaaactgaaccgtggaagaaatagagtttcagaactactactggcagatttctctgaataaacagttacaagtactactagttttcctttgcagtgctagactagacagactgaattagttttcgtgaaatttattaacggtaaatatatgaacagttgatgtctgatcagtgatcactgatgtctgaattttacctatatctttgcagactctggggctttcacatgccctcacttcattcatgtggctatgcggtcctattgctggcttagtggtgagcacgggaaccaatcgattctaataatacactaatctgcttttgatgttatttttcaccaacattactgtagtacttacccatggattctctccatctaccatgcaggttcaaccgttggttggcctgtacagtgataggtgtacagcaagatggggaagacggaggccattcattctgacaggatgtgtgctcatctgcattgctgtgagaacctctgaattaaccttacactctctcttttcctggaagctggaactgaaacttactcacagttgttccctcttttttttttctttaaagttcccgattaatgttttccaattcatgctgtgtaggtcattgttgttggcttttcgtcagacatcggagctgcgctaggggacacaaaggaacattgcaggtaaacaaactgatttgctctgggggctacctctgcatagtagtatatctttatcttttgcttttgtatcggtatcattagcatctgatctgacacttgatgcaatacagtctctatcatggtcctcgctggcatgctgcaattgtatatgttctggggttttggctccttgacttctccaacaatactgtgcaagtgagtgcatttctatcaataattcagattaagcattttggaaaaacgcactgttgttaatctgacattttccatccaactgccagggtccagcacgtgctatgatggctgatttgtgcggtaaatttcttggataattcatttaagtttttgttaacagtttcttgtttagccggtgctagtacttgttgtgagtgacacaagtagaatttgtgacctgatttgtaattattgcttttcttcactcaacaggtcatcatgggcctagtgcagctaattcaatcttctgttcttggatggcgctgggaaacatcctaggttattcctctggttccacaaacaattggcacaagtaagtccaccactgctacgtatctggtttactgaaaatgcgcgttctgaactttctattctggaaattagtttactgaaaatgtgcgttctgaatatgacatctagttttctaaaaatgacatatgtactgaaaatgccatatggtatcatcactgatttactgaaaatgcgtgttctgaatttctgatatcatcactgatttactgaaaatgcgtgttctgaattattactgatatcatcacatacaggtggtttcccttcctcaaaacaaatgcctgttgtgaagcctgtgcaaacctgaaaggtgcatttctggtggctgtggtaagtcttaccatttcctgaaaacgttcttgcaatactgttctttcccaatgcgcaaacacagagtaattttatttctttcaacaggtgttcctagtcatatgcttggctataaccctcgtcttcgccaaggaagtaccatacagaggaaacgagaacctcccaacaaaagcaaacggcgaggttgaagctgaacctaccgggccacttgctgtgctcaagggcttcaagaacttgccccgcgggatgccatccgttcttctcgtaactggcctcacctgggtatgccattgccatgcagtctgttcactagtttcagattgtttctgaatcgatcaagcggccatggcaattctgtactgacgactgacgctgccattgtcgttgcagctctcgtggttcccgttcatcctctacgacaccgactggatgggccgtgagatctaccacggcgacccaaagggcaccaatgctcagatctcggcattcaacgaaggtgtcagaataggcgcattcgggctgcttctcaactcggtaagattcagtctcctctcattcatttccagacgcttcgctgcaaattctgtcctgcagtagtaatagatagctgaccacgaggctggtgaaccgtacgtgcagattgttctaggattcagctcgttcctgatcgagcccatgtgccggaaggtcgggccgagggttgtgtgggtgacgagcaacttcatggtgtgcatcgccatggcggccaccgcgctgatcagcttctggtcgctcaaggactaccacggatacgtgcagaacgccatcaccgccagcacgagcatcaaggccgtctgcctcgtcctcttcgccttcctgggtgtccctctcgccgtaagcacaccttcgctcgccaccggatgcatgccatggccacgccacgccacgccactggactgggtgcatgccctaatcgatcgatctctttttgtgcaatgcagatcctgtacagcgtcccgttcgcggtgacggcgcagctagcggccagcatgggcggcgggcaggggctgtgcaccggcgtcctcaacatctccatcgttatcccccaggtgatcatcgcggtgggcgcaggcccgtgggacgcgctgttcggcaagggcaacatcccggcgttcggcgtggcgtcggggttcgccctcatcggcggcgtcgtgggcatgttcctgctgcccaggatctccaagcgccagttcagggccgtcagcgcgggcggccactgatcgagcacggcccggcccgccggagcacggcacggcgacacaaacccaaccgtgcaagatcgagctgtatgttgaaagttgaacagaataagaagcaggcgaaacgagaaaccattgtgtgcttttgttgtgtgtggttgataggcgtggcgaggtggagtggaggtgaagccgtgaaggtgagcatccagcaccagctggttaccaaggtctggtcaggtctctgtgctagtgctattagctagtgtataaggagcgagtaggtcagttaaggctggtgcgttgtgagtgctcctgtaatctttgtgtccctgtcttgtgtgtgtagctacagcagaccgatcatcaggagaagaacaaaaggattattcgatcaatcaatgtgcagtatagtatagtacagctagacgatcgatgatgttgatgattggtctagagctagagcctactgctactactcctactgtgtattgtccgccgtttgagatttttggtcccagcaatgcaaccgccttgttttgctccaattgtcccgttcctgcgcctcgcttttgctctgtcgcatacaaaaacgcgccgcgccggcgccggcgccggctttgaatcgcgccccaactgctccagccacggccaccgtccgtttcgcgagcaaaaaccaaaaaggaggaacgcgtccagggcgaagcagtccactgccggtgtggccggcgaaagaagatgtccttgttcagttgttcgctattggactatttggactagactaggagaactcaattcctctaaaacacaccactcttaacatgcaatgcaatgtaaaaatgcagacatggacagcaccatcgccgcgcgccgttgatcgcacacgaatgattacagaataccattcacaaaactccgagggctagcatgcaccacacccaagtggtgcgcacgtagctgggagcgaaaaaataattgttcacgtcacgtcgcgtcgcgcgtatccagctccgcggacgtctcggctcagcagcagcacacggggc

SEQ ID NO: 3541 - DNA, 3049 bp, Sorghum bicolor
aaaatccattgcatctagtatggacatagagccaaaatttcctacgaaacgtcaaggtaaaagaaagaagcattttgatgaacaaaatgatgaaactgaagagctacaagtttcacctatagaatccttcaaatttgagtacttcctagttattgttgatcatgcaattgcttcattgagtagtcgatttgaacagctaaagaaatttgaaaaaaatatttggtttcttattcaactcagtaaatctcaagtccttggatgataatgatctacgaaagtgttgcactagttttgtagaatctttttctcaagacaacaagtctgatgttgagttggatgattttttctctgaactaaaagtcttgcgagaatctttgccagaagaactgatgtcagcacctgagattcttcagtttgttaaagctgcagattgctatccgaatgtctccattgcatatcggattctcctaactattccagtgacagtcgcatcagccgaaagaagtttctccaaattgaaactgctgaaaaattgtttgagatcaacaatgttacaagaaagattgaatggcttggctatgtgcagcattgagaaggatattttggatgatattaatcttgatactattattgaagattttgcatcaagaaatgcccgaagacggtttttatcaaggcactaacattatatttttttgaggtaatcataatggttactgtttttagtttttttgttacactattgttatgttttatgagctatatatattacaaagtatttttattattcatatatatattacaattttgatattaaaaattagttcaacgggcccttatcttgtgcttgcccaagggtccttaaaattatagagccggccctggtcccgggccggagagccgggactgaaggtgggacttttagtcccgatctcttagtcctggctcgccatccgggactacaagtggttttcgaccgggacaaagtgttagttgttctgtttggcgaccgatcttctgcacttttttgtgttccatttgtgtagtatctggttggtcgtcaagaacaggagatgcatgcatatggacgatcttggagatcgggattcggtaacagtgtgtgtcggagtcggtaggttatgaacaaaacaaccagcaagaaacagagtgcacaaagtaatccaaaaatgtttttttttacaagattttgatccaaaagtctacccatatgaggagcgcagagcggcaaaggtatgtgtttgcaaatcttctatatataagtacatttaaccggtcgggataaacacgtggatcaaaactggaaaacaaggtactccagtcagtataacgcagttttgaaatatgattaggatatttttcccatgccacatccttcccatctatcatcagttgcagtgttactgtcacagcgtgtcacaagatagtagctagaactcttcttcttggagcctactcctgcactgatgcaactgcaaagacgacttattcagcaatttcagtctgaataatggaaactaatcatttgatgtctgaacaatgaaaattaatcatttgattggagatgccgtattgttttgttttattttccaaaagacagtccctctgactccacggatagcaatgggtatgggcacgcacgtcgttatgagagcctgcttgtttacttccaccctaaaacacaaaaactttcaagatttcccatcacatcgaatgtttagacgcatacatagagtattaaatatagatgaaaataaaaactaattacacagtttagtcgaaatttacgagacgaatcttttgaacctaaatagtccatggttggacactaattagcacaatcaaacgaaagtgctacagtgtcgtgatttttttttttttgtctcaccaactaaacacggcaagtctagtacagaacatgatgtgtcctgtgacgttgtcagatgaacggagatttgcgttgtgcatcatattattgctttttggcagggctgtaccggtaccgtctaggggacgtggtgaaggtggccgggttctacaactcgacgccgaagctcaagttcgtgtgtcgacggaacctgatgctgagcatcaacatcgacaagaacagcgagcaggatctccagctcgccgtcgacagcgccgccaagatcctggcggcggagaagctggaggtggtggactacagcagccacgcggatgtgtcgcgcgacccgggccactacgtcgtgttctgggagctcaacgccgacggcaacgacgacgtgctgcagagctgctgcgacgagctggaccgcgccttcacagaccccggctacgtgagctcacggaagaccagcggcattggcccgctggagctcagggtgctgcagcggggaaccttccagaaggtgctccgccactacctctccctcggcgcccccgtcagccagttcaagtcgccgcggtgtgtcggacggtccaataactccggcgtcctccagatcctctccgccaacgtcgtcaaggtgttcttcagcaccgcctacgactgacgacgacggcgctactagatcgctccctaccatgcgtggacaacggccggaggaggatccggggaggaggtagaagatcatcaagtagtagttgtagagatttgcagctgtgctgctgtgggtgcaggaggatatttcatgcagcagattcaggccggtgcaattggttggtacttggtgctcgtggccagtgatatatacacacctgttgccacgtgtgtccgtgtctgcactgcatgttaaactcaatcccatgcacaatcttatctgcataatgtaaagtaggatagatgcattggcatgtttactttcagttaaggtaagctagctccattgagtcgtaaaggtgtaggcattagatttgtactgcgttcacaatacgatgctaggaatcctcgccgtatacgtatggaaaacaacccgtgtttgacgggcatggcgcaacgtgcacgtatgcggcgggggggagtcgatcattggatcgtgtaaacaccaag

SEQ ID NO: 3542 - DNA, 53797 bp, Sorghum bicolor
  misc_feature (6225)..(51979): n is a, c, g, or t
ttaaactttttaatactctacctgtagttttcacttttcctaatacacgtacatgtacacattgtatgcggatattattttggcaaaagtaacgggtattcaatcgaatatccttgaatctatataggcttggccatgcttctatttatcattctattccaatctacatgtgctatatggtagaatagagcctaaattttatcttatttcacaccaacatatatgaattaaggtggatataaatatatccaaacaagtttttaggccttcttttagatccaaaaacatttttggatttcgttactgtagcactttcgtttgtatttgataatcagtgtttaatcatagactgactaggctcaaaagattcgtctcacgattaattagttattttttagtctatatttaatgctccatgcatgtgctacaagattcaatgtgatgaggaattttaaaaagtgtttggattttagggtgaactaaacaaggccttaatgtactccctctatataggatttagaagtcgtttatgatagcaacatagtctacaaaacacaactttgatctctaatttttgtaaaaatatttagaaaaaatgataaatgtatacttttataaaagtatttttcaagacaaatctattcatataactttttcatttgcaaacttaacgatttaaaagttattgttgatttatatttccaatgtttgactaaaaccttattcaaattacttctaaattcagggattacttcactagtcgacagattacttcactagtcgacacctttatagatacaactcgcttgtcgataaatctttcaaggtaaaacgaacatttttttccgttggtctgactgtagccaaataatgcttctgtttaatgaacatacagtattagactatctccaacaatcgtcacccaaaatacaagatctatttgtcctttgggtagcgctacaggtaaaaggtttcatacctatttttagtcttctccaacaacaaggcctaaaagacaacactctctgtaaataggtctcgagaagagaggatacctaaatttgggttatgctcctcctgatacctaaaataggtcttctgtatgggtactctgttggaggctataagtattgtgttggagacccattttagttcgggtttccaaataagtctcctgttggagacagccttagagcaagtattatagtgggctgtaagctggctagatgctgaggtggaggagagaagagatgagagagaggagaagcgggttgtaagcttacagccagtctgggcacaggaaccaaaaaactttgtgaaagagacaagtgggccatgtatcaatagtgaatagctaactattgtatgggtgggctgggagaaggctgtaagaaaccttatagccagcaactggactgtattggctgtattattaaacttgctcttaatagtataagctgttgctctgtcactgtgtcttacgctttgtctcgtacggcatgctgcgggcgtggatacctccacacgacgacgcaacgcggccactcatcaactcaagtcgaggcaccaggtctacctcgagaagcgcacccgttgccgttcgaggaaacgacgaggggccaatccgatccgatgcccccgttccgatgtcgtcacgtccgggcccaaacccacctgcccagagacgcgcttcccccattcccgtcccatcgcgagggcaactcatcaatgccgcatcctcggattcccctggcggccccgcccgcctgtctcccctgtgccagcccactgggctccacgcgtccctatcgccccgacgacgcggccccactccacccggttcacacaccatttcaaatcccaccaccacccacgccgcccccaaacggtcacccgttttacgcttcgctgccgctgcggctgcgccacaccgaacccctcccctcgccgtcgcggctcggctccgccccgatcgatcgatccggccggcggagggcgccatggcctcccccaaccccgaggcggccgcggggctgcagaccgtggctgtggcggcggggggaggggagggcggctcgtcctcatcgctcggcgccgttgcgggggcggcggctgtgtcgtcgtccggggagctagtgcccaggaggtccttggcggtgcggaaggagcgcgtgtgcacggccaaggagcgcatcagccgcatgcctccctgtgccgcggggaagcggagctccatctaccgcggggtcacccggtacgcgccgcacggtccctgccatgccccccctccgtgctagcactttgttgccgcctgctcgagagcttacgccctcgctaatcttgcgcgcgcgcttcgatcggatgcctccttggttgaatctcctcctttgctaggagcttggagtgtcactccatgttgtttcggccattcgggatctactatgtgtgcgcaaattccaataccctgtaggtcgaatgactgcggcacactagttaagctaagctctcttgagtcttaacagcgttgaccttcttctgatcttagtaggtatcctattcctagtcacggttaattttgacaagtacttgaattctaaaaaattctggcaacctttggcacatcggatttcagcttggtagtggatcaatgctgttttattcagcattcagtgttcatcgtctcatgctcctctgttgttgttgcatgggtagttagttgatgtaatttttttgaggaaaagcttagttgatgtaatacctagagttttggattcttctgaagcaatttcggtccagcaactgaatcgaaataatttagctgtgttttctgccgctaccagcaacgttagcagccgctagcacttctatcatggctttgttataactagttttaaccttttctccattaccttatgtgtttgtatacattgatatagaactgactttggctcgtcaataggcataggtggacaggtcgatatgaggctcacctttgggacaaaagcacttggaatcagaatcagaacaaaaaggggaaacaaggtatgtctgtctctctagtacagagtacctgcagttgtatgtgttcttgaattcctaaatagattgcaactgtcagatgggcaaacttgtccactaaaacctgattaggttgaatagatagtttgacttggttatgtagatagtttctggttgcatgtaccacgtagtcagacttttaatactttgccattgatatgtaattgaatactcccgttgtttcgcaatatttgttttgtctgcacacctaggtggtatagggtttgattgagattacatggagttatgataaatttgtactcattggacatattaatagttcatctatctaatgaaaccaggtacaatctgatttcgtggaaagatcatgagctgtaataagcctctaagatatgtggaccagacaaactttgtaaaacatatttataatattgcgattttgcttttctataaatataccctggcagaaattaatggtctagccccagcccaattctcacttgggcgatggttaggccaccgtgtatggatgggggtgggggttcgggggttttctcgccgggtgagaagacactttcttcttaatttgaaagctgcggcagcagtcttaaccgcgccggttgaggtttttctttttgaaattaatggtcaaagttacatgtccaaatcgacatttattttggtgactggaggatcttcttcaacctaacacttgacactcaaacatgatttccacctttcccaccgtgctgtgaatcagttggcctgtcacaaaataatgattgttcttgcattatgccataatcactgaaagacatggatggacgtaaagcgctatgcctgctgcagtttcctctgagctatttcatatctctgggagatgcataactgtatttagtcaacaatattgttttctttgttatgtttatttctgcacagctatcactgatctgatttgattgaattgtttcttttgcatggaaaactacatcgcccaattgctattgcagtatatttaggtaagtggcatcctggttttaacttaatttgcagagttgctatgattttcttaatcattctcaattctgtgtgcaataacataggcgcatatgatgacgaagaggctgcagcaagggcctatgaccttgctgcattaaaatactggggagctggaacacaaataaattttccagtgagtcatttttccttgtgtgatggtgattgtgactcgtgtttctaattgctgtaagttctactttttttttagagttcaagggccattgcccccatctttcaaattcattagaagacaataatattcaatacagcgcagtggatatgatccagcaaaccccataaaccagaagaccaaacctaaagtcctaaaccaagactactgaagaacctactgaaaggaacccacagaaacctcagcagcactcgccactgaacaccaacctaaataaacaaccatcagctttaaccacagaaaacagcacccaaggattgcaagatcagcaaactggatctcacgccagtctgcaagagctccagccttggaaatcatcagaagaagaaaccagctccggcttcatcttcaggaaactctgcattcagtccaccacttgcagcttctccagagaatgcccagtcccaccgccatcttcagggaggaagccacaacactatagaagctttcctcttgatctccagcactattcttgacagggaatccttcttgttctctgggcacaatgttcagcaggatatccatccctttccatcgcgtattctgaaaacataagtcatttcttagcttccataagctcagaagagtaccagcagtaattattttcatcaaaacatgtcttttattactaagccaaaactgtccaatggattcaaaggaacctcccaggttcacctcaagaatctcagagaacacacaccagagctgtgcagctactgcacactcaaaaaacaagtgtaaaacatattctttctcacaacaaaacaagcaagaaacatcctaactttcttcttttactcaagttatctctagtaagcactttttgtttttagacaacaaccacaagaaaatcagctttgtattgatagaaattgtttaattcaggaagcatcttgtggaaactttttttttcgtaaaaatgacccttatttgtttctaacattgagcaatgagacgtcaaaatctgctttcctttaatagaaattgtttaattaaggaagcattttgtgagtctcctttttttggtaaaaaagacccttctttgtttccaacattgagtaattaggtgcataaatgcaaagaaatcttgacaaaagctattgagcaacatagttttgtactttcaaattggaggctttgagactgtaaccagatgtaagatgtgtctatatcatggttgttgccttctttttgtcctttattttgaacttgacaaactgtggtcctgatatatcatgcttgcacaagtacctgctgtactattttgtcacatgatgaaatgatgggcaagaaattgcacttccgaacctgtacttctatccattaattctattattttttgtagtgatatttgaaaatggatgtttgcatgtcataattgcgcagttctacttgagtagaatgatttcttttttggaatattcaagtcggtcgactgataagtgcaatgaaaacaacaatatcttctgttgagtgtgacaaaacaaatgtatcaacccattaattctattatttttttgtagtgatatttggaaatggatgtttgcatgtcataattgtgcagttctacttcagtagaatgttttcttttttggaatattcaagtcggttgactgataagtgcaatgaaaacaacaataccttctgttgagtgtgacaaaacaaatgtatcaacacacagaattgcttgaactaataactgtacatgagttgccaatgtagagtattatgctatctctgttccatacttattatcacagtagtcaattaaagttgtgttgtattttttttatttttcagacttatgttcatatatgtttgcttgtttaggtctctgactatgcaagagaccttgaagagatgcaaatgatctccaaggaggactatctcgtgtctcttaggaggtatatttgtgcatttgtaatatatatatatannnnnnnnnnnnnnnnnnnnnnnnnnnnnnnnnnnnnnnnnnnnnnnnnnnnnnnnnnnnnnnnnnnnnnnnnnnnnnnnnnnnnnnnnnnnnnnnnnnnnnnnnnnnnnnnnnnnnnnnnnnnnnnnnnnnnnnnnnnnnnnnnnnnnnnnnnnnnnnnnnnnnnnnnnnnnnnnnnnnnnnnnnnnnnnnnnnnnnnnnnnnnnnnnnnnnnnnnnnnnnnnnnnnnnnnnnnnnnnnnnnnnnnnnnnnnnnnnnnnnnnnnnnnnnnnnnnnnnnnnnnnnnnnnnnnnnnnnnnnnnnnnnnnnnnnnnnnnnnnnnnnnnnnnnnnnnnnnnnnnnnnnnnnnnnnnnnnnnnnnnnnnnnnnnnnnnnnnnnnnnnnnnnnnnnnnnnnnnnnnnnnnnnnnnnnnnnnnnnnnnnnnnnnnnnnnnnnnnnnnnnnnnnnnnnnnnnnnnnnnnnnnnnnnnnnnnnnnnnnnnnnnnnnnnnnnnnnnnnnnnnnnnnnnnnnnnnnnnnnnnnnnnnnnnnnnnnnnnnnnnnnnnnnnnnnnnnnnnnnnnnnnnnnnnnnnnnnnnnnnnnnnnnnnnnnnnnnnnnnnnnnnnnnnnnnnnnnnnnnnnnnnnnnnnnnnnnnnnnnnnnnnnnnnnnnnnnnnnnnnnnnnnnnnnnnnnnnnnnnnnnnnnnnnnnnnnnnnnnnnnnnnnnnnnnnnnnnnnnnnnnnnnnnnnnnnnnnnnnnnnnnnnnnnnnnnnnnnnnnnnnnnnnnnnnnnnnnnnnnnnnnnnnnnnnnnnnnnnnnnnnnnnnnnnnnnnnnnnnnnnnnnnnnnnnnnnnnnnnnnnnnnnnnnnnnnnnnnnnnnnnnnnnnnnnnnnnnnnnnnnnnnnnnnnnnnnnnnnnnnnnnnnnnnnnnnnnnnnnnnnnnnnnnnnnnnnnnnnnnnnnnnnnnnnnnnnnnnnnnnnnnnnnnnnnnnnnnnnnnnnnnnnnnnnnnnnnnnnnnnnnnnnnnnnnnnnnnnnnnnnnnnnnnnnnnnnnnnnnnnnnnnnnnnnnnnnnnnnnnnnnnnnnnnnnnnnnnnnnnnnnnnnnnnnnnnnnnnnnnnnnnnnnnnnnnnnnnnnnnnnnnnnnnnnnnnnnnnnnnnnnnnnnnnnnnnnnnnnnnnnnnnnnnnnnnnnnnnnnnnnnnnnnnnnnnnnnnnnnnnnnnnnnnnnnnnnnnnnnnnnnnnnnnnnnnnnnnnnnnnnnnnnnnnnnnnnnnnnnnnnnnnnnnnnnnnnnnnnnnnnnnnnnnnnnnnnnnnnnnnnnnnnnnnnnnnnnnnnnnnnnnnnnnnnnnnnnnnnnnnnnnnnnnnnnnnnnnnnnnnnnnnnnnnnnnnnnnnnnnnnnnnnnnnnnnnnnnnnnnnnnnnnnnnnnnnnnnnnnnnnnnnnnnnnnnnnnnnnnnnnnnnnnnnnnnnnnnnnnnnnnnnnnnnnnnnnnnnnnnnnnnnnnnnnnnnnnnnnnnnnnnnnnnnnnnnnnnnnnnnnnnnnnnnnnnnnnnnnnnnnnnnnnnnnnnnnnnnnnnnnnnnnnnnnnnnnnnnnnnnnnnnnnnnnnnnnnnnnnnnnnnnnnnnnnnnnnnnnnnnnnnnnnnnnnnnnnnnnnnnnnnnnnnnnnnnnnnnnnnnnnnnnnnnnnnnnnnnnnnnnnnnnnnnnnnnnnnnnnnnnnnnnnnnnnnnnnnnnnnnnnnnnnnnnnnnnnnnnnnnnnnnnnnnnnnnnnnnnnnnnnnnnnnnnnnnnnnnnnnnnnnnnnnnnnnnnnnnnnnnnnnnnnnnnnnnnnnnnnnnnnnnnnnnnnnnnnnnnnnnnnnnnnnnnnnnnnnnnnnnnnnnnnnnnnnnnnnnnnnnnnnnnnnnnnnnnnnnnnnnnnnnnnnnnnnnnnnnnnnnnnnnnnnnnnnnnnnnnnnnnnnnnnnnnnnnnnnnnnnnnnnnnnnnnnnnnnnnnnnnnnnnnnnnnnnnnnnnnnnnnnnnnnnnnnnnnnnnnnnnnnnnnnnnnnnnnnnnnnnnnnnnnnnnnnnnnnnnnnnnnnnnnnnnnnnnnnnnnnnnnnnnnnnnnnnnnnnnnnnnnnnnnnnnnnnnnnnnnnnnnnnnnnnnnnnnnnnnnnnnnnnnnnnnnnnnnnnnnnnnnnnnnnnnnnnnnnnnnnnnnnnnnnnnnnnnnnnnnnnnnnnnnnnnnnnnnnnnnnnnnnnnnnnnnnnnnnnnnnnnnnnnnnnnnnnnnnnnnnnnnnnnnnnnnnnnnnnnnnnnnnnnnnnnnnnnnnnnnnnnnnnnnnnnnnnnnnnnnnnnnnnnnnnnnnnnnnnnnnnnnnnnnnnnnnnnnnnnnnnnnnnnnnnnnnnnnnnnnnnnnnnnnnnnnnnnnnnnnnnnnnnnnnnnnnnnnnnnnnnnnnnnnnnnnnnnnnnnnnnnnnnnnnnnnnnnnnnnnnnnnnnnnnnnnnnnnnnnnnnnnnnnnnnnnnnnnnnnnnnnnnnnnnnnnnnnnnnnnnnnnnnnnnnnnnnnnnnnnnnnnnnnnnnnnnnnnnnnnnnnnnnnnnnnnnnnnnnnnnnnnnnnnnnnnnnnnnnnnnnnnnnnnnnnnnnnnnnnnnnnnnnnnnnnnnnnnnnnnnnnnnnnnnnnnnnnnnnnnnnnnnnnnnnnnnnnnnnnnnnnnnnnnnnnnnnnnnnnnnnnnnnnnnnnnnnnnnnnnnnnnnnnnnnnnnnnnnnnnnnnnnnnnnnnnnnnnnnnnnnnnnnnnnnnnnnnnnnnnnnnnnnnnnnnnnnnnnnnnnnnnnnnnnnnnnnnnnnnnnnnnnnnnnnnnnnnnnnnnnnnnnnnnnnnnnnnnnnnnnnnnnnnnnnnnnnnnnnnnnnnnnnnnnnnnnnnnnnnnnnnnnnnnnnnnnnnnnnnnnnnnnnnnnnnnnnnnnnnnnnnnnnnnnnnnnnnnnnnnnnnnnnnnnnnnnnnnnnnnnnnnnnnnnnnnnnnnnnnnnnnnnnnnnnnnnnnnnnnnnnnnnnnnnnnnnnnnnnnnnnnnnnnnnnnnnnnnnnnnnnnnnnnnnnnnnnnnnnnnnnnnnnnnnnnnnnnnnnnnnnnnnnnnnnnnnnnnnnnnnnnnnnnnnnnnnnnnnnnnnnnnnnnnnnnnnnnnnnnnnnnnnnnnnnnnnnnnnnnnnnnnnnnnnnnnnnnnnnnnnnnnnnnnnnnnnnnnnnnnnnnnnnnnnnnnnnnnnnnnnnnnnnnnnnnnnnnnnnnnnnnnnnnnnnnnnnnnnnnnnnnnnnnnnnnnnnnnnnnnnnnnnnnnnnnnnnnnnnnnnnnnnnnnnnnnnnnnnnnnnnnnnnnnnnnnnnnnnnnnnnnnnnnnnnnnnnnnnnnnnnnnnnnnnnnnnnnnnnnnnnnnnnnnnnnnnnnnnnnnnnnnnnnnnnnnnnnnnnnnnnnnnnnnnnnnnnnnnnnnnnnnnnnnnnnnnnnnnnnnnnnnnnnnnnnnnnnnnnnnnnnnnnnnnnnnnnnnnnnnnnnnnnnnnnnnnnnnnnnnnnnnnnnnnnnnnnnnnnnnnnnnnnnnnnnnnnnnnnnnnnnnnnnnnnnnnnnnnnnnnnnnnnnnnnnnnnnnnnnnnnnnnnnnnnnnnnnnnnnnnnnnnnnnnnnnnnnnnnnnnnnnnnnnnnnnnnnnnnnnnnnnnnnnnnnnnnnnnnnnnnnnnnnnnnnnnnnnnnnnnnnnnnnnnnnnnnnnnnnnnnnnnnnnnnnnnnnnnnnnnnnnnnnnnnnnnnnnnnnnnnnnnnnnnnnnnnnnnnnnnnnnnnnnnnnnnnnnnnnnnnnnnnnnnnnnnnnnnnnnnnnnnnnnnnnnnnnnnnnnnnnnnnnnnnnnnnnnnnnnnnnnnnnnnnnnnnnnnnnnnnnnnnnnnnnnnnnnnnnnnnnnnnnnnnnnnnnnnnnnnnnnnnnnnnnnnnnnnnnnnnnnnnnnnnnnnnnnnnnnnnnnnnnnnnnnnnnnnnnnnnnnnnnnnnnnnnnnnnnnnnnnnnnnnnnnnnnnnnnnnnnnnnnnnnnnnnnnnnnnnnnnnnnnnnnnnnnnnnnnnnnnnnnnnnnnnnnnnnnnnnnnnnnnnnnnnnnnnnnnnnnnnnnnnnnnnnnnnnnnnnnnnnnnnnnnnnnnnnnnnnnnnnnnnnnnnnnnnnnnnnnnnnnnnnnnnnnnnnnnnnnnnnnnnnnnnnnnnnnnnnnnnnnnnnnnnnnnnnnnnnnnnnnnnnnnnnnnnnnnnnnnnnnnnnnnnnnnnnnnnnnnnnnnnnnnnnnnnnnnnnnnnnnnnnnnnnnnnnnnnnnnnnnnnnnnnnnnnnnnnnnnnnnnnnnnnnnnnnnnnnnnnnnnnnnnnnnnnnnnnnnnnnnnnnnnnnnnnnnnnnnnnnnnnnnnnnnnnnnnnnnnnnnnnnnnnnnnnnnnnnnnnnnnnnnnnnnnnnnnnnnnnnnnnnnnnnnnnnnnnnnnnnnnnnnnnnnnnnnnnnnnnnnnnnnnnnnnnnnnnnnnnnnnnnnnnnnnnnnnnnnnnnnnnnnnnnnnnnnnnnnnnnnnnnnnnnnnnnnnnnnnnnnnnnnnnnnnnnnnnnnnnnnnnnnnnnnnnnnnnnnnnnnnnnnnnnnnnnnnnnnnnnnnnnnnnnnnnnnnnnnnnnnnnnnnnnnnnnnnnnnnnnnnnnnnnnnnnnnnnnnnnnnnnnnnnnnnnnnnnnnnnnnnnnnnnnnnnnnnnnnnnnnnnnnnnnnnnnnnnnnnnnnnnnnnnnnnnnnnnnnnnnnnnnnnnnnnnnnnnnnnnnnnnnnnnnnnnnnnnnnnnnnnnnnnnnnnnnnnnnnnnnnnnnnnnnnnnnnnnnnnnnnnnnnnnnnnnnnnnnnnnnnnnnnnnnnnnnnnnnnnnnnnnnnnnnnnnnnnnnnnnnnnnnnnnnnnnnnnnnnnnnnnnnnnnnnnnnnnnnnnnnnnnnnnnnnnnnnnnnnnnnnnnnnnnnnnnnnnnnnnnnnnnnnnnnnnnnnnnnnnnnnnnnnnnnnnnnnnnnnnnnnnnnnnnnnnnnnnnnnnnnnnnnnnnnnnnnnnnnnnnnnnnnnnnnnnnnnnnnnnnnnnnnnnnnnnnnnnnnnnnnnnnnnnnnnnnnnnnnnnnnnnnnnnnnnnnnnnnnnnnnnnnnnnnnnnnnnnnnnnnnnnnnnnnnnnnnnnnnnnnnnnnnnnnnnnnnnnnnnnnnnnnnnnnnnnnnnnnnnnnnnnnnnnnnnnnnnnnnnnnnnnnnnnnnnnnnnnnnnnnnnnnnnnnnnnnnnnnnnnnnnnnnnnnnnnnnnnnnnnnnnnnnnnnnnnnnnnnnnnnnnnnnnnnnnnnnnnnnnnnnnnnnnnnnnnnnnnnnnnnnnnnnnnnnnnnnnnnnnnnnnnnnnnnnnnnnnnnnnnnnnnnnnnnnnnnnnnnnnnnnnnnnnnnnnnnnnnnnnnnnnnnnnnnnnnnnnnnnnnnnnnnnnnnnnnnnnnnnnnnnnnnnnnnnnnnnnnnnnnnnnnnnnnnnnnnnnnnnnnnnnnnnnnnnnnnnnnnnnnnnnnnnnnnnnnnnnnnnnnnnnnnnnnnnnnnnnnnnnnnnnnnnnnnnnnnnnnnnnnnnnnnnnnnnnnnnnnnnnnnnnnnnnnnnnnnnnnnnnnnnnnnnnnnnnnnnnnnnnnnnnnnnnnnnnnnnnnnnnnnnnnnnnnnnnnnnnnnnnnnnnnnnnnnnnnnnnnnnnnnnnnnnnnnnnnnnnnnnnnnnnnnnnnnnnnnnnnnnnnnnnnnnnnnnnnnnnnnnnnnnnnnnnnnnnnnnnnnnnnnnnnnnnnnnnnnnnnnnnnnnnnnnnnnnnnnnnnnnnnnnnnnnnnnnnnnnnnnnnnnnnnnnnnnnnnnnnnnnnnnnnnnnnnnnnnnnnnnnnnnnnnnnnnnnnnnnnnnnnnnnnnnnnnnnnnnnnnnnnnnnnnnnnnnnnnnnnnnnnnnnnnnnnnnnnnnnnnnnnnnnnnnnnnnnnnnnnnnnnnnnnnnnnnnnnnnnnnnnnnnnnnnnnnnnnnnnnnnnnnnnnnnnnnnnnnnnnnnnnnnnnnnnnnnnnnnnnnnnnnnnnnnnnnnnnnnnnnnnnnnnnnnnnnnnnnnnnnnnnnnnnnnnnnnnnnnnnnnnnnnnnnnnnnnnnnnnnnnnnnnnnnnnnnnnnnnnnnnnnnnnnnnnnnnnnnnnnnnnnnnnnnnnnnnnnnnnnnnnnnnnnnnnnnnnnnnnnnnnnnnnnnnnnnnnnnnnnnnnnnnnnnnnnnnnnnnnnnnnnnnnnnnnnnnnnnnnnnnnnnnnnnnnnnnnnnnnnnnnnnnnnnnnnnnnnnnnnnnnnnnnnnnnnnnnnnnnnnnnnnnnnnnnnnnnnnnnnnnnnnnnnnnnnnnnnnnnnnnnnnnnnnnnnnnnnnnnnnnnnnnnnnnnnnnnnnnnnnnnnnnnnnnnnnnnnnnnnnnnnnnnnnnnnnnnnnnnnnnnnnnnnnnnnnnnnnnnnnnnnnnnnnnnnnnnnnnnnnnnnnnnnnnnnnnnnnnnnnnnnnnnnnnnnnnnnnnnnnnnnnnnnnnnnnnnnnnnnnnnnnnnnnnnnnnnnnnnnnnnnnnnnnnnnnnnnnnnnnnnnnnnnnnnnnnnnnnnnnnnnnnnnnnnnnnnnnnnnnnnnnnnnnnnnnnnnnnnnnnnnnnnnnnnnnnnnnnnnnnnnnnnnnnnnnnnnnnnnnnnnnnnnnnnnnnnnnnnnnnnnnnnnnnnnnnnnnnnnnnnnnnnnnnnnnnnnnnnnnnnnnnnnnnnnnnnnnnnnnnnnnnnnnnnnnnnnnnnnnnnnnnnnnnnnnnnnnnnnnnnnnnnnnnnnnnnnnnnnnnnnnnnnnnnnnnnnnnnnnnnnnnnnnnnnnnnnnnnnnnnnnnnnnnnnnnnnnnnnnnnnnnnnnnnnnnnnnnnnnnnnnnnnnnnnnnnnnnnnnnnnnnnnnnnnnnnnnnnnnnnnnnnnnnnnnnnnnnnnnnnnnnnnnnnnnnnnnnnnnnnnnnnnnnnnnnnnnnnnnnnnnnnnnnnnnnnnnnnnnnnnnnnnnnnnnnnnnnnnnnnnnnnnnnnnnnnnnnnnnnnnnnnnnnnnnnnnnnnnnnnnnnnnnnnnnnnnnnnnnnnnnnnnnnnnnnnnnnnnnnnnnnnnnnnnnnnnnnnnnnnnnnnnnnnnnnnnnnnnnnnnnnnnnnnnnnnnnnnnnnnnnnnnnnnnnnnnnnnnnnnnnnnnnnnnnnnnnnnnnnnnnnnnnnnnnnnnnnnnnnnnnnnnnnnnnnnnnnnnnnnnnnnnnnnnnnnnnnnnnnnnnnnnnnnnnnnnnnnnnnnnnnnnnnnnnnnnnnnnnnnnnnnnnnnnnnnnnnnnnnnnnnnnnnnnnnnnnnnnnnnnnnnnnnnnnnnnnnnnnnnnnnnnnnnnnnnnnnnnnnnnnnnnnnnnnnnnnnnnnnnnnnnnnnnnnnnnnnnnnnnnnnnnnnnnnnnnnnnnnnnnnnnnnnnnnnnnnnnnnnnnnnnnnnnnnnnnnnnnnnnnnnnnnnnnnnnnnnnnnnnnnnnnnnnnnnnnnnnnnnnnnnnnnnnnnnnnnnnnnnnnnnnnnnnnnnnnnnnnnnnnnnnnnnnnnnnnnnnnnnnnnnnnnnnnnnnnnnnnnnnnnnnnnnnnnnnnnnnnnnnnnnnnnnnnnnnnnnnnnnnnnnnnnnnnnnnnnnnnnnnnnnnnnnnnnnnnnnnnnnnnnnnnnnnnnnnnnnnnnnnnnnnnnnnnnnnnnnnnnnnnnnnnnnnnnnnnnnnnnnnnnnnnnnnnnnnnnnnnnnnnnnnnnnnnnnnnnnnnnnnnnnnnnnnnnnnnnnnnnnnnnnnnnnnnnnnnnnnnnnnnnnnnnnnnnnnnnnnnnnnnnnnnnnnnnnnnnnnnnnnnnnnnnnnnnnnnnnnnnnnnnnnnnnnnnnnnnnnnnnnnnnnnnnnnnnnnnnnnnnnnnnnnnnnnnnnnnnnnnnnnnnnnnnnnnnnnnnnnnnnnnnnnnnnnnnnnnnnnnnnnnnnnnnnnnnnnnnnnnnnnnnnnnnnnnnnnnnnnnnnnnnnnnnnnnnnnnnnnnnnnnnnnnnnnnnnnnnnnnnnnnnnnnnnnnnnnnnnnnnnnnnnnnnnnnnnnnnnnnnnnnnnnnnnnnnnnnnnnnnnnnnnnnnnnnnnnnnnnnnnnnnnnnnnnnnnnnnnnnnnnnnnnnnnnnnnnnnnnnnnnnnnnnnnnnnnnnnnnnnnnnnnnnnnnnnnnnnnnnnnnnnnnnnnnnnnnnnnnnnnnnnnnnnnnnnnnnnnnnnnnnnnnnnnnnnnnnnnnnnnnnnnnnnnnnnnnnnnnnnnnnnnnnnnnnnnnnnnnnnnnnnnnnnnnnnnnnnnnnnnnnnnnnnnnnnnnnnnnnnnnnnnnnnnnnnnnnnnnnnnnnnnnnnnnnnnnnnnnnnnnnnnnnnnnnnnnnnnnnnnnnnnnnnnnnnnnnnnnnnnnnnnnnnnnnnnnnnnnnnnnnnnnnnnnnnnnnnnnnnnnnnnnnnnnnnnnnnnnnnnnnnnnnnnnnnnnnnnnnnnnnnnnnnnnnnnnnnnnnnnnnnnnnnnnnnnnnnnnnnnnnnnnnnnnnnnnnnnnnnnnnnnnnnnnnnnnnnnnnnnnnnnnnnnnnnnnnnnnnnnnnnnnnnnnnnnnnnnnnnnnnnnnnnnnnnnnnnnnnnnnnnnnnnnnnnnnnnnnnnnnnnnnnnnnnnnnnnnnnnnnnnnnnnnnnnnnnnnnnnnnnnnnnnnnnnnnnnnnnnnnnnnnnnnnnnnnnnnnnnnnnnnnnnnnnnnnnnnnnnnnnnnnnnnnnnnnnnnnnnnnnnnnnnnnnnnnnnnnnnnnnnnnnnnnnnnnnnnnnnnnnnnnnnnnnnnnnnnnnnnnnnnnnnnnnnnnnnnnnnnnnnnnnnnnnnnnnnnnnnnnnnnnnnnnnnnnnnnnnnnnnnnnnnnnnnnnnnnnnnnnnnnnnnnnnnnnnnnnnnnnnnnnnnnnnnnnnnnnnnnnnnnnnnnnnnnnnnnnnnnnnnnnnnnnnnnnnnnnnnnnnnnnnnnnnnnnnnnnnnnnnnnnnnnnnnnnnnnnnnnnnnnnnnnnnnnnnnnnnnnnnnnnnnnnnnnnnnnnnnnnnnnnnnnnnnnnnnnnnnnnnnnnnnnnnnnnnnnnnnnnnnnnnnnnnnnnnnnnnnnnnnnnnnnnnnnnnnnnnnnnnnnnnnnnnnnnnnnnnnnnnnnnnnnnnnnnnnnnnnnnnnnnnnnnnnnnnnnnnnnnnnnnnnnnnnnnnnnnnnnnnnnnnnnnnnnnnnnnnnnnnnnnnnnnnnnnnnnnnnnnnnnnnnnnnnnnnnnnnnnnnnnnnnnnnnnnnnnnnnnnnnnnnnnnnnnnnnnnnnnnnnnnnnnnnnnnnnnnnnnnnnnnnnnnnnnnnnnnnnnnnnnnnnnnnnnnnnnnnnnnnnnnnnnnnnnnnnnnnnnnnnnnnnnnnnnnnnnnnnnnnnnnnnnnnnnnnnnnnnnnnnnnnnnnnnnnnnnnnnnnnnnnnnnnnnnnnnnnnnnnnnnnnnnnnnnnnnnnnnnnnnnnnnnnnnnnnnnnnnnnnnnnnnnnnnnnnnnnnnnnnnnnnnnnnnnnnnnnnnnnnnnnnnnnnnnnnnnnnnnnnnnnnnnnnnnnnnnnnnnnnnnnnnnnnnnnnnnnnnnnnnnnnnnnnnnnnnnnnnnnnnnnnnnnnnnnnnnnnnnnnnnnnnnnnnnnnnnnnnnnnnnnnnnnnnnnnnnnnnnnnnnnnnnnnnnnnnnnnnnnnnnnnnnnnnnnnnnnnnnnnnnnnnnnnnnnnnnnnnnnnnnnnnnnnnnnnnnnnnnnnnnnnnnnnnnnnnnnnnnnnnnnnnnnnnnnnnnnnnnnnnnnnnnnnnnnnnnnnnnnnnnnnnnnnnnnnnnnnnnnnnnnnnnnnnnnnnnnnnnnnnnnnnnnnnnnnnnnnnnnnnnnnnnnnnnnnnnnnnnnnnnnnnnnnnnnnnnnnnnnnnnnnnnnnnnnnnnnnnnnnnnnnnnnnnnnnnnnnnnnnnnnnnnnnnnnnnnnnnnnnnnnnnnnnnnnnnnnnnnnnnnnnnnnnnnnnnnnnnnnnnnnnnnnnnnnnnnnnnnnnnnnnnnnnnnnnnnnnnnnnnnnnnnnnnnnnnnnnnnnnnnnnnnnnnnnnnnnnnnnnnnnnnnnnnnnnnnnnnnnnnnnnnnnnnnnnnnnnnnnnnnnnnnnnnnnnnnnnnnnnnnnnnnnnnnnnnnnnnnnnnnnnnnnnnnnnnnnnnnnnnnnnnnnnnnnnnnnnnnnnnnnnnnnnnnnnnnnnnnnnnnnnnnnnnnnnnnnnnnnnnnnnnnnnnnnnnnnnnnnnnnnnnnnnnnnnnnnnnnnnnnnnnnnnnnnnnnnnnnnnnnnnnnnnnnnnnnnnnnnnnnnnnnnnnnnnnnnnnnnnnnnnnnnnnnnnnnnnnnnnnnnnnnnnnnnnnnnnnnnnnnnnnnnnnnnnnnnnnnnnnnnnnnnnnnnnnnnnnnnnnnnnnnnnnnnnnnnnnnnnnnnnnnnnnnnnnnnnnnnnnnnnnnnnnnnnnnnnnnnnnnnnnnnnnnnnnnnnnnnnnnnnnnnnnnnnnnnnnnnnnnnnnnnnnnnnnnnnnnnnnnnnnnnnnnnnnnnnnnnnnnnnnnnnnnnnnnnnnnnnnnnnnnnnnnnnnnnnnnnnnnnnnnnnnnnnnnnnnnnnnnnnnnnnnnnnnnnnnnnnnnnnnnnnnnnnnnnnnnnnnnnnnnnnnnnnnnnnnnnnnnnnnnnnnnnnnnnnnnnnnnnnnnnnnnnnnnnnnnnnnnnnnnnnnnnnnnnnnnnnnnnnnnnnnnnnnnnnnnnnnnnnnnnnnnnnnnnnnnnnnnnnnnnnnnnnnnnnnnnnnnnnnnnnnnnnnnnnnnnnnnnnnnnnnnnnnnnnnnnnnnnnnnnnnnnnnnnnnnnnnnnnnnnnnnnnnnnnnnnnnnnnnnnnnnnnnnnnnnnnnnnnnnnnnnnnnnnnnnnnnnnnnnnnnnnnnnnnnnnnnnnnnnnnnnnnnnnnnnnnnnnnnnnnnnnnnnnnnnnnnnnnnnnnnnnnnnnnnnnnnnnnnnnnnnnnnnnnnnnnnnnnnnnnnnnnnnnnnnnnnnnnnnnnnnnnnnnnnnnnnnnnnnnnnnnnnnnnnnnnnnnnnnnnnnnnnnnnnnnnnnnnnnnnnnnnnnnnnnnnnnnnnnnnnnnnnnnnnnnnnnnnnnnnnnnnnnnnnnnnnnnnnnnnnnnnnnnnnnnnnnnnnnnnnnnnnnnnnnnnnnnnnnnnnnnnnnnnnnnnnnnnnnnnnnnnnnnnnnnnnnnnnnnnnnnnnnnnnnnnnnnnnnnnnnnnnnnnnnnnnnnnnnnnnnnnnnnnnnnnnnnnnnnnnnnnnnnnnnnnnnnnnnnnnnnnnnnnnnnnnnnnnnnnnnnnnnnnnnnnnnnnnnnnnnnnnnnnnnnnnnnnnnnnnnnnnnnnnnnnnnnnnnnnnnnnnnnnnnnnnnnnnnnnnnnnnnnnnnnnnnnnnnnnnnnnnnnnnnnnnnnnnnnnnnnnnnnnnnnnnnnnnnnnnnnnnnnnnnnnnnnnnnnnnnnnnnnnnnnnnnnnnnnnnnnnnnnnnnnnnnnnnnnnnnnnnnnnnnnnnnnnnnnnnnnnnnnnnnnnnnnnnnnnnnnnnnnnnnnnnnnnnnnnnnnnnnnnnnnnnnnnnnnnnnnnnnnnnnnnnnnnnnnnnnnnnnnnnnnnnnnnnnnnnnnnnnnnnnnnnnnnnnnnnnnnnnnnnnnnnnnnnnnnnnnnnnnnnnnnnnnnnnnnnnnnnnnnnnnnnnnnnnnnnnnnnnnnnnnnnnnnnnnnnnnnnnnnnnnnnnnnnnnnnnnnnnnnnnnnnnnnnnnnnnnnnnnnnnnnnnnnnnnnnnnnnnnnnnnnnnnnnnnnnnnnnnnnnnnnnnnnnnnnnnnnnnnnnnnnnnnnnnnnnnnnnnnnnnnnnnnnnnnnnnnnnnnnnnnnnnnnnnnnnnnnnnnnnnnnnnnnnnnnnnnnnnnnnnnnnnnnnnnnnnnnnnnnnnnnnnnnnnnnnnnnnnnnnnnnnnnnnnnnnnnnnnnnnnnnnnnnnnnnnnnnnnnnnnnnnnnnnnnnnnnnnnnnnnnnnnnnnnnnnnnnnnnnnnnnnnnnnnnnnnnnnnnnnnnnnnnnnnnnnnnnnnnnnnnnnnnnnnnnnnnnnnnnnnnnnnnnnnnnnnnnnnnnnnnnnnnnnnnnnnnnnnnnnnnnnnnnnnnnnnnnnnnnnnnnnnnnnnnnnnnnnnnnnnnnnnnnnnnnnnnnnnnnnnnnnnnnnnnnnnnnnnnnnnnnnnnnnnnnnnnnnnnnnnnnnnnnnnnnnnnnnnnnnnnnnnnnnnnnnnnnnnnnnnnnnnnnnnnnnnnnnnnnnnnnnnnnnnnnnnnnnnnnnnnnnnnnnnnnnnnnnnnnnnnnnnnnnnnnnnnnnnnnnnnnnnnnnnnnnnnnnnnnnnnnnnnnnnnnnnnnnnnnnnnnnnnnnnnnnnnnnnnnnnnnnnnnnnnnnnnnnnnnnnnnnnnnnnnnnnnnnnnnnnnnnnnnnnnnnnnnnnnnnnnnnnnnnnnnnnnnnnnnnnnnnnnnnnnnnnnnnnnnnnnnnnnnnnnnnnnnnnnnnnnnnnnnnnnnnnnnnnnnnnnnnnnnnnnnnnnnnnnnnnnnnnnnnnnnnnnnnnnnnnnnnnnnnnnnnnnnnnnnnnnnnnnnnnnnnnnnnnnnnnnnnnnnnnnnnnnnnnnnnnnnnnnnnnnnnnnnnnnnnnnnnnnnnnnnnnnnnnnnnnnnnnnnnnnnnnnnnnnnnnnnnnnnnnnnnnnnnnnnnnnnnnnnnnnnnnnnnnnnnnnnnnnnnnnnnnnnnnnnnnnnnnnnnnnnnnnnnnnnnnnnnnnnnnnnnnnnnnnnnnnnnnnnnnnnnnnnnnnnnnnnnnnnnnnnnnnnnnnnnnnnnnnnnnnnnnnnnnnnnnnnnnnnnnnnnnnnnnnnnnnnnnnnnnnnnnnnnnnnnnnnnnnnnnnnnnnnnnnnnnnnnnnnnnnnnnnnnnnnnnnnnnnnnnnnnnnnnnnnnnnnnnnnnnnnnnnnnnnnnnnnnnnnnnnnnnnnnnnnnnnnnnnnnnnnnnnnnnnnnnnnnnnnnnnnnnnnnnnnnnnnnnnnnnnnnnnnnnnnnnnnnnnnnnnnnnnnnnnnnnnnnnnnnnnnnnnnnnnnnnnnnnnnnnnnnnnnnnnnnnnnnnnnnnnnnnnnnnnnnnnnnnnnnnnnnnnnnnnnnnnnnnnnnnnnnnnnnnnnnnnnnnnnnnnnnnnnnnnnnnnnnnnnnnnnnnnnnnnnnnnnnnnnnnnnnnnnnnnnnnnnnnnnnnnnnnnnnnnnnnnnnnnnnnnnnnnnnnnnnnnnnnnnnnnnnnnnnnnnnnnnnnnnnnnnnnnnnnnnnnnnnnnnnnnnnnnnnnnnnnnnnnnnnnnnnnnnnnnnnnnnnnnnnnnnnnnnnnnnnnnnnnnnnnnnnnnnnnnnnnnnnnnnnnnnnnnnnnnnnnnnnnnnnnnnnnnnnnnnnnnnnnnnnnnnnnnnnnnnnnnnnnnnnnnnnnnnnnnnnnnnnnnnnnnnnnnnnnnnnnnnnnnnnnnnnnnnnnnnnnnnnnnnnnnnnnnnnnnnnnnnnnnnnnnnnnnnnnnnnnnnnnnnnnnnnnnnnnnnnnnnnnnnnnnnnnnnnnnnnnnnnnnnnnnnnnnnnnnnnnnnnnnnnnnnnnnnnnnnnnnnnnnnnnnnnnnnnnnnnnnnnnnnnnnnnnnnnnnnnnnnnnnnnnnnnnnnnnnnnnnnnnnnnnnnnnnnnnnnnnnnnnnnnnnnnnnnnnnnnnnnnnnnnnnnnnnnnnnnnnnnnnnnnnnnnnnnnnnnnnnnnnnnnnnnnnnnnnnnnnnnnnnnnnnnnnnnnnnnnnnnnnnnnnnnnnnnnnnnnnnnnnnnnnnnnnnnnnnnnnnnnnnnnnnnnnnnnnnnnnnnnnnnnnnnnnnnnnnnnnnnnnnnnnnnnnnnnnnnnnnnnnnnnnnnnnnnnnnnnnnnnnnnnnnnnnnnnnnnnnnnnnnnnnnnnnnnnnnnnnnnnnnnnnnnnnnnnnnnnnnnnnnnnnnnnnnnnnnnnnnnnnnnnnnnnnnnnnnnnnnnnnnnnnnnnnnnnnnnnnnnnnnnnnnnnnnnnnnnnnnnnnnnnnnnnnnnnnnnnnnnnnnnnnnnnnnnnnnnnnnnnnnnnnnnnnnnnnnnnnnnnnnnnnnnnnnnnnnnnnnnnnnnnnnnnnnnnnnnnnnnnnnnnnnnnnnnnnnnnnnnnnnnnnnnnnnnnnnnnnnnnnnnnnnnnnnnnnnnnnnnnnnnnnnnnnnnnnnnnnnnnnnnnnnnnnnnnnnnnnnnnnnnnnnnnnnnnnnnnnnnnnnnnnnnnnnnnnnnnnnnnnnnnnnnnnnnnnnnnnnnnnnnnnnnnnnnnnnnnnnnnnnnnnnnnnnnnnnnnnnnnnnnnnnnnnnnnnnnnnnnnnnnnnnnnnnnnnnnnnnnnnnnnnnnnnnnnnnnnnnnnnnnnnnnnnnnnnnnnnnnnnnnnnnnnnnnnnnnnnnnnnnnnnnnnnnnnnnnnnnnnnnnnnnnnnnnnnnnnnnnnnnnnnnnnnnnnnnnnnnnnnnnnnnnnnnnnnnnnnnnnnnnnnnnnnnnnnnnnnnnnnnnnnnnnnnnnnnnnnnnnnnnnnnnnnnnnnnnnnnnnnnnnnnnnnnnnnnnnnnnnnnnnnnnnnnnnnnnnnnnnnnnnnnnnnnnnnnnnnnnnnnnnnnnnnnnnnnnnnnnnnnnnnnnnnnnnnnnnnnnnnnnnnnnnnnnnnnnnnnnnnnnnnnnnnnnnnnnnnnnnnnnnnnnnnnnnnnnnnnnnnnnnnnnnnnnnnnnnnnnnnnnnnnnnnnnnnnnnnnnnnnnnnnnnnnnnnnnnnnnnnnnnnnnnnnnnnnnnnnnnnnnnnnnnnnnnnnnnnnnnnnnnnnnnnnnnnnnnnnnnnnnnnnnnnnnnnnnnnnnnnnnnnnnnnnnnnnnnnnnnnnnnnnnnnnnnnnnnnnnnnnnnnnnnnnnnnnnnnnnnnnnnnnnnnnnnnnnnnnnnnnnnnnnnnnnnnnnnnnnnnnnnnnnnnnnnnnnnnnnnnnnnnnnnnnnnnnnnnnnnnnnnnnnnnnnnnnnnnnnnnnnnnnnnnnnnnnnnnnnnnnnnnnnnnnnnnnnnnnnnnnnnnnnnnnnnnnnnnnnnnnnnnnnnnnnnnnnnnnnnnnnnnnnnnnnnnnnnnnnnnnnnnnnnnnnnnnnnnnnnnnnnnnnnnnnnnnnnnnnnnnnnnnnnnnnnnnnnnnnnnnnnnnnnnnnnnnnnnnnnnnnnnnnnnnnnnnnnnnnnnnnnnnnnnnnnnnnnnnnnnnnnnnnnnnnnnnnnnnnnnnnnnnnnnnnnnnnnnnnnnnnnnnnnnnnnnnnnnnnnnnnnnnnnnnnnnnnnnnnnnnnnnnnnnnnnnnnnnnnnnnnnnnnnnnnnnnnnnnnnnnnnnnnnnnnnnnnnnnnnnnnnnnnnnnnnnnnnnnnnnnnnnnnnnnnnnnnnnnnnnnnnnnnnnnnnnnnnnnnnnnnnnnnnnnnnnnnnnnnnnnnnnnnnnnnnnnnnnnnnnnnnnnnnnnnnnnnnnnnnnnnnnnnnnnnnnnnnnnnnnnnnnnnnnnnnnnnnnnnnnnnnnnnnnnnnnnnnnnnnnnnnnnnnnnnnnnnnnnnnnnnnnnnnnnnnnnnnnnnnnnnnnnnnnnnnnnnnnnnnnnnnnnnnnnnnnnnnnnnnnnnnnnnnnnnnnnnnnnnnnnnnnnnnnnnnnnnnnnnnnnnnnnnnnnnnnnnnnnnnnnnnnnnnnnnnnnnnnnnnnnnnnnnnnnnnnnnnnnnnnnnnnnnnnnnnnnnnnnnnnnnnnnnnnnnnnnnnnnnnnnnnnnnnnnnnnnnnnnnnnnnnnnnnnnnnnnnnnnnnnnnnnnnnnnnnnnnnnnnnnnnnnnnnnnnnnnnnnnnnnnnnnnnnnnnnnnnnnnnnnnnnnnnnnnnnnnnnnnnnnnnnnnnnnnnnnnnnnnnnnnnnnnnnnnnnnnnnnnnnnnnnnnnnnnnnnnnnnnnnnnnnnnnnnnnnnnnnnnnnnnnnnnnnnnnnnnnnnnnnnnnnnnnnnnnnnnnnnnnnnnnnnnnnnnnnnnnnnnnnnnnnnnnnnnnnnnnnnnnnnnnnnnnnnnnnnnnnnnnnnnnnnnnnnnnnnnnnnnnnnnnnnnnnnnnnnnnnnnnnnnnnnnnnnnnnnnnnnnnnnnnnnnnnnnnnnnnnnnnnnnnnnnnnnnnnnnnnnnnnnnnnnnnnnnnnnnnnnnnnnnnnnnnnnnnnnnnnnnnnnnnnnnnnnnnnnnnnnnnnnnnnnnnnnnnnnnnnnnnnnnnnnnnnnnnnnnnnnnnnnnnnnnnnnnnnnnnnnnnnnnnnnnnnnnnnnnnnnnnnnnnnnnnnnnnnnnnnnnnnnnnnnnnnnnnnnnnnnnnnnnnnnnnnnnnnnnnnnnnnnnnnnnnnnnnnnnnnnnnnnnnnnnnnnnnnnnnnnnnnnnnnnnnnnnnnnnnnnnnnnnnnnnnnnnnnnnnnnnnnnnnnnnnnnnnnnnnnnnnnnnnnnnnnnnnnnnnnnnnnnnnnnnnnnnnnnnnnnnnnnnnnnnnnnnnnnnnnnnnnnnnnnnnnnnnnnnnnnnnnnnnnnnnnnnnnnnnnnnnnnnnnnnnnnnnnnnnnnnnnnnnnnnnnnnnnnnnnnnnnnnnnnnnnnnnnnnnnnnnnnnnnnnnnnnnnnnnnnnnnnnnnnnnnnnnnnnnnnnnnnnnnnnnnnnnnnnnnnnnnnnnnnnnnnnnnnnnnnnnnnnnnnnnnnnnnnnnnnnnnnnnnnnnnnnnnnnnnnnnnnnnnnnnnnnnnnnnnnnnnnnnnnnnnnnnnnnnnnnnnnnnnnnnnnnnnnnnnnnnnnnnnnnnnnnnnnnnnnnnnnnnnnnnnnnnnnnnnnnnnnnnnnnnnnnnnnnnnnnnnnnnnnnnnnnnnnnnnnnnnnnnnnnnnnnnnnnnnnnnnnnnnnnnnnnnnnnnnnnnnnnnnnnnnnnnnnnnnnnnnnnnnnnnnnnnnnnnnnnnnnnnnnnnnnnnnnnnnnnnnnnnnnnnnnnnnnnnnnnnnnnnnnnnnnnnnnnnnnnnnnnnnnnnnnnnnnnnnnnnnnnnnnnnnnnnnnnnnnnnnnnnnnnnnnnnnnnnnnnnnnnnnnnnnnnnnnnnnnnnnnnnnnnnnnnnnnnnnnnnnnnnnnnnnnnnnnnnnnnnnnnnnnnnnnnnnnnnnnnnnnnnnnnnnnnnnnnnnnnnnnnnnnnnnnnnnnnnnnnnnnnnnnnnnnnnnnnnnnnnnnnnnnnnnnnnnnnnnnnnnnnnnnnnnnnnnnnnnnnnnnnnnnnnnnnnnnnnnnnnnnnnnnnnnnnnnnnnnnnnnnnnnnnnnnnnnnnnnnnnnnnnnnnnnnnnnnnnnnnnnnnnnnnnnnnnnnnnnnnnnnnnnnnnnnnnnnnnnnnnnnnnnnnnnnnnnnnnnnnnnnnnnnnnnnnnnnnnnnnnnnnnnnnnnnnnnnnnnnnnnnnnnnnnnnnnnnnnnnnnnnnnnnnnnnnnnnnnnnnnnnnnnnnnnnnnnnnnnnnnnnnnnnnnnnnnnnnnnnnnnnnnnnnnnnnnnnnnnnnnnnnnnnnnnnnnnnnnnnnnnnnnnnnnnnnnnnnnnnnnnnnnnnnnnnnnnnnnnnnnnnnnnnnnnnnnnnnnnnnnnnnnnnnnnnnnnnnnnnnnnnnnnnnnnnnnnnnnnnnnnnnnnnnnnnnnnnnnnnnnnnnnnnnnnnnnnnnnnnnnnnnnnnnnnnnnnnnnnnnnnnnnnnnnnnnnnnnnnnnnnnnnnnnnnnnnnnnnnnnnnnnnnnnnnnnnnnnnnnnnnnnnnnnnnnnnnnnnnnnnnnnnnnnnnnnnnnnnnnnnnnnnnnnnnnnnnnnnnnnnnnnnnnnnnnnnnnnnnnnnnnnnnnnnnnnnnnnnnnnnnnnnnnnnnnnnnnnnnnnnnnnnnnnnnnnnnnnnnnnnnnnnnnnnnnnnnnnnnnnnnnnnnnnnnnnnnnnnnnnnnnnnnnnnnnnnnnnnnnnnnnnnnnnnnnnnnnnnnnnnnnnnnnnnnnnnnnnnnnnnnnnnnnnnnnnnnnnnnnnnnnnnnnnnnnnnnnnnnnnnnnnnnnnnnnnnnnnnnnnnnnnnnnnnnnnnnnnnnnnnnnnnnnnnnnnnnnnnnnnnnnnnnnnnnnnnnnnnnnnnnnnnnnnnnnnnnnnnnnnnnnnnnnnnnnnnnnnnnnnnnnnnnnnnnnnnnnnnnnnnnnnnnnnnnnnnnnnnnnnnnnnnnnnnnnnnnnnnnnnnnnnnnnnnnnnnnnnnnnnnnnnnnnnnnnnnnnnnnnnnnnnnnnnnnnnnnnnnnnnnnnnnnnnnnnnnnnnnnnnnnnnnnnnnnnnnnnnnnnnnnnnnnnnnnnnnnnnnnnnnnnnnnnnnnnnnnnnnnnnnnnnnnnnnnnnnnnnnnnnnnnnnnnnnnnnnnnnnnnnnnnnnnnnnnnnnnnnnnnnnnnnnnnnnnnnnnnnnnnnnnnnnnnnnnnnnnnnnnnnnnnnnnnnnnnnnnnnnnnnnnnnnnnnnnnnnnnnnnnnnnnnnnnnnnnnnnnnnnnnnnnnnnnnnnnnnnnnnnnnnnnnnnnnnnnnnnnnnnnnnnnnnnnnnnnnnnnnnnnnnnnnnnnnnnnnnnnnnnnnnnnnnnnnnnnnnnnnnnnnnnnnnnnnnnnnnnnnnnnnnnnnnnnnnnnnnnnnnnnnnnnnnnnnnnnnnnnnnnnnnnnnnnnnnnnnnnnnnnnnnnnnnnnnnnnnnnnnnnnnnnnnnnnnnnnnnnnnnnnnnnnnnnnnnnnnnnnnnnnnnnnnnnnnnnnnnnnnnnnnnnnnnnnnnnnnnnnnnnnnnnnnnnnnnnnnnnnnnnnnnnnnnnnnnnnnnnnnnnnnnnnnnnnnnnnnnnnnnnnnnnnnnnnnnnnnnnnnnnnnnnnnnnnnnnnnnnnnnnnnnnnnnnnnnnnnnnnnnnnnnnnnnnnnnnnnnnnnnnnnnnnnnnnnnnnnnnnnnnnnnnnnnnnnnnnnnnnnnnnnnnnnnnnnnnnnnnnnnnnnnnnnnnnnnnnnnnnnnnnnnnnnnnnnnnnnnnnnnnnnnnnnnnnnnnnnnnnnnnnnnnnnnnnnnnnnnnnnnnnnnnnnnnnnnnnnnnnnnnnnnnnnnnnnnnnnnnnnnnnnnnnnnnnnnnnnnnnnnnnnnnnnnnnnnnnnnnnnnnnnnnnnnnnnnnnnnnnnnnnnnnnnnnnnnnnnnnnnnnnnnnnnnnnnnnnnnnnnnnnnnnnnnnnnnnnnnnnnnnnnnnnnnnnnnnnnnnnnnnnnnnnnnnnnnnnnnnnnnnnnnnnnnnnnnnnnnnnnnnnnnnnnnnnnnnnnnnnnnnnnnnnnnnnnnnnnnnnnnnnnnnnnnnnnnnnnnnnnnnnnnnnnnnnnnnnnnnnnnnnnnnnnnnnnnnnnnnnnnnnnnnnnnnnnnnnnnnnnnnnnnnnnnnnnnnnnnnnnnnnnnnnnnnnnnnnnnnnnnnnnnnnnnnnnnnnnnnnnnnnnnnnnnnnnnnnnnnnnnnnnnnnnnnnnnnnnnnnnnnnnnnnnnnnnnnnnnnnnnnnnnnnnnnnnnnnnnnnnnnnnnnnnnnnnnnnnnnnnnnnnnnnnnnnnnnnnnnnnnnnnnnnnnnnnnnnnnnnnnnnnnnnnnnnnnnnnnnnnnnnnnnnnnnnnnnnnnnnnnnnnnnnnnnnnnnnnnnnnnnnnnnnnnnnnnnnnnnnnnnnnnnnnnnnnnnnnnnnnnnnnnnnnnnnnnnnnnnnnnnnnnnnnnnnnnnnnnnnnnnnnnnnnnnnnnnnnnnnnnnnnnnnnnnnnnnnnnnnnnnnnnnnnnnnnnnnnnnnnnnnnnnnnnnnnnnnnnnnnnnnnnnnnnnnnnnnnnnnnnnnnnnnnnnnnnnnnnnnnnnnnnnnnnnnnnnnnnnnnnnnnnnnnnnnnnnnnnnnnnnnnnnnnnnnnnnnnnnnnnnnnnnnnnnnnnnnnnnnnnnnnnnnnnnnnnnnnnnnnnnnnnnnnnnnnnnnnnnnnnnnnnnnnnnnnnnnnnnnnnnnnnnnnnnnnnnnnnnnnnnnnnnnnnnnnnnnnnnnnnnnnnnnnnnnnnnnnnnnnnnnnnnnnnnnnnnnnnnnnnnnnnnnnnnnnnnnnnnnnnnnnnnnnnnnnnnnnnnnnnnnnnnnnnnnnnnnnnnnnnnnnnnnnnnnnnnnnnnnnnnnnnnnnnnnnnnnnnnnnnnnnnnnnnnnnnnnnnnnnnnnnnnnnnnnnnnnnnnnnnnnnnnnnnnnnnnnnnnnnnnnnnnnnnnnnnnnnnnnnnnnnnnnnnnnnnnnnnnnnnnnnnnnnnnnnnnnnnnnnnnnnnnnnnnnnnnnnnnnnnnnnnnnnnnnnnnnnnnnnnnnnnnnnnnnnnnnnnnnnnnnnnnnnnnnnnnnnnnnnnnnnnnnnnnnnnnnnnnnnnnnnnnnnnnnnnnnnnnnnnnnnnnnnnnnnnnnnnnnnnnnnnnnnnnnnnnnnnnnnnnnnnnnnnnnnnnnnnnnnnnnnnnnnnnnnnnnnnnnnnnnnnnnnnnnnnnnnnnnnnnnnnnnnnnnnnnnnnnnnnnnnnnnnnnnnnnnnnnnnnnnnnnnnnnnnnnnnnnnnnnnnnnnnnnnnnnnnnnnnnnnnnnnnnnnnnnnnnnnnnnnnnnnnnnnnnnnnnnnnnnnnnnnnnnnnnnnnnnnnnnnnnnnnnnnnnnnnnnnnnnnnnnnnnnnnnnnnnnnnnnnnnnnnnnnnnnnnnnnnnnnnnnnnnnnnnnnnnnnnnnnnnnnnnnnnnnnnnnnnnnnnnnnnnnnnnnnnnnnnnnnnnnnnnnnnnnnnnnnnnnnnnnnnnnnnnnnnnnnnnnnnnnnnnnnnnnnnnnnnnnnnnnnnnnnnnnnnnnnnnnnnnnnnnnnnnnnnnnnnnnnnnnnnnnnnnnnnnnnnnnnnnnnnnnnnnnnnnnnnnnnnnnnnnnnnnnnnnnnnnnnnnnnnnnnnnnnnnnnnnnnnnnnnnnnnnnnnnnnnnnnnnnnnnnnnnnnnnnnnnnnnnnnnnnnnnnnnnnnnnnnnnnnnnnnnnnnnnnnnnnnnnnnnnnnnnnnnnnnnnnnnnnnnnnnnnnnnnnnnnnnnnnnnnnnnnnnnnnnnnnnnnnnnnnnnnnnnnnnnnnnnnnnnnnnnnnnnnnnnnnnnnnnnnnnnnnnnnnnnnnnnnnnnnnnnnnnnnnnnnnnnnnnnnnnnnnnnnnnnnnnnnnnnnnnnnnnnnnnnnnnnnnnnnnnnnnnnnnnnnnnnnnnnnnnnnnnnnnnnnnnnnnnnnnnnnnnnnnnnnnnnnnnnnnnnnnnnnnnnnnnnnnnnnnnnnnnnnnnnnnnnnnnnnnnnnnnnnnnnnnnnnnnnnnnnnnnnnnnnnnnnnnnnnnnnnnnnnnnnnnnnnnnnnnnnnnnnnnnnnnnnnnnnnnnnnnnnnnnnnnnnnnnnnnnnnnnnnnnnnnnnnnnnnnnnnnnnnnnnnnnnnnnnnnnnnnnnnnnnnnnnnnnnnnnnnnnnnnnnnnnnnnnnnnnnnnnnnnnnnnnnnnnnnnnnnnnnnnnnnnnnnnnnnnnnnnnnnnnnnnnnnnnnnnnnnnnnnnnnnnnnnnnnnnnnnnnnnnnnnnnnnnnnnnnnnnnnnnnnnnnnnnnnnnnnnnnnnnnnnnnnnnnnnnnnnnnnnnnnnnnnnnnnnnnnnnnnnnnnnnnnnnnnnnnnnnnnnnnnnnnnnnnnnnnnnnnnnnnnnnnnnnnnnnnnnnnnnnnnnnnnnnnnnnnnnnnnnnnnnnnnnnnnnnnnnnnnnnnnnnnnnnnnnnnnnnnnnnnnnnnnnnnnnnnnnnnnnnnnnnnnnnnnnnnnnnnnnnnnnnnnnnnnnnnnnnnnnnnnnnnnnnnnnnnnnnnnnnnnnnnnnnnnnnnnnnnnnnnnnnnnnnnnnnnnnnnnnnnnnnnnnnnnnnnnnnnnnnnnnnnnnnnnnnnnnnnnnnnnnnnnnnnnnnnnnnnnnnnnnnnnnnnnnnnnnnnnnnnnnnnnnnnnnnnnnnnnnnnnnnnnnnnnnnnnnnnnnnnnnnnnnnnnnnnnnnnnnnnnnnnnnnnnnnnnnnnnnnnnnnnnnnnnnnnnnnnnnnnnnnnnnnnnnnnnnnnnnnnnnnnnnnnnnnnnnnnnnnnnnnnnnnnnnnnnnnnnnnnnnnnnnnnnnnnnnnnnnnnnnnnnnnnnnnnnnnnnnnnnnnnnnnnnnnnnnnnnnnnnnnnnnnnnnnnnnnnnnnnnnnnnnnnnnnnnnnnnnnnnnnnnnnnnnnnnnnnnnnnnnnnnnnnnnnnnnnnnnnnnnnnnnnnnnnnnnnnnnnnnnnnnnnnnnnnnnnnnnnnnnnnnnnnnnnnnnnnnnnnnnnnnnnnnnnnnnnnnnnnnnnnnnnnnnnnnnnnnnnnnnnnnnnnnnnnnnnnnnnnnnnnnnnnnnnnnnnnnnnnnnnnnnnnnnnnnnnnnnnnnnnnnnnnnnnnnnnnnnnnnnnnnnnnnnnnnnnnnnnnnnnnnnnnnnnnnnnnnnnnnnnnnnnnnnnnnnnnnnnnnnnnnnnnnnnnnnnnnnnnnnnnnnnnnnnnnnnnnnnnnnnnnnnnnnnnnnnnnnnnnnnnnnnnnnnnnnnnnnnnnnnnnnnnnnnnnnnnnnnnnnnnnnnnnnnnnnnnnnnnnnnnnnnnnnnnnnnnnnnnnnnnnnnnnnnnnnnnnnnnnnnnnnnnnnnnnnnnnnnnnnnnnnnnnnnnnnnnnnnnnnnnnnnnnnnnnnnnnnnnnnnnnnnnnnnnnnnnnnnnnnnnnnnnnnnnnnnnnnnnnnnnnnnnnnnnnnnnnnnnnnnnnnnnnnnnnnnnnnnnnnnnnnnnnnnnnnnnnnnnnnnnnnnnnnnnnnnnnnnnnnnnnnnnnnnnnnnnnnnnnnnnnnnnnnnnnnnnnnnnnnnnnnnnnnnnnnnnnnnnnnnnnnnnnnnnnnnnnnnnnnnnnnnnnnnnnnnnnnnnnnnnnnnnnnnnnnnnnnnnnnnnnnnnnnnnnnnnnnnnnnnnnnnnnnnnnnnnnnnnnnnnnnnnnnnnnnnnnnnnnnnnnnnnnnnnnnnnnnnnnnnnnnnnnnnnnnnnnnnnnnnnnnnnnnnnnnnnnnnnnnnnnnnnnnnnnnnnnnnnnnnnnnnnnnnnnnnnnnnnnnnnnnnnnnnnnnnnnnnnnnnnnnnnnnnnnnnnnnnnnnnnnnnnnnnnnnnnnnnnnnnnnnnnnnnnnnnnnnnnnnnnnnnnnnnnnnnnnnnnnnnnnnnnnnnnnnnnnnnnnnnnnnnnnnnnnnnnnnnnnnnnnnnnnnnnnnnnnnnnnnnnnnnnnnnnnnnnnnnnnnnnnnnnnnnnnnnnnnnnnnnnnnnnnnnnnnnnnnnnnnnnnnnnnnnnnnnnnnnnnnnnnnnnnnnnnnnnnnnnnnnnnnnnnnnnnnnnnnnnnnnnnnnnnnnnnnnnnnnnnnnnnnnnnnnnnnnnnnnnnnnnnnnnnnnnnnnnnnnnnnnnnnnnnnnnnnnnnnnnnnnnnnnnnnnnnnnnnnnnnnnnnnnnnnnnnnnnnnnnnnnnnnnnnnnnnnnnnnnnnnnnnnnnnnnnnnnnnnnnnnnnnnnnnnnnnnnnnnnnnnnnnnnnnnnnnnnnnnnnnnnnnnnnnnnnnnnnnnnnnnnnnnnnnnnnnnnnnnnnnnnnnnnnnnnnnnnnnnnnnnnnnnnnnnnnnnnnnnnnnnnnnnnnnnnnnnnnnnnnnnnnnnnnnnnnnnnnnnnnnnnnnnnnnnnnnnnnnnnnnnnnnnnnnnnnnnnnnnnnnnnnnnnnnnnnnnnnnnnnnnnnnnnnnnnnnnnnnnnnnnnnnnnnnnnnnnnnnnnnnnnnnnnnnnnnnnnnnnnnnnnnnnnnnnnnnnnnnnnnnnnnnnnnnnnnnnnnnnnnnnnnnnnnnnnnnnnnnnnnnnnnnnnnnnnnnnnnnnnnnnnnnnnnnnnnnnnnnnnnnnnnnnnnnnnnnnnnnnnnnnnnnnnnnnnnnnnnnnnnnnnnnnnnnnnnnnnnnnnnnnnnnnnnnnnnnnnnnnnnnnnnnnnnnnnnnnnnnnnnnnnnnnnnnnnnnnnnnnnnnnnnnnnnnnnnnnnnnnnnnnnnnnnnnnnnnnnnnnnnnnnnnnnnnnnnnnnnnnnnnnnnnnnnnnnnnnnnnnnnnnnnnnnnnnnnnnnnnnnnnnnnnnnnnnnnnnnnnnnnnnnnnnnnnnnnnnnnnnnnnnnnnnnnnnnnnnnnnnnnnnnnnnnnnnnnnnnnnnnnnnnnnnnnnnnnnnnnnnnnnnnnnnnnnnnnnnnnnnnnnnnnnnnnnnnnnnnnnnnnnnnnnnnnnnnnnnnnnnnnnnnnnnnnnnnnnnnnnnnnnnnnnnnnnnnnnnnnnnnnnnnnnnnnnnnnnnnnnnnnnnnnnnnnnnnnnnnnnnnnnnnnnnnnnnnnnnnnnnnnnnnnnnnnnnnnnnnnnnnnnnnnnnnnnnnnnnnnnnnnnnnnnnnnnnnnnnnnnnnnnnnnnnnnnnnnnnnnnnnnnnnnnnnnnnnnnnnnnnnnnnnnnnnnnnnnnnnnnnnnnnnnnnnnnnnnnnnnnnnnnnnnnnnnnnnnnnnnnnnnnnnnnnnnnnnnnnnnnnnnnnnnnnnnnnnnnnnnnnnnnnnnnnnnnnnnnnnnnnnnnnnnnnnnnnnnnnnnnnnnnnnnnnnnnnnnnnnnnnnnnnnnnnnnnnnnnnnnnnnnnnnnnnnnnnnnnnnnnnnnnnnnnnnnnnnnnnnnnnnnnnnnnnnnnnnnnnnnnnnnnnnnnnnnnnnnnnnnnnnnnnnnnnnnnnnnnnnnnnnnnnnnnnnnnnnnnnnnnnnnnnnnnnnnnnnnnnnnnnnnnnnnnnnnnnnnnnnnnnnnnnnnnnnnnnnnnnnnnnnnnnnnnnnnnnnnnnnnnnnnnnnnnnnnnnnnnnnnnnnnnnnnnnnnnnnnnnnnnnnnnnnnnnnnnnnnnnnnnnnnnnnnnnnnnnnnnnnnnnnnnnnnnnnnnnnnnnnnnnnnnnnnnnnnnnnnnnnnnnnnnnnnnnnnnnnnnnnnnnnnnnnnnnnnnnnnnnnnnnnnnnnnnnnnnnnnnnnnnnnnnnnnnnnnnnnnnnnnnnnnnnnnnnnnnnnnnnnnnnnnnnnnnnnnnnnnnnnnnnnnnnnnnnnnnnnnnnnnnnnnnnnnnnnnnnnnnnnnnnnnnnnnnnnnnnnnnnnnnnnnnnnnnnnnnnnnnnnnnnnnnnnnnnnnnnnnnnnnnnnnnnnnnnnnnnnnnnnnnnnnnnnnnnnnnnnnnnnnnnnnnnnnnnnnnnnnnnnnnnnnnnnnnnnnnnnnnnnnnnnnnnnnnnnnnnnnnnnnnnnnnnnnnnnnnnnnnnnnnnnnnnnnnnnnnnnnnnnnnnnnnnnnnnnnnnnnnnnnnnnnnnnnnnnnnnnnnnnnnnnnnnnnnnnnnnnnnnnnnnnnnnnnnnnnnnnnnnnnnnnnnnnnnnnnnnnnnnnnnnnnnnnnnnnnnnnnnnnnnnnnnnnnnnnnnnnnnnnnnnnnnnnnnnnnnnnnnnnnnnnnnnnnnnnnnnnnnnnnnnnnnnnnnnnnnnnnnnnnnnnnnnnnnnnnnnnnnnnnnnnnnnnnnnnnnnnnnnnnnnnnnnnnnnnnnnnnnnnnnnnnnnnnnnnnnnnnnnnnnnnnnnnnnnnnnnnnnnnnnnnnnnnnnnnnnnnnnnnnnnnnnnnnnnnnnnnnnnnnnnnnnnnnnnnnnnnnnnnnnnnnnnnnnnnnnnnnnnnnnnnnnnnnnnnnnnnnnnnnnnnnnnnnnnnnnnnnnnnnnnnnnnnnnnnnnnnnnnnnnnnnnnnnnnnnnnnnnnnnnnnnnnnnnnnnnnnnnnnnnnnnnnnnnnnnnnnnnnnnnnnnnnnnnnnnnnnnnnnnnnnnnnnnnnnnnnnnnnnnnnnnnnnnnnnnnnnnnnnnnnnnnnnnnnnnnnnnnnnnnnnnnnnnnnnnnnnnnnnnnnnnnnnnnnnnnnnnnnnnnnnnnnnnnnnnnnnnnnnnnnnnnnnnnnnnnnnnnnnnnnnnnnnnnnnnnnnnnnnnnnnnnnnnnnnnnnnnnnnnnnnnnnnnnnnnnnnnnnnnnnnnnnnnnnnnnnnnnnnnnnnnnnnnnnnnnnnnnnnnnnnnnnnnnnnnnnnnnnnnnnnnnnnnnnnnnnnnnnnnnnnnnnnnnnnnnnnnnnnnnnnnnnnnnnnnnnnnnnnnnnnnnnnnnnnnnnnnnnnnnnnnnnnnnnnnnnnnnnnnnnnnnnnnnnnnnnnnnnnnnnnnnnnnnnnnnnnnnnnnnnnnnnnnnnnnnnnnnnnnnnnnnnnnnnnnnnnnnnnnnnnnnnnnnnnnnnnnnnnnnnnnnnnnnnnnnnnnnnnnnnnnnnnnnnnnnnnnnnnnnnnnnnnnnnnnnnnnnnnnnnnnnnnnnnnnnnnnnnnnnnnnnnnnnnnnnnnnnnnnnnnnnnnnnnnnnnnnnnnnnnnnnnnnnnnnnnnnnnnnnnnnnnnnnnnnnnnnnnnnnnnnnnnnnnnnnnnnnnnnnnnnnnnnnnnnnnnnnnnnnnnnnnnnnnnnnnnnnnnnnnnnnnnnnnnnnnnnnnnnnnnnnnnnnnnnnnnnnnnnnnnnnnnnnnnnnnnnnnnnnnnnnnnnnnnnnnnnnnnnnnnnnnnnnnnnnnnnnnnnnnnnnnnnnnnnnnnnnnnnnnnnnnnnnnnnnnnnnnnnnnnnnnnnnnnnnnnnnnnnnnnnnnnnnnnnnnnnnnnnnnnnnnnnnnnnnnnnnnnnnnnnnnnnnnnnnnnnnnnnnnnnnnnnnnnnnnnnnnnnnnnnnnnnnnnnnnnnnnnnnnnnnnnnnnnnnnnnnnnnnnnnnnnnnnnnnnnnnnnnnnnnnnnnnnnnnnnnnnnnnnnnnnnnnnnnnnnnnnnnnnnnnnnnnnnnnnnnnnnnnnnnnnnnnnnnnnnnnnnnnnnnnnnnnnnnnnnnnnnnnnnnnnnnnnnnnnnnnnnnnnnnnnnnnnnnnnnnnnnnnnnnnnnnnnnnnnnnnnnnnnnnnnnnnnnnnnnnnnnnnnnnnnnnnnnnnnnnnnnnnnnnnnnnnnnnnnnnnnnnnnnnnnnnnnnnnnnnnnnnnnnnnnnnnnnnnnnnnnnnnnnnnnnnnnnnnnnnnnnnnnnnnnnnnnnnnnnnnnnnnnnnnnnnnnnnnnnnnnnnnnnnnnnnnnnnnnnnnnnnnnnnnnnnnnnnnnnnnnnnnnnnnnnnnnnnnnnnnnnnnnnnnnnnnnnnnnnnnnnnnnnnnnnnnnnnnnnnnnnnnnnnnnnnnnnnnnnnnnnnnnnnnnnnnnnnnnnnnnnnnnnnnnnnnnnnnnnnnnnnnnnnnnnnnnnnnnnnnnnnnnnnnnnnnnnnnnnnnnnnnnnnnnnnnnnnnnnnnnnnnnnnnnnnnnnnnnnnnnnnnnnnnnnnnnnnnnnnnnnnnnnnnnnnnnnnnnnnnnnnnnnnnnnnnnnnnnnnnnnnnnnnnnnnnnnnnnnnnnnnnnnnnnnnnnnnnnnnnnnnnnnnnnnnnnnnnnnnnnnnnnnnnnnnnnnnnnnnnnnnnnnnnnnnnnnnnnnnnnnnnnnnnnnnnnnnnnnnnnnnnnnnnnnnnnnnnnnnnnnnnnnnnnnnnnnnnnnnnnnnnnnnnnnnnnnnnnnnnnnnnnnnnnnnnnnnnnnnnnnnnnnnnnnnnnnnnnnnnnnnnnnnnnnnnnnnnnnnnnnnnnnnnnnnnnnnnnnnnnnnnnnnnnnnnnnnnnnnnnnnnnnnnnnnnnnnnnnnnnnnnnnnnnnnnnnnnnnnnnnnnnnnnnnnnnnnnnnnnnnnnnnnnnnnnnnnnnnnnnnnnnnnnnnnnnnnnnnnnnnnnnnnnnnnnnnnnnnnnnnnnnnnnnnnnnnnnnnnnnnnnnnnnnnnnnnnnnnnnnnnnnnnnnnnnnnnnnnnnnnnnnnnnnnnnnnnnnnnnnnnnnnnnnnnnnnnnnnnnnnnnnnnnnnnnnnnnnnnnnnnnnnnnnnnnnnnnnnnnnnnnnnnnnnnnnnnnnnnnnnnnnnnnnnnnnnnnnnnnnnnnnnnnnnnnnnnnnnnnnnnnnnnnnnnnnnnnnnnnnnnnnnnnnnnnnnnnnnnnnnnnnnnnnnnnnnnnnnnnnnnnnnnnnnnnnnnnnnnnnnnnnnnnnnnnnnnnnnnnnnnnnnnnnnnnnnnnnnnnnnnnnnnnnnnnnnnnnnnnnnnnnnnnnnnnnnnnnnnnnnnnnnnnnnnnnnnnnnnnnnnnnnnnnnnnnnnnnnnnnnnnnnnnnnnnnnnnnnnnnnnnnnnnnnnnnnnnnnnnnnnnnnnnnnnnnnnnnnnnnnnnnnnnnnnnnnnnnnnnnnnnnnnnnnnnnnnnnnnnnnnnnnnnnnnnnnnnnnnnnnnnnnnnnnnnnnnnnnnnnnnnnnnnnnnnnnnnnnnnnnnnnnnnnnnnnnnnnnnnnnnnnnnnnnnnnnnnnnnnnnnnnnnnnnnnnnnnnnnnnnnnnnnnnnnnnnnnnnnnnnnnnnnnnnnnnnnnnnnnnnnnnnnnnnnnnnnnnnnnnnnnnnnnnnnnnnnnnnnnnnnnnnnnnnnnnnnnnnnnnnnnnnnnnnnnnnnnnnnnnnnnnnnnnnnnnnnnnnnnnnnnnnnnnnnnnnnnnnnnnnnnnnnnnnnnnnnnnnnnnnnnnnnnnnnnnnnnnnnnnnnnnnnnnnnnnnnnnnnnnnnnnnnnnnnnnnnnnnnnnnnnnnnnnnnnnnnnnnnnnnnnnnnnnnnnnnnnnnnnnnnnnnnnnnnnnnnnnnnnnnnnnnnnnnnnnnnnnnnnnnnnnnnnnnnnnnnnnnnnnnnnnnnnnnnnnnnnnnnnnnnnnnnnnnnnnnnnnnnnnnnnnnnnnnnnnnnnnnnnnnnnnnnnnnnnnnnnnnnnnnnnnnnnnnnnnnnnnnnnnnnnnnnnnnnnnnnnnnnnnnnnnnnnnnnnnnnnnnnnnnnnnnnnnnnnnnnnnnnnnnnnnnnnnnnnnnnnnnnnnnnnnnnnnnnnnnnnnnnnnnnnnnnnnnnnnnnnnnnnnnnnnnnnnnnnnnnnnnnnnnnnnnnnnnnnnnnnnnnnnnnnnnnnnnnnnnnnnnnnnnnnnnnnnnnnnnnnnnnnnnnnnnnnnnnnnnnnnnnnnnnnnnnnnnnnnnnnnnnnnnnnnnnnnnnnnnnnnnnnnnnnnnnnnnnnnnnnnnnnnnnnnnnnnnnnnnnnnnnnnnnnnnnnnnnnnnnnnnnnnnnnnnnnnnnnnnnnnnnnnnnnnnnnnnnnnnnnnnnnnnnnnnnnnnnnnnnnnnnnnnnnnnnnnnnnnnnnnnnnnnnnnnnnnnnnnnnnnnnnnnnnnnnnnnnnnnnnnnnnnnnnnnnnnnnnnnnnnnnnnnnnnnnnnnnnnnnnnnnnnnnnnnnnnnnnnnnnnnnnnnnnnnnnnnnnnnnnnnnnnnnnnnnnnnnnnnnnnnnnnnnnnnnnnnnnnnnnnnnnnnnnnnnnnnnnnnnnnnnnnnnnnnnnnnnnnnnnnnnnnnnnnnnnnnnnnnnnnnnnnnnnnnnnnnnnnnnnnnnnnnnnnnnnnnnnnnnnnnnnnnnnnnnnnnnnnnnnnnnnnnnnnnnnnnnnnnnnnnnnnnnnnnnnnnnnnnnnnnnnnnnnnnnnnnnnnnnnnnnnnnnnnnnnnnnnnnnnnnnnnnnnnnnnnnnnnnnnnnnnnnnnnnnnnnnnnnnnnnnnnnnnnnnnnnnnnnnnnnnnnnnnnnnnnnnnnnnnnnnnnnnnnnnnnnnnnnnnnnnnnnnnnnnnnnnnnnnnnnnnnnnnnnnnnnnnnnnnnnnnnnnnnnnnnnnnnnnnnnnnnnnnnnnnnnnnnnnnnnnnnnnnnnnnnnnnnnnnnnnnnnnnnnnnnnnnnnnnnnnnnnnnnnnnnnnnnnnnnnnnnnnnnnnnnnnnnnnnnnnnnnnnnnnnnnnnnnnnnnnnnnnnnnnnnnnnnnnnnnnnnnnnnnnnnnnnnnnnnnnnnnnnnnnnnnnnnnnnnnnnnnnnnnnnnnnnnnnnnnnnnnnnnnnnnnnnnnnnnnnnnnnnnnnnnnnnnnnnnnnnnnnnnnnnnnnnnnnnnnnnnnnnnnnnnnnnnnnnnnnnnnnnnnnnnnnnnnnnnnnnnnnnnnnnnnnnnnnnnnnnnnnnnnnnnnnnnnnnnnnnnnnnnnnnnnnnnnnnnnnnnnnnnnnnnnnnnnnnnnnnnnnnnnnnnnnnnnnnnnnnnnnnnnnnnnnnnnnnnnnnnnnnnnnnnnnnnnnnnnnnnnnnnnnnnnnnnnnnnnnnnnnnnnnnnnnnnnnnnnnnnnnnnnnnnnnnnnnnnnnnnnnnnnnnnnnnnnnnnnnnnnnnnnnnnnnnnnnnnnnnnnnnnnnnnnnnnnnnnnnnnnnnnnnnnnnnnnnnnnnnnnnnnnnnnnnnnnnnnnnnnnnnnnnnnnnnnnnnnnnnnnnnnnnnnnnnnnnnnnnnnnnnnnnnnnnnnnnnnnnnnnnnnnnnnnnnnnnnnnnnnnnnnnnnnnnnnnnnnnnnnnnnnnnnnnnnnnnnnnnnnnnnnnnnnnnnnnnnnnnnnnnnnnnnnnnnnnnnnnnnnnnnnnnnnnnnnnnnnnnnnnnnnnnnnnnnnnnnnnnnnnnnnnnnnnnnnnnnnnnnnnnnnnnnnnnnnnnnnnnnnnnnnnnnnnnnnnnnnnnnnnnnnnnnnnnnnnnnnnnnnnnnnnnnnnnnnnnnnnnnnnnnnnnnnnnnnnnnnnnnnnnnnnnnnnnnnnnnnnnnnnnnnnnnnnnnnnnnnnnnnnnnnnnnnnnnnnnnnnnnnnnnnnnnnnnnnnnnnnnnnnnnnnnnnnnnnnnnnnnnnnnnnnnnnnnnnnnnnnnnnnnnnnnnnnnnnnnnnnnnnnnnnnnnnnnnnnnnnnnnnnnnnnnnnnnnnnnnnnnnnnnnnnnnnnnnnnnnnnnnnnnnnnnnnnnnnnnnnnnnnnnnnnnnnnnnnnnnnnnnnnnnnnnnnnnnnnnnnnnnnnnnnnnnnnnnnnnnnnnnnnnnnnnnnnnnnnnnnnnnnnnnnnnnnnnnnnnnnnnnnnnnnnnnnnnnnnnnnnnnnnnnnnnnnnnnnnnnnnnnnnnnnnnnnnnnnnnnnnnnnnnnnnnnnnnnnnnnnnnnnnnnnnnnnnnnnnnnnnnnnnnnnnnnnnnnnnnnnnnnnnnnnnnnnnnnnnnnnnnnnnnnnnnnnnnnnnnnnnnnnnnnnnnnnnnnnnnnnnnnnnnnnnnnnnnnnnnnnnnnnnnnnnnnnnnnnnnnnnnnnnnnnnnnnnnnnnnnnnnnnnnnnnnnnnnnnnnnnnnnnnnnnnnnnnnnnnnnnnnnnnnnnnnnnnnnnnnnnnnnnnnnnnnnnnnnnnnnnnnnnnnnnnnnnnnnnnnnnnnnnnnnnnnnnnnnnnnnnnnnnnnnnnnnnnnnnnnnnnnnnnnnnnnnnnnnnnnnnnnnnnnnnnnnnnnnnnnnnnnnnnnnnnnnnnnnnnnnnnnnnnnnnnnnnnnnnnnnnnnnnnnnnnnnnnnnnnnnnnnnnnnnnnnnnnnnnnnnnnnnnnnnnnnnnnnnnnnnnnnnnnnnnnnnnnnnnnnnnnnnnnnnnnnnnnnnnnnnnnnnnnnnnnnnnnnnnnnnnnnnnnnnnnnnnnnnnnnnnnnnnnnnnnnnnnnnnnnnnnnnnnnnnnnnnnnnnnnnnnnnnnnnnnnnnnnnnnnnnnnnnnnnnnnnnnnnnnnnnnnnnnnnnnnnnnnnnnnnnnnnnnnnnnnnnnnnnnnnnnnnnnnnnnnnnnnnnnnnnnnnnnnnnnnnnnnnnnnnnnnnnnnnnnnnnnnnnnnnnnnnnnnnnnnnnnnnnnnnnnnnnnnnnnnnnnnnnnnnnnnnnnnnnnnnnnnnnnnnnnnnnnnnnnnnnnnnnnnnnnnnnnnnnnnnnnnnnnnnnnnnnnnnnnnnnnnnnnnnnnnnnnnnnnnnnnnnnnnnnnnnnnnnnnnnnnnnnnnnnnnnnnnnnnnnnnnnnnnnnnnnnnnnnnnnnnnnnnnnnnnnnnnnnnnnnnnnnnnnnnnnnnnnnnnnnnnnnnnnnnnnnnnnnnnnnnnnnnnnnnnnnnnnnnnnnnnnnnnnnnnnnnnnnnnnnnnnnnnnnnnnnnnnnnnnnnnnnnnnnnnnnnnnnnnnnnnnnnnnnnnnnnnnnnnnnnnnnnnnnnnnnnnnnnnnnnnnnnnnnnnnnnnnnnnnnnnnnnnnnnnnnnnnnnnnnnnnnnnnnnnnnnnnnnnnnnnnnnnnnnnnnnnnnnnnnnnnnnnnnnnnnnnnnnnnnnnnnnnnnnnnnnnnnnnnnnnnnnnnnnnnnnnnnnnnnnnnnnnnnnnnnnnnnnnnnnnnnnnnnnnnnnnnnnnnnnnnnnnnnnnnnnnnnnnnnnnnnnnnnnnnnnnnnnnnnnnnnnnnnnnnnnnnnnnnnnnnnnnnnnnnnnnnnnnnnnnnnnnnnnnnnnnnnnnnnnnnnnnnnnnnnnnnnnnnnnnnnnnnnnnnnnnnnnnnnnnnnnnnnnnnnnnnnnnnnnnnnnnnnnnnnnnnnnnnnnnnnnnnnnnnnnnnnnnnnnnnnnnnnnnnnnnnnnnnnnnnnnnnnnnnnnnnnnnnnnnnnnnnnnnnnnnnnnnnnnnnnnnnnnnnnnnnnnnnnnnnnnnnnnnnnnnnnnnnnnnnnnnnnnnnnnnnnnnnnnnnnnnnnnnnnnnnnnnnnnnnnnnnnnnnnnnnnnnnnnnnnnnnnnnnnnnnnnnnnnnnnnnnnnnnnnnnnnnnnnnnnnnnnnnnnnnnnnnnnnnnnnnnnnnnnnnnnnnnnnnnnnnnnnnnnnnnnnnnnnnnnnnnnnnnnnnnnnnnnnnnnnnnnnnnnnnnnnnnnnnnnnnnnnnnnnnnnnnnnnnnnnnnnnnnnnnnnnnnnnnnnnnnnnnnnnnnnnnnnnnnnnnnnnnnnnnnnnnnnnnnnnnnnnnnnnnnnnnnnnnnnnnnnnnnnnnnnnnnnnnnnnnnnnnnnnnnnnnnnnnnnnnnnnnnnnnnnnnnnnnnnnnnnnnnnnnnnnnnnnnnnnnnnnnnnnnnnnnnnnnnnnnnnnnnnnnnnnnnnnnnnnnnnnnnnnnnnnnnnnnnnnnnnnnnnnnnnnnnnnnnnnnnnnnnnnnnnnnnnnnnnnnnnnnnnnnnnnnnnnnnnnnnnnnnnnnnnnnnnnnnnnnnnnnnnnnnnnnnnnnnnnnnnnnnnnnnnnnnnnnnnnnnnnnnnnnnnnnnnnnnnnnnnnnnnnnnnnnnnnnnnnnnnnnnnnnnnnnnnnnnnnnnnnnnnnnnnnnnnnnnnnnnnnnnnnnnnnnnnnnnnnnnnnnnnnnnnnnnnnnnnnnnnnnnnnnnnnnnnnnnnnnnnnnnnnnnnnnnnnnnnnnnnnnnnnnnnnnnnnnnnnnnnnnnnnnnnnnnnnnnnnnnnnnnnnnnnnnnnnnnnnnnnnnnnnnnnnnnnnnnnnnnnnnnnnnnnnnnnnnnnnnnnnnnnnnnnnnnnnnnnnnnnnnnnnnnnnnnnnnnnnnnnnnnnnnnnnnnnnnnnnnnnnnnnnnnnnnnnnnnnnnnnnnnnnnnnnnnnnnnnnnnnnnnnnnnnnnnnnnnnnnnnnnnnnnnnnnnnnnnnnnnnnnnnnnnnnnnnnnnnnnnnnnnnnnnnnnnnnnnnnnnnnnnnnnnnnnnnnnnnnnnnnnnnnnnnnnnnnnnnnnnnnnnnnnnnnnnnnnnnnnnnnnnnnnnnnnnnnnnnnnnnnnnnnnnnnnnnnnnnnnnnnnnnnnnnnnnnnnnnnnnnnnnnnnnnnnnnnnnnnnnnnnnnnnnnnnnnnnnnnnnnnnnnnnnnnnnnnnnnnnnnnnnnnnnnnnnnnnnnnnnnnnnnnnnnnnnnnnnnnnnnnnnnnnnnnnnnnnnnnnnnnnnnnnnnnnnnnnnnnnnnnnnnnnnnnnnnnnnnnnnnnnnnnnnnnnnnnnnnnnnnnnnnnnnnnnnnnnnnnnnnnnnnnnnnnnnnnnnnnnnnnnnnnnnnnnnnnnnnnnnnnnnnnnnnnnnnnnnnnnnnnnnnnnnnnnnnnnnnnnnnnnnnnnnnnnnnnnnnnnnnnnnnnnnnnnnnnnnnnnnnnnnnnnnnnnnnnnnnnnnnnnnnnnnnnnnnnnnnnnnnnnnnnnnnnnnnnnnnnnnnnnnnnnnnnnnnnnnnnnnnnnnnnnnnnnnnnnnnnnnnnnnnnnnnnnnnnnnnnnnnnnnnnnnnnnnnnnnnnnnnnnnnnnnnnnnnnnnnnnnnnnnnnnnnnnnnnnnnnnnnnnnnnnnnnnnnnnnnnnnnnnnnnnnnnnnnnnnnnnnnnnnnnnnnnnnnnnnnnnnnnnnnnnnnnnnnnnnnnnnnnnnnnnnnnnnnnnnnnnnnnnnnnnnnnnnnnnnnnnnnnnnnnnnnnnnnnnnnnnnnnnnnnnnnnnnnnnnnnnnnnnnnnnnnnnnnnnnnnnnnnnnnnnnnnnnnnnnnnnnnnnnnnnnnnnnnnnnnnnnnnnnnnnnnnnnnnnnnnnnnnnnnnnnnnnnnnnnnnnnnnnnnnnnnnnnnnnnnnnnnnnnnnnnnnnnnnnnnnnnnnnnnnnnnnnnnnnnnnnnnnnnnnnnnnnnnnnnnnnnnnnnnnnnnnnnnnnnnnnnnnnnnnnnnnnnnnnnnnnnnnnnnnnnnnnnnnnnnnnnnnnnnnnnnnnnnnnnnnnnnnnnnnnnnnnnnnnnnnnnnnnnnnnnnnnnnnnnnnnnnnnnnnnnnnnnnnnnnnnnnnnnnnnnnnnnnnnnnnnnnnnnnnnnnnnnnnnnnnnnnnnnnnnnnnnnnnnnnnnnnnnnnnnnnnnnnnnnnnnnnnnnnnnnnnnnnnnnnnnnnnnnnnnnnnnnnnnnnnnnnnnnnnnnnnnnnnnnnnnnnnnnnnnnnnnnnnnnnnnnnnnnnnnnnnnnnnnnnnnnnnnnnnnnnnnnnnnnnnnnnnnnnnnnnnnnnnnnnnnnnnnnnnnnnnnnnnnnnnnnnnnnnnnnnnnnnnnnnnnnnnnnnnnnnnnnnnnnnnnnnnnnnnnnnnnnnnnnnnnnnnnnnnnnnnnnnnnnnnnnnnnnnnnnnnnnnnnnnnnnnnnnnnnnnnnnnnnnnnnnnnnnnnnnnnnnnnnnnnnnnnnnnnnnnnnnnnnnnnnnnnnnnnnnnnnnnnnnnnnnnnnnnnnnnnnnnnnnnnnnnnnnnnnnnnnnnnnnnnnnnnnnnnnnnnnnnnnnnnnnnnnnnnnnnnnnnnnnnnnnnnnnnnnnnnnnnnnnnnnnnnnnnnnnnnnnnnnnnnnnnnnnnnnnnnnnnnnnnnnnnnnnnnnnnnnnnnnnnnnnnnnnnnnnnnnnnnnnnnnnnnnnnnnnnnnnnnnnnnnnnnnnnnnnnnnnnnnnnnnnnnnnnnnnnnnnnnnnnnnnnnnnnnnnnnnnnnnnnnnnnnnnnnnnnnnnnnnnnnnnnnnnnnnnnnnnnnnnnnnnnnnnnnnnnnnnnnnnnnnnnnnnnnnnnnnnnnnnnnnnnnnnnnnnnnnnnnnnnnnnnnnnnnnnnnnnnnnnnnnnnnnnnnnnnnnnnnnnnnnnnnnnnnnnnnnnnnnnnnnnnnnnnnnnnnnnnnnnnnnnnnnnnnnnnnnnnnnnnnnnnnnnnnnnnnnnnnnnnnnnnnnnnnnnnnnnnnnnnnnnnnnnnnnnnnnnnnnnnnnnnnnnnnnnnnnnnnnnnnnnnnnnnnnnnnnnnnnnnnnnnnnnnnnnnnnnnnnnnnnnnnnnnnnnnnnnnnnnnnnnnnnnnnnnnnnnnnnnnnnnnnnnnnnnnnnnnnnnnnnnnnnnnnnnnnnnnnnnnnnnnnnnnnnnnnnnnnnnnnnnnnnnnnnnnnnnnnnnnnnnnnnnnnnnnnnnnnnnnnnnnnnnnnnnnnnnnnnnnnnnnnnnnnnnnnnnnnnnnnnnnnnnnnnnnnnnnnnnnnnnnnnnnnnnnnnnnnnnnnnnnnnnnnnnnnnnnnnnnnnnnnnnnnnnnnnnnnnnnnnnnnnnnnnnnnnnnnnnnnnnnnnnnnnnnnnnnnnnnnnnnnnnnnnnnnnnnnnnnnnnnnnnnnnnnnnnnnnnnnnnnnnnnnnnnnnnnnnnnnnnnnnnnnnnnnnnnnnnnnnnnnnnnnnnnnnnnnnnnnnnnnnnnnnnnnnnnnnnnnnnnnnnnnnnnnnnnnnnnnnnnnnnnnnnnnnnnnnnnnnnnnnnnnnnnnnnnnnnnnnnnnnnnnnnnnnnnnnnnnnnnnnnnnnnnnnnnnnnnnnnnnnnnnnnnnnnnnnnnnnnnnnnnnnnnnnnnnnnnnnnnnnnnnnnnnnnnnnnnnnnnnnnnnnnnnnnnnnnnnnnnnnnnnnnnnnnnnnnnnnnnnnnnnnnnnnnnnnnnnnnnnnnnnnnnnnnnnnnnnnnnnnnnnnnnnnnnnnnnnnnnnnnnnnnnnnnnnnnnnnnnnnnnnnnnnnnnnnnnnnnnnnnnnnnnnnnnnnnnnnnnnnnnnnnnnnnnnnnnnnnnnnnnnnnnnnnnnnnnnnnnnnnnnnnnnnnnnnnnnnnnnnnnnnnnnnnnnnnnnnnnnnnnnnnnnnnnnnnnnnnnnnnnnnnnnnnnnnnnnnnnnnnnnnnnnnnnnnnnnnnnnnnnnnnnnnnnnnnnnnnnnnnnnnnnnnnnnnnnnnnnnnnnnnnnnnnnnnnnnnnnnnnnnnnnnnnnnnnnnnnnnnnnnnnnnnnnnnnnnnnnnnnnnnnnnnnnnnnnnnnnnnnnnnnnnnnnnnnnnnnnnnnnnnnnnnnnnnnnnnnnnnnnnnnnnnnnnnnnnnnnnnnnnnnnnnnnnnnnnnnnnnnnnnnnnnnnnnnnnnnnnnnnnnnnnnnnnnnnnnnnnnnnnnnnnnnnnnnnnnnnnnnnnnnnnnnnnnnnnnnnnnnnnnnnnnnnnnnnnnnnnnnnnnnnnnnnnnnnnnnnnnnnnnnnnnnnnnnnnnnnnnnnnnnnnnnnnnnnnnnnnnnnnnnnnnnnnnnnnnnnnnnnnnnnnnnnnnnnnnnnnnnnnnnnnnnnnnnnnnnnnnnnnnnnnnnnnnnnnnnnnnnnnnnnnnnnnnnnnnnnnnnnnnnnnnnnnnnnnnnnnnnnnnnnnnnnnnnnnnnnnnnnnnnnnnnnnnnnnnnnnnnnnnnnnnnnnnnnnnnnnnnnnnnnnnnnnnnnnnnnnnnnnnnnnnnnnnnnnnnnnnnnnnnnnnnnnnnnnnnnnnnnnnnnnnnnnnnnnnnnnnnnnnnnnnnnnnnnnnnnnnnnnnnnnnnnnnnnnnnnnnnnnnnnnnnnnnnnnnnnnnnnnnnnnnnnnnnnnnnnnnnnnnnnnnnnnnnnnnnnnnnnnnnnnnnnnnnnnnnnnnnnnnnnnnnnnnnnnnnnnnnnnnnnnnnnnnnnnnnnnnnnnnnnnnnnnnnnnnnnnnnnnnnnnnnnnnnnnnnnnnnnnnnnnnnnnnnnnnnnnnnnnnnnnnnnnnnnnnnnnnnnnnnnnnnnnnnnnnnnnnnnnnnnnnnnnnnnnnnnnnnnnnnnnnnnnnnnnnnnnnnnnnnnnnnnnnnnnnnnnnnnnnnnnnnnnnnnnnnnnnnnnnnnnnnnnnnnnnnnnnnnnnnnnnnnnnnnnnnnnnnnnnnnnnnnnnnnnnnnnnnnnnnnnnnnnnnnnnnnnnnnnnnnnnnnnnnnnnnnnnnnnnnnnnnnnnnnnnnnnnnnnnnnnnnnnnnnnnnnnnnnnnnnnnnnnnnnnnnnnnnnnnnnnnnnnnnnnnnnnnnnnnnnnnnnnnnnnnnnnnnnnnnnnnnnnnnnnnnnnnnnnnnnnnnnnnnnnnnnnnnnnnnnnnnnnnnnnnnnnnnnnnnnnnnnnnnnnnnnnnnnnnnnnnnnnnnnnnnnnnnnnnnnnnnnnnnnnnnnnnnnnnnnnnnnnnnnnnnnnnnnnnnnnnnnnnnnnnnnnnnnnnnnnnnnnnnnnnnnnnnnnnnnnnnnnnnnnnnnnnnnnnnnnnnnnnnnnnnnnnnnnnnnnnnnnnnnnnnnnnnnnnnnnnnnnnnnnnnnnnnnnnnnnnnnnnnnnnnnnnnnnnnnnnnnnnnnnnnnnnnnnnnnnnnnnnnnnnnnnnnnnnnnnnnnnnnnnnnnnnnnnnnnnnnnnnnnnnnnnnnnnnnnnnnnnnnnnnnnnnnnnnnnnnnnnnnnnnnnnnnnnnnnnnnnnnnnnnnnnnnnnnnnnnnnnnnnnnnnnnnnnnnnnnnnnnnnnnnnnnnnnnnnnnnnnnnnnnnnnnnnnnnnnnnnnnnnnnnnnnnnnnnnnnnnnnnnnnnnnnnnnnnnnnnnnnnnnnnnnnnnnnnnnnnnnnnnnnnnnnnnnnnnnnnnnnnnnnnnnnnnnnnnnnnnnnnnnnnnnnnnnnnnnnnnnnnnnnnnnnnnnnnnnnnnnnnnnnnnnnnnnnnnnnnnnnnnnnnnnnnnnnnnnnnnnnnnnnnnnnnnnnnnnnnnnnnnnnnnnnnnnnnnnnnnnnnnnnnnnnnnnnnnnnnnnnnnnnnnnnnnnnnnnnnnnnnnnnnnnnnnnnnnnnnnnnnnnnnnnnnnnnnnnnnnnnnnnnnnnnnnnnnnnnnnnnnnnnnnnnnnnnnnnnnnnnnnnnnnnnnnnnnnnnnnnnnnnnnnnnnnnnnnnnnnnnnnnnnnnnnnnnnnnnnnnnnnnnnnnnnnnnnnnnnnnnnnnnnnnnnnnnnnnnnnnnnnnnnnnnnnnnnnnnnnnnnnnnnnnnnnnnnnnnnnnnnnnnnnnnnnnnnnnnnnnnnnnnnnnnnnnnnnnnnnnnnnnnnnnnnnnnnnnnnnnnnnnnnnnnnnnnnnnnnnnnnnnnnnnnnnnnnnnnnnnnnnnnnnnnnnnnnnnnnnnnnnnnnnnnnnnnnnnnnnnnnnnnnnnnnnnnnnnnnnnnnnnnnnnnnnnnnnnnnnnnnnnnnnnnnnnnnnnnnnnnnnnnnnnnnnnnnnnnnnnnnnnnnnnnnnnnnnnnnnnnnnnnnnnnnnnnnnnnnnnnnnnnnnnnnnnnnnnnnnnnnnnnnnnnnnnnnnnnnnnnnnnnnnnnnnnnnnnnnnnnnnnnnnnnnnnnnnnnnnnnnnnnnnnnnnnnnnnnnnnnnnnnnnnnnnnnnnnnnnnnnnnnnnnnnnnnnnnnnnnnnnnnnnnnnnnnnnnnnnnnnnnnnnnnnnnnnnnnnnnnnnnnnnnnnnnnnnnnnnnnnnnnnnnnnnnnnnnnnnnnnnnnnnnnnnnnnnnnnnnnnnnnnnnnnnnnnnnnnnnnnnnnnnnnnnnnnnnnnnnnnnnnnnnnnnnnnnnnnnnnnnnnnnnnnnnnnnnnnnnnnnnnnnnnnnnnnnnnnnnnnnnnnnnnnnnnnnnnnnnnnnnnnnnnnnnnnnnnnnnnnnnnnnnnnnnnnnnnnnnnnnnnnnnnnnnnnnnnnnnnnnnnnnnnnnnnnnnnnnnnnnnnnnnnnnnnnnnnnnnnnnnnnnnnnnnnnnnnnnnnnnnnnnnnnnnnnnnnnnnnnnnnnnnnnnnnnnnnnnnnnnnnnnnnnnnnnnnnnnnnnnnnnnnnnnnnnnnnnnnnnnnnnnnnnnnnnnnnnnnnnnnnnnnnnnnnnnnnnnnnnnnnnnnnnnnnnnnnnnnnnnnnnnnnnnnnnnnnnnnnnnnnnnnnnnnnnnnnnnnnnnnnnnnnnnnnnnnnnnnnnnnnnnnnnnnnnnnnnnnnnnnnnnnnnnnnnnnnnnnnnnnnnnnnnnnnnnnnnnnnnnnnnnnnnnnnnnnnnnnnnnnnnnnnnnnnnnnnnnnnnnnnnnnnnnnnnnnnnnnnnnnnnnnnnnnnnnnnnnnnnnnnnnnnnnnnnnnnnnnnnnnnnnnnnnnnnnnnnnnnnnnnnnnnnnnnnnnnnnnnnnnnnnnnnnnnnnnnnnnnnnnnnnnnnnnnnnnnnnnnnnnnnnnnnnnnnnnnnnnnnnnnnnnnnnnnnnnnnnnnnnnnnnnnnnnnnnnnnnnnnnnnnnnnnnnnnnnnnnnnnnnnnnnnnnnnnnnnnnnnnnnnnnnnnnnnnnnnnnnnnnnnnnnnnnnnnnnnnnnnnnnnnnnnnnnnnnnnnnnnnnnnnnnnnnnnnnnnnnnnnnnnnnnnnnnnnnnnnnnnnnnnnnnnnnnnnnnnnnnnnnnnnnnnnnnnnnnnnnnnnnnnnnnnnnnnnnnnnnnnnnnnnnnnnnnnnnnnnnnnnnnnnnnnnnnnnnnnnnnnnnnnnnnnnnnnnnnnnnnnnnnnnnnnnnnnnnnnnnnnnnnnnnnnnnnnnnnnnnnnnnnnnnnnnnnnnnnnnnnnnnnnnnnnnnnnnnnnnnnnnnnnnnnnnnnnnnnnnnnnnnnnnnnnnnnnnnnnnnnnnnnnnnnnnnnnnnnnnnnnnnnnnnnnnnnnnnnnnnnnnnnnnnnnnnnnnnnnnnnnnnnnnnnnnnnnnnnnnnnnnnnnnnnnnnnnnnnnnnnnnnnnnnnnnnnnnnnnnnnnnnnnnnnnnnnnnnnnnnnnnnnnnnnnnnnnnnnnnnnnnnnnnnnnnnnnnnnnnnnnnnnnnnnnnnnnnnnnnnnnnnnnnnnnnnnnnnnnnnnnnnnnnnnnnnnnnnnnnnnnnnnnnnnnnnnnnnnnnnnnnnnnnnnnnnnnnnnnnnnnnnnnnnnnnnnnnnnnnnnnnnnnnnnnnnnnnnnnnnnnnnnnnnnnnnnnnnnnnnnnnnnnnnnnnnnnnnnnnnnnnnnnnnnnnnnnnnnnnnnnnnnnnnnnnnnnnnnnnnnnnnnnnnnnnnnnnnnnnnnnnnnnnnnnnnnnnnnnnnnnnnnnnnnnnnnnnnnnnnnnnnnnnnnnnnnnnnnnnnnnnnnnnnnnnnnnnnnnnnnnnnnnnnnnnnnnnnnnnnnnnnnnnnnnnnnnnnnnnnnnnnnnnnnnnnnnnnnnnnnnnnnnnnnnnnnnnnnnnnnnnnnnnnnnnnnnnnnnnnnnnnnnnnnnnnnnnnnnnnnnnnnnnnnnnnnnnnnnnnnnnnnnnnnnnnnnnnnnnnnnnnnnnnnnnnnnnnnnnnnnnnnnnnnnnnnnnnnnnnnnnnnnnnnnnnnnnnnnnnnnnnnnnnnnnnnnnnnnnnnnnnnnnnnnnnnnnnnnnnnnnnnnnnnnnnnnnnnnnnnnnnnnnnnnnnnnnnnnnnnnnnnnnnnnnnnnnnnnnnnnnnnnnnnnnnnnnnnnnnnnnnnnnnnnnnnnnnnnnnnnnnnnnnnnnnnnnnnnnnnnnnnnnnnnnnnnnnnnnnnnnnnnnnnnnnnnnnnnnnnnnnnnnnnnnnnnnnnnnnnnnnnnnnnnnnnnnnnnnnnnnnnnnnnnnnnnnnnnnnnnnnnnnnnnnnnnnnnnnnnnnnnnnnnnnnnnnnnnnnnnnnnnnnnnnnnnnnnnnnnnnnnnnnnnnnnnnnnnnnnnnnnnnnnnnnnnnnnnnnnnnnnnnnnnnnnnnnnnnnnnnnnnnnnnnnnnnnnnnnnnnnnnnnnnnnnnnnnnnnnnnnnnnnnnnnnnnnnnnnnnnnnnnnnnnnnnnnnnnnnnnnnnnnnnnnnnnnnnnnnnnnnnnnnnnnnnnnnnnnnnnnnnnnnnnnnnnnnnnnnnnnnnnnnnnnnnnnnnnnnnnnnnnnnnnnnnnnnnnnnnnnnnnnnnnnnnnnnnnnnnnnnnnnnnnnnnnnnnnnnnnnnnnnnnnnnnnnnnnnnnnnnnnnnnnnnnnnnnnnnnnnnnnnnnnnnnnnnnnnnnnnnnnnnnnnnnnnnnnnnnnnnnnnnnnnnnnnnnnnnnnnnnnnnnnnnnnnnnnnnnnnnnnnnnnnnnnnnnnnnnnnnnnnnnnnnnnnnnnnnnnnnnnnnnnnnnnnnnnnnnnnnnnnnnnnnnnnnnnnnnnnnnnnnnnnnnnnnnnnnnnnnnnnnnnnnnnnnnnnnnnnnnnnnnnnnnnnnnnnnnnnnnnnnnnnnnnnnnnnnnnnnnnnnnnnnnnnnnnnnnnnnnnnnnnnnnnnnnnnnnnnnnnnnnnnnnnnnnnnnnnnnnnnnnnnnnnnnnnnnnnnnnnnnnnnnnnnnnnnnnnnnnnnnnnnnnnnnnnnnnnnnnnnnnnnnnnnnnnnnnnnnnnnnnnnnnnnnnnnnnnnnnnnnnnnnnnnnnnnnnnnnnnnnnnnnnnnnnnnnnnnnnnnnnnnnnnnnnnnnnnnnnnnnnnnnnnnnnnnnnnnnnnnnnnnnnnnnnnnnnnnnnnnnnnnnnnnnnnnnnnnnnnnnnnnnnnnnnnnnnnnnnnnnnnnnnnnnnnnnnnnnnnnnnnnnnnnnnnnnnnnnnnnnnnnnnnnnnnnnnnnnnnnnnnnnnnnnnnnnnnnnnnnnnnnnnnnnnnnnnnnnnnnnnnnnnnnnnnnnnnnnnnnnnnnnnnnnnnnnnnnnnnnnnnnnnnnnnnnnnnnnnnnnnnnnnnnnnnnnnnnnnnnnnnnnnnnnnnnnnnnnnnnnnnnnnnnnnnnnnnnnnnnnnnnnnnnnnnnnnnnnnnnnnnnnnnnnnnnnnnnnnnnnnnnnnnnnnnnnnnnnnnnnnnnnnnnnnnnnnnnnnnnnnnnnnnnnnnnnnnnnnnnnnnnnnnnnnnnnnnnnnnnnnnnnnnnnnnnnnnnnnnnnnnnnnnnnnnnnnnnnnnnnnnnnnnnnnnnnnnnnnnnnnnnnnnnnnnnnnnnnnnnnnnnnnnnnnnnnnnnnnnnnnnnnnnnnnnnnnnnnnnnnnnnnnnnnnnnnnnnnnnnnnnnnnnnnnnnnnnnnnnnnnnnnnnnnnnnnnnnnnnnnnnnnnnnnnnnnnnnnnnnnnnnnnnnnnnnnnnnnnnnnnnnnnnnnnnnnnnnnnnnnnnnnnnnnnnnnnnnnnnnnnnnnnnnnnnnnnnnnnnnnnnnnnnnnnnnnnnnnnnnnnnnnnnnnnnnnnnnnnnnnnnnnnnnnnnnnnnnnnnnnnnnnnnnnnnnnnnnnnnnnnnnnnnnnnnnnnnnnnnnnnnnnnnnnnnnnnnnnnnnnnnnnnnnnnnnnnnnnnnnnnnnnnnnnnnnnnnnnnnnnnnnnnnnnnnnnnnnnnnnnnnnnnnnnnnnnnnnnnnnnnnnnnnnnnnnnnnnnnnnnnnnnnnnnnnnnnnnnnnnnnnnnnnnnnnnnnnnnnnnnnnnnnnnnnnnnnnnnnnnnnnnnnnnnnnnnnnnnnnnnnnnnnnnnnnnnnnnnnnnnnnnnnnnnnnnnnnnnnnnnnnnnnnnnnnnnnnnnnnnnnnnnnnnnnnnnnnnnnnnnnnnnnnnnnnnnnnnnnnnnnnnnnnnnnnnnnnnnnnnnnnnnnnnnnnnnnnnnnnnnnnnnnnnnnnnnnnnnnnnnnnnnnnnnnnnnnnnnnnnnnnnnnnnnnnnnnnnnnnnnnnnnnnnnnnnnnnnnnnnnnnnnnnnnnnnnnnnnnnnnnnnnnnnnnnnnnnnnnnnnnnnnnnnnnnnnnnnnnnnnnnnnnnnnnnnnnnnnnnnnnnnnnnnnnnnnnnnnnnnnnnnnnnnnnnnnnnnnnnnnnnnnnnnnnnnnnnnnnnnnnnnnnnnnnnnnnnnnnnnnnnnnnnnnnnnnnnnnnnnnnnnnnnnnnnnnnnnnnnnnnnnnnnnnnnnnnnnnnnnnnnnnnnnnnnnnnnnnnnnnnnnnnnnnnnnnnnnnnnnnnnnnnnnnnnnnnnnnnnnnnnnnnnnnnnnnnnnnnnnnnnnnnnnnnnnnnnnnnnnnnnnnnnnnnnnnnnnnnnnnnnnnnnnnnnnnnnnnnnnnnnnnnnnnnnnnnnnnnnnnnnnnnnnnnnnnnnnnnnnnnnnnnnnnnnnnnnnnnnnnnnnnnnnnnnnnnnnnnnnnnnnnnnnnnnnnnnnnnnnnnnnnnnnnnnnnnnnnnnnnnnnnnnnnnnnnnnnnnnnnnnnnnnnnnnnnnnnnnnnnnnnnnnnnnnnnnnnnnnnnnnnnnnnnnnnnnnnnnnnnnnnnnnnnnnnnnnnnnnnnnnnnnnnnnnnnnnnnnnnnnnnnnnnnnnnnnnnnnnnnnnnnnnnnnnnnnnnnnnnnnnnnnnnnnnnnnnnnnnnnnnnnnnnnnnnnnnnnnnnnnnnnnnnnnnnnnnnnnnnnnnnnnnnnnnnnnnnnnnnnnnnnnnnnnnnnnnnnnnnnnnnnnnnnnnnnnnnnnnnnnnnnnnnnnnnnnnnnnnnnnnnnnnnnnnnnnnnnnnnnnnnnnnnnnnnnnnnnnnnnnnnnnnnnnnnnnnnnnnnnnnnnnnnnnnnnnnnnnnnnnnnnnnnnnnnnnnnnnnnnnnnnnnnnnnnnnnnnnnnnnnnnnnnnnnnnnnnnnnnnnnnnnnnnnnnnnnnnnnnnnnnnnnnnnnnnnnnnnnnnnnnnnnnnnnnnnnnnnnnnnnnnnnnnnnnnnnnnnnnnnnnnnnnnnnnnnnnnnnnnnnnnnnnnnnnnnnnnnnnnnnnnnnnnnnnnnnnnnnnnnnnnnnnnnnnnnnnnnnnnnnnnnnnnnnnnnnnnnnnnnnnnnnnnnnnnnnnnnnnnnnnnnnnnnnnnnnnnnnnnnnnnnnnnnnnnnnnnnnnnnnnnnnnnnnnnnnnnnnnnnnnnnnnnnnnnnnnnnnnnnnnnnnnnnnnnnnnnnnnnnnnnnnnnnnnnnnnnnnnnnnnnnnnnnnnnnnnnnnnnnnnnnnnnnnnnnnnnnnnnnnnnnnnnnnnnnnnnnnnnnnnnnnnnnnnnnnnnnnnnnnnnnnnnnnnnnnnnnnnnnnnnnnnnnnnnnnnnnnnnnnnnnnnnnnnnnnnnnnnnnnnnnnnnnnnnnnnnnnnnnnnnnnnnnnnnnnnnnnnnnnnnnnnnnnnnnnnnnnnnnnnnnnnnnnnnnnnnnnnnnnnnnnnnnnnnnnnnnnnnnnnnnnnnnnnnnnnnnnnnnnnnnnnnnnnnnnnnnnnnnnnnnnnnnnnnnnnnnnnnnnnnnnnnnnnnnnnnnnnnnnnnnnnnnnnnnnnnnnnnnnnnnnnnnnnnnnnnnnnnnnnnnnnnnnnnnnnnnnnnnnnnnnnnnnnnnnnnnnnnnnnnnnnnnnnnnnnnnnnnnnnnnnnnnnnnnnnnnnnnnnnnnnnnnnnnnnnnnnnnnnnnnnnnnnnnnnnnnnnnnnnnnnnnnnnnnnnnnnnnnnnnnnnnnnnnnnnnnnnnnnnnnnnnnnnnnnnnnnnnnnnnnnnnnnnnnnnnnnnnnnnnnnnnnnnnnnnnnnnnnnnnnnnnnnnnnnnnnnnnnnnnnnnnatgcccatgatctattcatcgtccgcagccggatgatgacagttagcacagtagtcgtgataaacgacatcatctgcaacaagggtaaataaaaccctgagtacgagaatgtactcagctagacttacccgtcataaaccagaaataaagtgacaccaaggagtatgcaaggctaatatttgtggactggtttgactcacatttttgcataaaaagctttagttgtaaggaatattttatttcgcccatagaaacttatctctgttatgtatatcttgaaggagaaaccgcaaatagtccatttactaccaattccaatcactagtttgatcctagctaccttgtgcataaatttcttcatactctgtcacaacattaagtcgtgtgctagtcagaatcttggcacttcttaaagcttcacattggtgtgccttatcatgcaggcaacttcataattccagatgggatacctctttgggacttggcaatgactacatgagccttagttgtggtcagtctgtacagacttctgctgttctttatagttgtcgaactctaaggtgatagaagttgctatcagattgtgtggctaatgattttattacttctgaaactacaggcaaggatatcatgttggatgggaaatttgcaggaagctttgggttagagaggaaaattgatcttacaaattacatccggtggtggctaccaaagaagacaaggcagtcagatacatctaaaacagaagaaattgctgatgaaattcgagctattgaaagttcaatgcaacagactgaaccctataagttgccttctcttggcctcggctcgccatcaaagccctcttcagtgggtttatcagcatgcagcatattatctcagtctgatgcctttaaaagcttcttggagaagtctacaaaattatctgaagaatgtactcttagcaaagaaattgtagaaggaaagactgttgcctcagtacctgctactggatatgatacaggggcaattaatattaacatgaatgagttgctagtgcaaagatctacgtattcgatggcccctgttatgcctacaccaatgaagactacctggagccctgctgatccttccgtggatccacttttttggagcaactttgttttgccatcaagtcaacctgttacaatggcgacaataacaacaacaacggtttgtttctctccctgattatctagataaactctcttttcttattttgctgaatctgaccaatgattcacaacagtttacaaagaatgaggtaagttcaagtgatccattccagagccaagagtgactgcacaagcttattgaagcaggatattttagattggtaagtaaagagtccaaatctgatattatttctaaatgtttccatttatttttcattaagtttagctcaaactttttactttttgtgtaacagtaacaccaaaattttggtaaagagactggaaaggaaacttcgaattgttgaactgattatctgtatgttcataaaaacatacaagtaatttgacaaagtagtctttgtcctaactcctagtggtatattagaatacaaaaaatatatagcgccctcttttgctaaaatatcatgttgcaatatttcaaaaaattatcacaaaaattatgtatgtagtacagccaaagttaagtgtggctgcaataattcattttgaaattcatctttgatgttgagattaaaaaaacagaagtgccactgtcagcacataatgaacagtcccaggttgactgcttatctatttcgtttcttgacatctaggatgaatttca

SEQ ID NO: 3543 - DNA, 3517 bp, Sorghum bicolor
attttagaagttgaacctttcggggacggagggagtacatgccaagccactaggccttgtttagctccccagaaattttgcaaaatttttcagattttccgtcacatcgaatctttagacgtatgcatgaagtattaaatatagatgaaaataaaaactaattacacagtttggtcgaaattgacgagacgaatcttttgaacctagttagtctataattggacaatatttgtcaaatacaaacgaaaatgctactattcttattttgcaaaaaatttaggaagtaaacaaggcagttgaaagacgaaagctgaaacttggggtgtgcttgcttgagcatctcccaagtgataaaaggggactggaggataaaaaaagaaaatggtaaaggggattgaatgaaggataaaaatacaagatcgatcgagcggggattccccatttccaggtgaaacaacatgctttatgcatgtttgttactgatgaagttgttatatttcaagtgtctaaatttttagaaaattttcaggtatcaatcgtacaggatcaactaaaaatgacaacgtataagagacaattattcgtgtgtgtgtgtgcgcgcgcgcgtgcgtgtgtgtacagactaacaatgataaaactgtgtattaattaccacaacaatggcaacaaaatcaggcacctataaaatataaagcaagtgttattactgctctctttaacagtagtaattaagttgtgacgggtgattgtgtgaatataacgagacaaactcaggaacatttccgtccgtagcacggcaagcatgcagtctcaatgctctccccactaggataaaaatggtatggatatttttcgaccgtattcgagaccgaattcgtttagaggagttcagatatgtccgtatttaagtccgaatattcaacatctgattctgtgtccgtattcgaatacttaaattatatatttatgatgtcgacatctaatcctatattatccgacatagttgatactatatgtattcgaattcgaattcgaccagaaatatgaaaataaatatgacgcgcacacagcaccgtgcagtgcagtgtgcaggtacgcatgcacaccagtagaaccacacggcagtacatgcatcttgatcggcacacagatttcagagtagtatagacactggctagacgagcagtacagcaggtccaatggccgacccagacagacccagatgcgtgcgtgacgatacacggggtttacatatgacgatattcacgacgcatggatgcatgcatgcatgcagacgatatcgagacgatttggccgccgtacgcggagtcggttgagcagacgagcagcgagcgggtggtggtcataaatgtcttagtcgtcgtctccgcatgcagcatgcagtcagcacgcaggcgcccaatagtcagtccatgcactgcatctgcatgcatgtgccactgcttccctggccttccccctccgctcctctctctcccgtccggccgtcccaatgcagatgagagctgaggagcgccggcggctgcgcgcgcgcgtgccggccgcaactcaccggctgcgtacagcaatgtcatgcgccacgatatatgggcccgtccctagctagccatcaatcatgatgctgtgtcgggcgggggcctcatcgtcgccgccgctccggccctccccttccaccgctgggcgctagctagctgtaccacatacgactccaacatatagcaggcgaggcgaggcgcggcgcagcgtcccaaccaaccgtatttactccgagcgagatcatccgccctgcctgcgactgcgatcgagagctcttccatcgcgcggctacctctcctccttcctatataaacaccctgcacccttccaatccagtctcgcagaggcagagcaccagtgtccagtgcttagcgtagcagcttggtcttggatatcagattgctctctctggtgcgagagcgagcgagcgagcgatccgatcgatggggaagcgcgtgtgggcggcggcgttcgcggcgctggccgtggtgatcgcgctcggcgtgcccgccggccgcgtcgctgaggcgcgcaccttggagaaggacggcctgctgggcggaggcttcggtgctggaggcggaggtggtttcggtgcgggtgcgggtgcgggccttggccatggcagtggtcttgggggcggatttggaggaggtaaaggcggcggtggaggccttggcggggggatcggacatggcggcggccttggtggtggcttcggtggcgggaaaggtggcgggctaggtggaggaggaggccttggtggtggccttggaggtggctttggaggcgggaaaggtggcggtcttggtggaggtggtggcctcggtggtggaggtggccttggtggtggtgcaggatgaggcggcggccttggtggtggtgcaagcggaggcggcggccttgggggcggtgctggtggaggcagtggtcttagtggcggcgctggaggaggtgctggcggtggtcttggcggcggcgcgggaggtggtgctggcggtggtcttggcggcggcgctggaggaggtgctggcggtggtcttggcggcggtgcgggaggtggtgctggcggtggtcttggcggcggcgcgggaggtggtgctggcggtggtcttggcggcggcgcgggaggtggtgccggagctggcggcggtttcggaggaggcaaaggaggaggcttcggtggtggcgttggagggggcggcggcgcaggcggtggtgccggtggcggtttcggaggaggcaaaggcggcgggtttggcggcggcaagggaggcggcttcggcggaggcgcaggtggtggcaagggcggtggcttcggcggcggatcaggcggaggctttggtggtggcggcggcgcgggcggtggtttcggcggaggagctggtggtggtgccggtggcgggggcggcttcggcggaggcgctggaggcggcggcggcatcggtggcggactttgagtcacgtagacggcgcgggagcccggcgcgcgcacgtgcaactcagctcggacgtgcagtgcatgtgcatgggttgtgctttcggtatttgacagagccagagtcacattacacttgtgcatgggtttgtggtttccgtagtatactatttctactattattactagctgagttaattaacccctattcgtaagcctaatggaagtgaataattggtgttgagatgaagatgggtttgggatgtgctatgtaagcctacttatattatactatatatatgatgatgaagttttggaaatttaagggagcatgctgtaacttgactatatcccccaaggatcggatgtaattgtgcgatgttatttgtacaaccaattataccgtatatatatttgctcttatcttatacgtcgtctgattgtgtgcgcttttatttagcctttatatatagatagatagagagggctctatattatgttatgtaatgacagttgtcgcga

SEQ ID NO: 3544 - DNA, 3199 bp, Sorghum bicolor
caaacaaataaaacaaacgagaagcttttaacaattttttttgaatcctgaggtaaaataatatcgcaagaaccttctggatccgaaatagggaaatgtccatacatttataagaatattacaagacagcaccttctttgatgcttctcctgctttttacaaaagtggctgaaactaggtattccgtcttttaaaaacaaagccattctagtgatcttgtttaaatcagagaatattaaattccaccatttccaacaaattgccaatatttatgataccaaataagtattattaattagattcaccaacatattttcaagtatgcctgttttttgtcctatatattaacacacttctctatagattttgtaaaaaataggatggtttggcttagaaaaaactgtaatggttttatttttgtgatggggtagtggagtagtttttagaggaggaacaattaattgtgccactagctaggctaactattagtgtcaggggtgccaagaatgagatcatacgctaccatgttttcctagggaaagatacttcccctagggtcgtttctccaatttttctaggaaaagtaaaaaaaactctagaaaaacctattgattctagtagtgcgtgacggactgacggtagggaggtcactggccataatttgcctggagcacaaaaacaagtgatttatgcggcggagtttgcagtggtggcttcagtggggagaaagccagcagagccaggttgtacatacacggggtgtgtgtgtgtgtttcgagataaacaggaggggtttcccccaactgtaatttatttgaataaagatgggcagtctttcacacaaatcatgatacaaaaaaaggtaacaatgaaaatgtacaaaagtttataagatttctcattacatcaaatctttgaacgcatgcatgtagcattaaatataaattaaaaaaataactaattacacagtttacctataaatcacgagacaaatcttttgagcctagttagtccatggttagacaatgtttgttaaatacaaataaaagtgctacaatgtcaaagttcaaaaaaaaatttgcatctaaacaaggccaaaattacacaaagttgtctaccttgtgtgcaacaaaggagagagagaaaagtagtttggcaggaaaaaaggaatcagagaaaagaatgaagagaagacacaaaactcttggaccgtacgttgatcttcaattcgacgagaggacgcacattattaattgacaaaagagcgcttgatttttttttggcacatcgcggtaattagcacattcctttctttcaatataaataaatagctccgtggttagttttcaaatgattaacccatttattagagagatggccacattgatcaagtcagcccaagcaaatactcaatgaatccaatttctgtctctccgtccttttcagtcagattcaggctttctttatttcatatcaaaatcagttctttcctcttgatgcttttcttttaatgcatgcttcttttgaactttattattagtggaatggacaagagcgatcaccctagtaactaatataagatcgtcatggcctcactgaaaaatttcttcaatgtctgtttgtatttgatctcttttgttcagatggcgctgtgcattttctgctatatctgtcgaaattaatggtcattcctgcagttttagatattttacaattattagctttgtgcttgcctaatactgtgttactgcttttcaaagagcccgcagagtgaaaaacctcatgcatttcgctaatttgatacagcgaagatgcaatttaggttgtactctgcatttgcttaactgctcatacgcttccatgcaatgccatatgctgagtatatatacccgccatgggctcgtcccaaagccatagctctagggttgaaaccagcaaagccaacagcaccgcacagtgtagtagttgcacctaggcgtccgcgcgtcgtcgtcctagctatggatccatatcactaccagactatgtatgacccacgcggcttccccatcatccacccgcagccgccgtacctccaccacccggtggcggtggccggcgccctcagcgacagcagggtgcgcggcggcggcggaggcggtggcgtgcggcggcgtcctggtgccaagctctccacggacccgcagagcgtggcggcgcgcgagcggcggcaccgcatcagcgaccgcttccgcgtgctgcgcagcctcgtccccggcggcagcaagatggacacggtgtccatgctcgagcaggccatccattacgtcaagtttctgaaggcgcagatcagcctgcaccaggccgcgctgatgcagcacgaggaagggtgccatgctgagctagccgccgcctactccgcggcggcggcggcggtggctggtgacgacgaggtgacgctcgcgtcccacggtcgtaccggcgcatgcgatgaggtgatgcagctccagcttcaggtgccgggggaggaagctttgagttatggtgttgttgctgcccatcagccgtacgggctcgatcccaggcatcagctgagtggtgggcacgagctgcctccgttgcctgcttcttgcatcttcgtcgaggagcctgcagacgcatgctactctgtgtgtgacctcgacgacggggagactggtctgcccgccggctcttactagtatagtagtagtggtagtttcttaaggtagcactagcatcccgtgtgtgtcgtccgtgtctgctagatggacgctagctagtacgtcaaattagcaaagtttagctagtactcgatcatcaattgcctgccagtcgtttagtttgcttagagttagagtatatgatgatgcatctgcttggactcagctgtacttctgtgttactccgctagtactgcgaattgtttgcttatatatgtatcactctctccgtctaaaaaagtaataattctagatttggacaagttataatttttgcttttttcccttctcttggttttagttacaaaacagaactccaccgtcaacgcgctgatgtccgattgtctatatgcttgctcaagagttaaaatagcactgcctgcagtcccctgcatgcactgcatctgcatgtaggtgcaaaagaatcataacacttcgtcccatcatacaaaatacagactacttaatatatattttgt

SEQ ID NO: 3545 - DNA, 4198 bp, Sorghum bicolor
acctctttcttcaataaatatgctgccacatcaacaatctttcttggactctatgatagagttttgcactatgagtgtactagacttgagcaaaagttagtttatgtatgtacaaaggccggcttctcaaaacttttgcttggagactcattagaagggcgctcgccacagcagatcgagcgacaagatactccgtcaacgggactaatacttgtgacagatgcaacatgatcgaaactgactctcacctgttctttcattgtaatctccctacacaggtttggctcacatcaagtcctgctctcaatacagccacccttccctcgaagatgatggagtacaacatatcctccaaactattctcccagataacacaaatgaatttcttttatgtaaaactctcactactttgtggtatatctggaaatctagaaatgactaccattttaacaggaaagagtggacccatgtgcaaattcacactgccattgcaagttatatggagcataatcatctacatccatcccaaacagctgcttctttccagcagccccctggtatgttttcttctattatgcagactactccaatcccagcggaatcgacaaggccacatttttacgccaacccaatggcactccaaggatcccgatgctatgtagatgtctccagggtgccagataatcaatccgcagctccggccgatgctggcataggtatttttattctcaattttcaggcacaaccagcccaatctatctacatcaaggccaggatgcaaaactgttactctgttcttatgggagaggctgcggctctagctcttggtgccaagctgattcaagccctccagatctctcaatgtttcttcctctctgattccgaacagcttgttcggtttcttcacaaagacagaagggacaaccctccccactggagaatgaaaccatatacccaaacctttgataatgtcgtaggattacttcaagctactcttttcaagattcccaaatcatcaaactctacagcggataccctagctaaacaagcgagagtttccactcttgttcagcttgatcactcttgtacccgtttggcttgtggtcctttatgttcttctcttcaggctctactttcagtagacctgtttgatgtacaaacctttgcagcttcatgctgcgtttaatatatttcggtctgttccttgtcaaaaaaaaaaagacacaatctagacctaagctaaatttggcaaaccaaatgtgagaaattagaaattttttgtaaccaattaaatactaaatcaaaattatggcttatcaaatatttggcatggcaaattttgatagtgaacgaaacactccagataatccgtgtccaaacccgttcaacggccaggttcgtacgtgcctgccattttcgagcctggccaagaaaggtactgctcatcgtcaccccgacaccctccataacggctcctgtactgtacatcacgaccctgtgcagtgggccccaaacggactggtgcaactccggcgctcgcacgcacggcctccccgcgagtccgccgcaccggatccggtttgacttcccacgctgctgcttccacgctgacgcagctgccaaactcgcagtaataaaagcctgcggcgcgatgcattgacggatctgcccctcccctgcccgcccaaccacggacgagcctgtccggatcgtctgcgccccgcccgcgcgtcgtccatggtccctggaccccgcctgtccgtgaccctgaccccgtgccgtcgccgtcgctaacggcacacacacacacacgacgtgcgtgtctgtctcctggacccacgcgtcggcgagcggccccccgccgtggcctttggtggggctcgcctcgcccgccgctggtataaacccccgcgccaccaactccctcggccgcacgccgccaccgcggaaacctcactggagtggtcacactgcaagcgagtgcacgagacagaagggtcatggtcgccgcggcgcgcgtcgccccggcgctcgggaacaagcctgggccggggcaggggctcgcgatgctggaggttgtggtggcgccgccgccaggaccagcggcgggggaggagcggctgtcggacgctgacacgacggcgtcgtcgacggccgcgcccaactccagcctcagctcggccagtagcgccgccagcctgccgcgctgctccagcctgtctcgcctctccttcgactgctccccgtccgccgccctgtccctggctgcgtctgctgctccggcctcctcctcctcgccagcgccggcgcggccgcaccggtccggagacgcggcgtgggcggcgatccgggcggcgtcgacgtcggccgcggcgccgctggggccacgggacttcaggctgctgcgccggatcggcggcggcgacatcggcaccgtgtacctgtgccgcctccgggagtcggaggcggacgcggggcggccgtgcctgttcgcgatgaaggtggtggaccggcgcgtggtggctaagaagaagaagctggagcgcgcggcggcggagaagcggatcctgcgcgttctggaccacccgttcctgcccacgctcttcgccgacttcgatgccgcgccgcacttctcctgcgtcgtcgtggagttctgccccggcggcgacctccactcgctccgccaccgcatgcccaaccgccgcttccctctcgcatcagctcggtgagtgctagctagtacgtacaagtagttgacgcgtgtctttccggctgagctgcacctctgactacgagtgctaacggcggcgcctgccggtcggtcggtcggtcggtgcaggttctacgcggcggaggtgttgctggcgctggagtacctgcacatgatgggcatcgtgtaccgcgacctgaagccggagaacgtgctgatccgcgccgacggccacatcatgctcaccgacttcgacctgtctctccagtccacctccacgccgtcgctggagtcgtcctccgcctcttcctccgacgacgattcatcgacctccgtgtcctgcttcccggaccacctgttccgcttcacgcttcgtcgccgcggtggcggcagcagtagcagccggcgcgcgctcctccgccgcgccgcctcctcggcgcggcagccgctggtggtggcggagccagttgaggcgcggtcatgctcgttcgtaggcacgcacgagtacgtggcgcccgaggtggcccggggcggtccccacggcgcggccgtggactggtgggcgctgggcgtgttcctctacgagctcctgcacgggcgcaccccgttcgccggcgccgacaacgaggccacgctccgcaacatcgcgcgccgaccgctctccttcccctcgcctgccgtcggtggcgggtccagcggtgccgacgccgacgcgcgggacctgatcgaacgcctcctcgccaaggacccgcggcagcggctagggtcccgtcgcggcgccgccgacgtgaaggcgcacccgttcttccgcggtctcaacttcgcgctgctccggtcctcccgcccgcccgtcgtacccggcgcgtcccgctccccgccgctgcaccgctcgcagtcctgcagcgcggcgacagcgtctgcgacgcgcaggagggcgtcgaagccgccgccgcagccgcagccggacgctcggttcgacctgttctgaacgaccgttgccagtgccggcggcattgacctctagttgcattgcatcacactcgccattgtacaagagtagtagtgttaatctcttgtagtagtaccgtacaatgtcattagtttagtctaatcgaagttaaactccaactctgctctactctgtcgctgaattccgaggggtgctccggcttaatgacggggctgacgtgggtggattaactatacagtagtacgttgacagcgggcgaggtgtgtcgggtggccgggccacatgggtgctggacttgtctgcacacaggggtgctctgccaggcgattactacattaatggcgccggttgacctggcctggcgagcttggttggcgtgcctgcccctgccgtggggaagacgctgacgtggctcgtggagtggttcccgttgctggagagacgtgtggcaggccgagcggatgctggggttactatactactagtaccagtgcaaatggccctaatctaggccttat

SEQ ID NO: 3546 - DNA, 3817 bp, Sorghum bicolor
gtagtgtcggctctacatttttcttctagaagcaggtggtggtgcctcctcctcctgctgctggcggctctacagtctaaacattacttatatacattcgatgagtacaagcacgtatatgaattctggacatcaaatatttgtacaatgcagtgaaggaaaaaaaaagaggagatcgagacaaaacaagaaagacgcgcgccactcaaaatctgacagcgacacgtcctccgtccgtccgttcatgaaatccttctagaaaaaacaagtggtggcgcttgtctccttctagaagcaggtggtggtgctgctttgtccccgccttattgccgatgccgacacgcaccgtgccggtacgatctctcatgggcaccaaatgatggagcaccctgcgtgtgttaggacgaaaacttgacaagccatcgatctgatctgatccctcaccagaactattaattcgttgggattatgttcatggggtccgcccgcccgcggcgcgcctaccgtttctctctgcctaggtcttcgtcaaacatgtattatgcacgcaaaatatctcactctgttctcatcatctcataaatagtactccctccgttccaaattataagtcattccaagaatcttggagagtccaagtttttcaagtttgaccaaatttatatagcaaaataataacatttttggtatcaaccaagtattattagattctttgttagctatattttcatagtgtacctattttatgacataaatctttatatttctctctatatttttggtcaaacttaaaaatgctttgactctccaagattcttggaatgacttataatttggaacggagggagtactatagtaaggccttgtttagatacacctaaaaatccaaaactttataaaattctccatcacatcgaatcttgcggtacatacatgaaacattaaatatagataaaaagatactttataattaggataatgtttattaaataaaaacgaaaatgctaaaagtttttgatctaaactatcccgataccacctacatcgatcacaaaacctgctggctgctgttgtttatccaacgtgatggatcgtgtttcccatctattaaataattgtgagccacatggttgcaatatattatatttttatatattctagtttagcaatatcagaatttctcctatttctattgcaactgccgcacgttgtttcgtatctagagtgcgccagtttcgtatggtatatggagtcatggacagctgagctaattaaactgccgcgtgctctactgtgttttccgaaagatttgcaggagcactgcactatcatttaagaatgagagaaagcgtttttttttttcacatgagaatatatattactaaaaaaatatattacttgtactatatgcattgactttactgtatatttagatataagtgtatctgtaggatttatgtatttgaaaacaccaaaacatcttatatggaacggagtgattacgtgtatatacatattatcaatcaaaacccaaatctaaagcgacgataacgtttttaaagctcgcgacggacgaacgccgatggctccgctccatttatatgaatttctgtagcaaaacgataagtcttgacgtcgtttttgctcttgagcggccaattaccgacgtctgctgattgtggcacatcagagacagctttgcccctgcccacccactggcccaccgcccactctatctcgtacgtactcacctcaccgtctcaccgcctgtctgtctgtccccatttcattgacccccgcgggccgtggtttttccaaagcggcgaccccacccccacccccaccccacctccgctccgccactctccgctctatttatcctgtggcatcggatcacggaggcgatcacgatttcacgccacagtccactggcagaagaagcgaaacttgctgcgctcactcctgacgtgtctcctagccaacactcgcaggccaaggaaatgggcgtcaccgctcgagctcacgatctgaagcacctgcgccaccaccagcagcagcaggaggaggaggcgcgcgtgcacgacgccggcggcgcgtcgctcgcggcgatgtacctctacggcgacgtgctcgagtccgtggtggagcgtgtccccgcggcagacctggccgccacggcgcaggtgtcgcgggagtggctccgcgcggtgcgcgccgcgctgcgccgccgcccgcgtcggctgccctggctcgtcgtgcacctccaggcccgcggcggcggcgggggcggcctccggtgcgccgcggcgtacgacccgtgctcgggcgcctggctcgccgtgccggcgccaacgctgcgccacgccacgccgtcgcacgtccgcctcctgcgcggcgcgcgcggggaccgcgtctgcgcgctctcgctctcgggcctcgccgtcgccgccgacccgctcggggcgacggccgggtgcgtcgcgccgctggacgcccccgccgtgtggcgcgtcgacccggtgttcgcggccgtgggcgaccgcgtcgtcgcgctcggcggcgcgtgccgcctggcgctggccgacggcggggacgccgccgcggtcgaggtccacgaggccggcggcgggtggaccgcctgcgacccgatgccggacccgctgagtgactccgccgcggcgacgtggctctccgcggccgccacggacacgcgcgtgtacctcgtggagaggaccaccgggtgggcgagctggttcgacccggcgaaccggcggtggggccccacccgtcgcctcggtcccgaccccgccgtcaccacgtgggccgtcgcgcccggccgcgtcgtcggcgcggaggagcgcctcgttctgttcggggctaagcgggcggacaaggaggcggagtgcacagtcgtcgtgcaggcatgggaggtggacggcgacactctggagcaggccccctccgcatccggcgacgcgatgccggcggagctgtccgagaggctgtttcctcgtgacgacactgattacgacgacggcgaagaggaactggaggacagggcgttgtcgatcggggtgtgcggcaacgcggcgggcgggtacgtgtacaatgcggccgagccggcgaacggcgcggtgctctacgagctgtgggaggaggggaaggccaagggaagcgccaccgccgtggcgcggtgggactgggtgccctgcgcaccagccgtgcaggcccagccgctggcccgtgccatcctggcctgctcgccggtggggctggatgagctggcgttggccgttggtgcaaggagcccacgctgacacacggcgggggagacaccgaatcaaagtacagcaaccgatgtttgccacttgcaagccaagtagtggaaggaaaaaaaaaagatgcttttgtaaaacgtcatatactagcttttgtaaaacaacatttgattgcgaggacaatgcttttttactcaaagttgcatcattttgcgtctctgccttttgactcggacggaggaatgctaatcaaggcccgagtgttgacaagcgacatacgcagtatgtttattttctctagacgtgtttagattgagctgaatataatggctctgtttagatcaaaaagtttttgaatttctgacacggtagcactttcgtttttattcgacaaacattgttaaatcataaaataactaggtttaaaagattaaaagatttatcttacgatttatatgtaaattatgcaattagtttttgttttatttatatttaatgtgttatgcatgtgctgcaagatttgatgtgacgaagaatct

SEQ ID NO: 3547 - DNA, 6742 bp, Sorghum bicolor
attttaatcgttggcacttgttttagattttttttatttctaacctttttttaaaacaattttcaaatttaacaactcaatttttttattattaaatctaacccttttggtcgcgccaccatgtacggtgcaactcttgtactgtgtcacgccatacatggtggcgcggcagaatgtggcgcgtgatcggatggttgacgtggcagagtctatcgcgccacaggccatggcacggcactgccgcgtcacagatcttggcgcggcagaggcgccatcggctggctctgtacgctgctgtgtgcttttgatgagtgtgttgggtgtcccaaaataattgtcatttatgtttttcgagaaataaattagattaaaatatatattataatatattaatatttataatatataattagtattattagaaaaatctttaaatatacttttctaacaaatttatttgaatatacaaatattgtacgtattttatataaatcaatttaaacttttggtgcagaaaaaataacagttaacttatgatggagccgtatttcaaacatgttggaggcagcctgtggtagtcgcgcgtgcgcgcgctctctctctctctgatttgtgtgtaaataactttgacttaatttataaaaattatatgtaatacttttaattctaaataaactaatttgaaaactagatttaaagatatttctaataatactaattttatattataaatattaatattgtctaatatatattcaatcaaattatttgtaaaacaaaaaacgaaaaagacgtttaaagacgaagtgagaagcagactagtaccgcgtggcgcgtagtatgcggtatgcctgtgcaggtactgtgcgtgcagcagtcagcctgtgcctgcctgctcagtagccgcagtgtgcatcagctatagcctatgctgtgccgcttctgaatatttgtcattttcgattcttaaaaagtaatttcgattaaatatatatcaaaattttaatatttataaaacaaattagtattgttgatagatatttaaatttagtttttataaggttatttaaagttaaaaatattatattttgatttgatttataaaaatatgtataatatttgtaatttttaataaattagatttaaaaatgtatttaacaatactaattttgtattatgaatattaaaagattttaatatatatttagtcattatctttctagaagcaaaaatgatactgtaaacatttagggatgaaagagcacagcatagggtgtggggcacagtaatgtgcccatgtagagtggggggtgcagcactgtaacgcgtgctgctgctgccgtcggcgcctgtttgtgtttcgtccataaatatttatcgttttttgtttcttaaaaaataattttgattaaatatatatataaatattaatatttataatacaaaattagtattgttagatagatatttaaatttagttttttaataaatttattagagttagaaatattatatatatttttgataaatcaagttaaagttatttgcacataaaatatggcgaccaacgtttagggagcggcacgagggccaatgcagcactgctacttccttggaagttttttttcctagtacaagtttaactagatttataaaaaatatgtataaatatttttcaagattttttaaaattatttatcacatcgaatctttagacatatgcattaagtattaaatatagacgaaaataaaaattaattatacaatttggtagaaatttatgagacgaatcttttaaacctagttagtctatggttggacaataattaccacaaataaacgaaagcccttgaaaagctaaacatggcctaaaacaggaaaagaggaaggatgaatgtgcaaactcacgcattacagaggaggattttccatcggttcctccgtcttcctcccgaacccaaaacctccatccgacggctcgccatcttcttcctatcgctcatttccacagcccacaggccgccgccggccgacgccatcccatttcgcttccttcctctgcctgcggcgcagcaaaagttccgggccttccggcaatcccccgtcgtccggcggctcaaatcgtatcgtatctgacgcggctacgacgtcgctcctcctccgatccggtggggtccgtttctctttcaagtggggccgtgaaaagccagctagtcgcgggccgcctcgtggcagtgaccgtcgaaccctctataaatccccctccccggacaccttctccgatcacacaacccagcagcagcagcagcagcagcagccctccttcaacctcttctctcgctcgcttggcattccattcgagggggaggaaaggcaagatgttcatcgagagcttccgcgtcgagagcccccacgtgcggtacggcccgacggagatcgagtcggagtaccggtacgacacgacggagctggtgcacgagggcaaggacggcgcctcccgctgggtcgtccgccccaagtccgtcaagtacaacttccggaccagcaccgccgtccccaaactcgggtgcgtacggacggcagtcccctcctccctccctgcctctctctcctccgtcctccgtcctccgtcgtcgagatcaacctgtcgccgttcctttctctactagtaaatcctaatggaatcttactgctttagctgaagacgacccgtcataatcgttgacagttacgcacacagtactttgcctatccggacgcgtcgaatcggctcgatttgagattggatccgatggtgccctgcacgttccggtttccattttcgttcatccctcgcttactgttcaaccattacacaaaatcgtccttttcctgaacttcgtcttttgctagtcctgcgagatccaatccgagtccagcagggacgatgaggaccagacaaaaactcatcacctagtatttactccgtactagaattactagcaagtgtgcatgcgaagccatcttccatcctgtacccccttttgtttcgttcctgttgctaagcatgttgcctacggtgtctaccactattttgtctgacggatgatgatgctgacttttcggctctggtggtgcagggtgatgcttgtggggtggggaggcaacaacgggtccacgctgacagctggggtcattgccaacagggagtaagtgcttaatttgtcccatattgcttcccgttcctgtggagtgtggagtattgtcgtccatattttttcattctgtggcctaagagtgaccagaagactgtcaaaaaaaaaaaagagtgacctgaatctgttggtggttgtttcagggggatctcatgggcgaccaaggacaaggtgcagcaagccaactacttcggctccctcacccaggcctccaccatcagagttggcagctacaacggggaggagatctatgcgccattcaagagcctcctgcccatggtaatctattatagacttagcttctacttttcttttaccgaaaccaaacatacatacatgcagaacaaggcatattccgtaaggtgctagttgatgttataaaatgaacctgtctttcaggccagtggtctcaagtaaacggaatgttaatcattgctttgaaaaaaaaataaaggttctaattttctgaaatgaatgttacacttagcataacgaaaaaggcaaagtatactgtcagaaaggtgctgaaacagtagactcggtctgccatgttgtgatcctacttgcaagccaaaaggttcgctgaaaggttccagcatctttggattacacccgtgcagtactgacggcggtgctaactggttgcaggttcgcaaactttgtggtcttcttttcatgaccaagttgaaatgttgaactgattttcaggtgaacccagacgaccttgtgttcggaggctgggacatcagcaacatgaacctggctgattccatgaccagggccaaggtgctggacattgacctgcagaagcagctcaggccctacatggagtccatggtgccacttcccggcatctatgacccagacttcatcgccgctaaccagggctctcgcgccaacaatgtcatcaagggtaccaagaaagaacaggtggagcagatcatcaaggatatcaggtatattgatatggatgctaacatgccttggtgcaatcaaagaagtgcactcagtgcaacctaaacaaagaaatacaaatactactgtgcattaactacatatgcatacatatcataacatattgtttcactggtgcatttagaagtctatactattttttgacggtcaagtctatactatttagacaatttgacattgtgtatacagcaaccactcaaacttccatgagcactccacaaagaactgaaactactgactcgacaaagaactgaaactactgactccacaaagaactgaaactactgaaagcttacgcaactattcatagttaatgatgtattttggtgtgcatggtttgaggatctagattaacatagttgaagaaacatggttcactagtataagtaatccattgtagaagctatggcttatgtagctaatgaaacagggaatttaaggagaagaacaaagtggacaagatagttgtgctgtggactgcaaacactgaaaggtacagcaatgtatgcactggtctcaacgacacaatggagaatctgctggcgtctgtggacaagaacgaggcagagatctcgccatcaacactatatgccattgcctgtgtcatggagggggtgccgttcattaatgggagccctcagaacacctttgtgccaggtgggtggtttggggtgtgtgcaaagttttatagtgtcgcatttctgttccaaggcttattaacaattgttgcatgtttgtagggctgattgatcttgctattaagaacaactgcttgattggtggtgacgacttcaagagtggacagaccaagatgaaatctgtcttggttgatttccttgttggtgctggaataaaggtacaaattatcaaccaacgaaacttaatatctcttctattaagatgaagtgtatttggcaaacctcgtacttacaataattcttctatatgtccatgcagcccacctcaattgtgagctacaaccaccttggaaacaacgatggcatgaacctgtctgcccctcaaacattcagatccaaggagatctccaagagcaatgtggtggatgacatggtctcaagtaatgctatcctctatgagcctggcgagcatcctgatcatgttgttgtcatcaaggtctgtcagctaatctttcaccttgttaaaagttgacacatgcaacaattaaaaggtagatttatattgaaacttgccactcttttttgttgcagtatgtgccgtatgtgggagacagtaagagggctatggacgagtacacctccgagatcttcatgggtggcaagaacaccatcgtgctgcacaacacctgtgaggactcactcctcgccgcacctatcatccttgatctggtgctcctggctgagctcagcaccaggatccagctaaaagctgagggagaggtaagagccccaccatatgaataacccaaagcacgctaggtgattcagcactttagcaccatctaatgtctctcttataatatgcaggacaagttccactccttccacccggtggccaccatcctgagctacctcaccaaggcacccctggtaatcctttgctcctgcattccggcatttgcacagcattttgctccaatccagccactaatctctttcaaaacctgaacaacaggttccccctggcacaccggtggtgaacgctttggcaaagcagagggcgatgctggagaacatcatgagggcctgcgttggcctggccccagagaacaacatgatcctggagtacaagtgagcgaagtggcgtggcctatatgcaggaggctgctggaagggaactagaatggcgagattagctgtgggattgtattggcttctcgtgttttcttttgcgttctttcctggtcattgctgttacgcttgtgtatttgtcggacccgtaactatcagggctctgctattagcggcacgaagcctgtaatagtatcaggtatcgtatgataatttgatggagggtgctagtttccctcggcattcctagtgttcattgcaagtttcctcgacgcctgttcggattttaaatgttatatcactactaaaatggtggagttctcctagtgtttttagttagtaataaaacactaccactagtcaaaacactaagaatttctcattagaaggcatttattagggaaagttcatactaaattttgaatactaaaacactagaagaaccccacatcactagaagaaattataaaatctggttgtgtatgctgtgcaacccttagagccagtggcggagcgtggagggaaacaagcagggctaaaaaaaacttttcaatgcaatcataatcggtagcagcaatatgatgaagtacttttcatgagctgaggtttgtctctacgaggatccaccagtgcttggagcatctctgagaattttgaaaactcacagagaagcaatgctgtccaaaaactgctctccaacaacttcaacacaccgtcgaagtgatgccaaaaacatttcatttctccaagggccaccttccgcattcccatatttgccgctgccttcaggtccggccaagcatc

SEQ ID NO: 3548 - DNA, 34092 bp, Sorghum bicolor
  misc_feature (1628)..(1727): n is a, c, g, or t
taatgcaaatgcaagcaatcatatgtaacacacatttaaatgcaacaaacaagtttatgagcttgctccccttacttgtgtgctttaaaattttaattgatccccttcctttattaaattcatttaattttcatgaatgatcctaagacatgtaaggaatgactagatgcactaaacaagtccttaacaaaggatgaatgacatgtcaatcaattttaccttgctttgctcgaagaagaggcatgtcatataatgggggtgcatcaacacatatttgagtatgttcaattcattcgtagtttgcaaaacctcttctcatcaagtggcttggtgaatatatcggtatgtcaatcatcagtgcccacactctcaatgcaaatgtcccttttttgttgataatcttttatgaaatgatgacagacatctatatgctttgttcttgaatgttgaattagattgttggtgagcttcatgatattttcattgtcacatagcaacaacaattgtttgaaattgattccaaaatccttcaaggttgcctttatccataggatttgtgtacaacaactagtaggcgtaatgtactccgcttcggcagttgataatgcaacgctattttatttcttgaatgatcatgagacaagtgatcttccatgaaattctcgaaacttaattcactactcacatatacaaactgaaaccttcaacgagaacaaaggaaggaagcaattggactcaatactcgggtgggggatcgccgaccgtgcgccgacgtggagccatcaggaggcagatagaggaacttgcagcgacgcatcttctgcactcaccaatgttctccgccgcactgccgctgggttcgtccctatgttgtcttcctcgtcaccgtcgctccctccaccaaatcatcctctcgcctaccgcccagtgctgggagggtttttaagtgaaagggaggagaaaagctaggggcttcttggcgtaaaaccaaactacctactcttgcgcacaacacgtgaggaaaataacactgaatcccccgccgagttcatgttggcctccacattagcggatcagtgcgtcggagagggtttggactaacatgagtttacgatgccagaaatacaaatcctaagttccacaacctatttaagacgtttagggaccgccaccaaaatttactttttttgagacaaggctagacactctttgaagctatggaagagatagcagatttaagccttgtttagttgtaatttttttgtaaaatagacacggtagcactttttgtatttgacaaatattgtccaagcataaactaactaggctcaaaagattgatctcgtaaattaacaaactgtgtaatttgttattttttaatctatatttaatgctcaattgtgaccggatatcaaaatgtttttgcaaaatttaggccttgttcagttgaggaaaatttttggttttggctactgtagcactttcgtttgtttgtgacaaatattgtctaatcatggactaactagactcaaaagatttatctcgcgaattacagataaactgtgtaattagtatttgttttcgtctatatttaatacttcatgcatgtgtcaaaagatttgatgtgnnnnnnnnnnnnnnnnnnnnnnnnnnnnnnnnnnnnnnnnnnnnnnnnnnnnnnnnnnnnnnnnnnnnnnnnnnnnnnnnnnnnnnnnnnnnnnnnnnnncgcgcgtcctgccctcctcgtgccatcgctctcctcgcaccgccacccagccgcgccgtcgcccttctcggcctgcctgctcgcgtggagcgtccgcgtgagtgagacagagagacggagcaagacggcgtctcggtggacgagcgcgttcggccgatttgagagagcgagctcgtccattcctgccgtgcgcgttcgcgaagttaaacccttgtcggttcgcccgcctccgccgctatccggcgcgccagctgtggagccgccaacaccgccatgaagccctcgccgcacttcccggagatcgggaagaagcctaaaggtacacccagcttcctcccccggatgcactcacggaatccattggtttcgctgaaaataatcgagattccatcttgtacgcagatttgattgctaaggaccacgcatttaacatcgcggcttacatctcgtctggagcggtgcgtgcgtcgctttcctcctccccggattcttcagagtcctctacttttgcgtctccactagagcttgactcaacgactaggtttggggctagggttttgctctgttgtgggtttgttggggatgctacgctaatttgcttgaataaatgagtgtgtgcattgcactagttctttgttgctcagtaggccattaagctagtgctggctggtggtggatggatgggccgggtttctgttctgattttcatactggatactggttggattacttgctgttgttgccccttctgtttctatctctatgtcacggtggtaactagtaacggtgggggaacacgtggggtttacgttcattgttaacgtccttccattttggtggtatgtatatgcgttatatgttgattgtaacgcctccttcaatagccttgttactggtagggtttatttccaggtttaagctttctggactgttaataaacctctgaactatttggtatttggcatgattcttctgttccatcaaggcgtcaagaaatacttcatgctgatctgtacactatattctcttctttgttttatgtattctgtagatatatataattgtgatttttggttggcactaggatgttattgctgctgcgctccgtaaacatgttgaggaggaagcccgagatcttagtggtgaagcttttttaaggtttatggatcagctctatgagcagatatctagtttactgcagagcaacgatgtcactgaaaatttactggctctccgtgctattgatgctttaattgatatgccctttggagaaggtgcttccaaagtttctaagtttgccagcttcttgagaaatgtatttgaagtgaagcgcgaccctgaaatcctagttccagcaagtgcagtgctgggtcatttagcaaaagcggggggagcaatgactgcagatgaagtggagcgacaagtgagctatattggctctgatttgcttgacaattatgttctcatttttttttgctaacatcctttctttttaaaagattaaaacagctttggggtggcttactggtgatcgagtggaatatcgccggtttgcagctgtactcattctcaaagtaagttgaactgatcaaccttttgcaatcttttacatgcaaattagccttccattgtgaagacaatcacaatttttttttgtcttgcttactattacttcatagattagtatattataaacatgggtggatttgtgtgtaaaatagtcatcatttgttcatttgttgatgcatggctgaattggatatatatgcttttcttttgcgggagaattggatatatatactagaacagcatacaatctttttttttctctctaccaaatccaccactagcatctgccctgtaatgactaatgagtggtgaccacatactgccactagaatcatggagtattatatatctggcagatttgtgatttttgaaaatgatatatgcatttgtgatttatgttgatgtatctgaattaatgtcagcattattcccatatcgctactctcaaatttcttcaaatctacattttccatactgtaggagatggctgaaaatggatcaacagttttcaatgttcatgttcctgagtttgtagatgctatatgggtagcactgagagaccctaaacaggctgttcgtgaaaaagcagttgaagccttgcgtgcttgtctccatgttattgaaaaacgggagactcgttggcgtgtacaatggtaagcctaatttttatgttcacattcttttgcaaatttggtatctatgtgtcgttaaaccagaatgtgtcttaactcactttaaatggttaaaaatagtatggggatttaatttgaatagttttgtagtcactcatttttgcatgtattatttaacttgatcaataatttggctggaatcttgtcaatttatagaggactaaccactgatgaagtagtgctctggttttcttgttaagggaacaggttctcaatttggaattaagttgtgtacaatgtgtataaatgaacccaaagttgtcacatagaataagtttttggcactaggaatgtgtatttgataatctatcaagagatctactaatttggaacttaatttgaaagccatatttcgacccggacgctttttgggatgcttctaataaccaacgaatggcaagtgctcttcattgtttagatcctatttcaatgttgatcgtggtaaataactgaaaaacataactgttagaagaagaggaaagaataaaaaaagatatatactactccctccattccaaattgtaagtcgttttggcttttctaggtgcatagcttttgctacgcatctagatatacacttatgtctagatatatattcaaacctatgaatttagaaaagacagaatggcttacaatttggaatagaaggagtggtatgcttcattgaatattgagaattgctttgagctttatttagacatgggtgggttgttagtgtttttgaccttgtagcttccacagtcacttgtaatagaaattttttttttgtactttgttatggaaagtgctgccataaatgataccaatgttgtgttgcagctgttgtgtggtatgtagccatgcttgtgcagctagctctggtgcgccaaaaaagtcatcctcatcatacaatgattttgatggcttgcttccgaactgagttgtactttgattacaaaagttccatttcgtaagaaaatggttcacacagtaaaagtttcagactgactagatatgaaatagatgcaattttttagtaacttgttacatgcaagctcatatggatgtgtttggttacctggctatctcctaaccaggctccctggagccaacttgagcctgtttggttgactgaacaagcctcctagccaggcccaagcaagccacccaaagagacttagccggggcccaggaaaacgcagtagctgggcgtttttgtggagccaggctctggccagccatcgcagagttcccctcaccgcccgcacactctgacttcatcttctgcgcagtgttttctgatcgtccgattaatcgcgattaatcacgattaatcgtccttatcggtctgtagcactcgattagggccttcgattcgattagagcgatcagaaacctgatcgtccgattaatcgtcgattaatcacgattaatcgtccgatcaggcctcctgaccgatcagagttgactggcagatggtctgcttttggcctgggatattatttaattaggtcaggcccattagggtttcccttataacttcacccccactctcttctcagtcactcccactccagccgtcagctactgagctgctgctcctgctcctgctgcttgctgcttgcttgctgcttcctcctccctcttccctgctgcctgctgcttcctcctccctcttccctgttgcctgcttcttcctccctattccagctccaatccaagtagcccgctactgcttgcttcttcctcacttctccctgctgcctgcttcttcctcccccttgaccttgatgcttgatgtccatatataaatatatagagtcaaatctcacaggtaagtagccaactaactagaaatatagtcttgatgcttgatgtgtactatataaatatatagtatatggtatatataccatacatatatatgatatatacttatatagtcctgctttatgctggacgattatatggacgattagaccgatcaggagtcgattaatcgtcctgatcgtcctgatcggtgccagaccgattagaaacgataagccgatcagaaaacagttgtggctccgcccacgcatgccgtctttgtcttccgcggatgcatcctccaccctccccgtgtgccgtcgtcctccaccctctcgcgcgcgccatggttgaagcgtcagatctcgtctccggagaagagcacgagcaccctctctcgagtcgtcggcgacagtcaggacggaggcgacatcaaatcagggtcagagcgctcgttggagctgtactgccgccataccggcatctccatcgacggtggggccggaggcagcatcaaattggggctggagcgctcgctggatgactgccgcaccacatcgctgtgaatggtggacaggaaatcccgtcgagggctcgaggcgtcgtcgcgtgcctcccaattccagtctgcctctgccaacgggcagtggcaactcggcgtgagcacagcagaggcccacggcgtgttcctcttttctcttctggattttgcctcaacagactgagcatttggatctgtattctgttttctaatgcgactgtcatgtcgctatattttagtttttggagaaaattagtgtcgcatgtcgcctgctcagcctcatttactgagatggtctggctgtgcttgccgtgcttgctttcatgcttacgctggtcaccttgctgctgccgtgtaccgtggtcagcgaggatgcccacaacttgtttgatgaaatatgtcaaaggggtaaccttaccaatttaaagaagaggtgactgtatcaaaacaaactaggcaaccaaacacaccatgaagttagccaggcttaggcagcacagacaatcaaacaaccaggggttggcttggtgggagcaagctaaggctacccaggctaggattctagccaggctagaagttagctaggaaaccaaacacaccttatatgatctgtaccagccaccctttatatctaaagcttttgcaagcctcagtctcttgaacggttgaaccaacatttccaatctactggtctaaattcataaattaattggtcaagacttaacagcatgggtctttagaagtttaatttaatgtgtatgggttcttcgtggccagttctttttctgggactaactgttatgaataactctgctttcagggcctttttttgttgtgtccaaagcacatcatttccacaactcttcttcaattcacttctgctatacaattatggcggtttctctgtcttacgttttaattttttaattctatcaggtattaccgcatgtgtgaagccgcacaagttggacttggcagaaatgcttctgttcatagtattcatggctcattattggctgttggagaattgctgaggtaatttactgtttggttggatgcctttcttgttcttagaaaaaaagatgtcatgatattagcaatcactctgagaataaatcatcgttatttgatcttctccacacttactacatttcttaattatgagatgcatgtctaatgtccaattatgtaatttgtgaacagcgatacattgtgtatcatggaagaagtaagacatcatcatttagttctgacaacaatgtccagtatctgatcctctgattttgcattaaatattataggaatacgggggagtttatgatgtctcgatacagagaagtggctgatattgtcctcgattatttaaagcatcgagatcagcttgttcgacgtagtataacatcacttcttcctcgaattgcccacttcctgcgtgacagatttgtgactaattacctgaaggttattcttagtaccacacttcatgtcctgttgttttcctttccccgtttaacatagtgtcatagtagaagataggaatgttaaaattgtgctgttccatgatgagtattgttatcctttccagatttgcatggatcatatcttgtttgttctacgtacaccagacgagcgtgctagcggctttgttgcacttggagagatggctggggctctgggtgttgaacttgtgccttatttaccagcaattacttcacatttgcaagatgcggtatgctttggcagccctatgttactcaggtgtttacttgaaatttgttgtgcttattggagcttgtatgtgcagattgctcctcgcagaggaaggccatctcttgaggcaatttcttgtgtaggaagctttgcaaaagctatgggtcctgcaatggaacctcatattcgtagcggactgctagatgctatgttttttgctggtctttctgataaactggtagatgcacttgagtctataagcacaaggtaagatttcctttagttaattgttagttccttcgttttattctctactatagcgatgctatgtgactatttttttccatacagcatcccgtctttactacccacaatacaggagcgtttattggattgtatatctcaagcactaccaaagtcatcaataaggccaggtgcttctgttggtcgagcaaacaggtcaaacagtttgcaacagtttgtggactctaatagtcctcttcttgtgcaacttgcactgtggactctagcaaacttcaactttaaggtttgaaatgctctagtaagctgacttatggtattgtctttcaaacttaaatatgcatttgtttcagggccatgaacttctggaattcgctagagagagtgtcatactttatttggaagatgaagatagcagtaccagaaaagctgcctcattgtgttgttgcaaattagttgcacactccctttctgcttcctcaacttcacagttcggttcaaataggacaaatcgtattggaggagctaagcgccgccggcttgtagaggaggtccgtatgaaaatttatagtttaacatgtatctaagcattgctattttgccttatgtgttaacaatatttctcattttgataagggcaattaaattaaatgcataagtggtagtgttaggtaaaaattcacttgggtatagctaactgcagatcaatctcatttttgatggtaacatattagcgaagcataccttgtttgggtttttaattatttgatgttagtttattgaaatattctctatgctacttcagtatcactatgttagagatcagatttgaactcagtactgccttactgcatacacttctctctctctctcttcctatttctattgtgtgcttgcaaacctttttatgtgaggtgaagttaatcatgtgtagaatccgtcatgcaatattgtttcacaggattatgaactcgatgtttctataaactgttagtagaaaataaaggaacagcattggaacagtttgtacttttatgcacaagtgaataatagtaatacttagcttcaacatggtccttttttataagaaagtacaagtcgagcttctagtcattgtgaagggtcatatagtagccctttggcagccatgttttgatgtggcttagttttacattattatactgtacaacatggattgactgtcatttgagaaaaagcatggatggagttttaagtttttaacactaccattgatgcaacttctagtaaatgtgctaatttggcattccttacactaactaatctctatggtttaagctgcatattagaggcattggaatatccagctatgtcaattaacacatgctttggtttgaagtgcatatcttacacgggatatgggacacaatatattataaacttggtttaatcttcttacgttcatcatgggagcctaactatagtagttatttgaattaaatggaaataacaaaccttttactacattgtgtgccctcatgaagttattaccaatttctctgaatagatgtgattattttaagcatgtcagcatgctttcttaatatctttttttgcgaaagtgctttcttaatatcttaattgtgcttgaatggagttattttgagcaagttaaatttctcatatggaactttagaactgaatatgttgaagtgtatggaagaggattatgtgagcaaagtggagaggggaggcagaacatgatagactcagaactatttattgaaatatggacttctactgggatcctttaattaaccaaacataaatgggaaatgactatgcatatagtactttacaacagagttgtgatcagtgttattttgttggtatggtgtgcatctactccctgatttgaactagtcatacttgagatgagattcttcaaaagatgagacttggttattgtttgtcactttatgttcttttgccataggcgctcactgttcccgttcttaccttcatccacagatagtggagaaacttcttatggctgcagttgctgatgctgatgttggtgttagaagttcggtcttcaaggcgttgtatcgaaatccagcttttgatgatttcttggcccaagctgacatcttgacttcaatttttgttgccttaaatgatgaggtaggcctgttagatctgttaccagcttatcttatgtggtgcctgttagatctgttacctgccgcttcaacacaacatctatttgacagggttagcctagtgttagcctagttaccatttactttactgtaattgtgttttactttacctaataggttccttggcagccaagttgaatatggtgccttgtgaaccaagttgctgttagacagttttgctttaggtggttagaatctgtcagggacatgttggggtgctgtctgctctctaggctatatatgcagcagcccccctctcccttgtatcaatgtgagttctatttgcaagttcaatacaatacaagcggcctccggccaagctgccctctggcagtccaatttctgatttgcaattagttcatgccaacaattggtatctagagccaggttgagagagcctaggggccatgtctacctcaagccagagagccaaagcagcagcagctgcagccgccgccgccgttgccacgggcgcctacctagaggctggcgccgtggtgaacccagggggcgatcgcgccaggcgtttggcagcggcagaggcagcagccgcgcaggcagcagcagcagctcaggactcggccgctacagccgcggctctccgcgcggagatggaccgagagccgcgcgcgcatggttggagaagctctgatccgcgcaacgggagcccgtcgcggagcccagagaggcatcgccgggctcaatccccgtcgtcggctcgctgtcgcggacgcggaggccgtcgcggatctccagtggttcagacgatgtacaaggatggcggcgcggggactccatggccgatgtccaaaggttagtaacatgcgtgtccatcacatggacgttaagtccgcatttctcaacagcgacttcaaggaggaggtgtacgtgcagcagccaccaggctacgccgtcgccggagaagaagggaaggcctacaggctgcgcaaggccctctacggcctacggcaagcgccgcgcgcgtggaacgcaaagctggacaacaccttgaaggcattgggcttccagcagagcgcccacgaagcggcaatgtacaggcggtgcttgtcggcgtctacgtcgacgatctgatcatcaccggcgccagggaagatgaagtggaggcgttcaaggctcaaatgaagtagatcttcgacattagcgacctcggcgcactcagcttctacctcggcatcgaggtgcaccaggatgccatcgggatcactctgcggcaaactcactatgccaagaggattctcgagttggggggcatggatggctctaatcctgccaacactcccatggaggagcttcttcgactcagcaagaacagcacggctgctctggtcgaccccacgcactaccggccctcatcggaagcttgcgctacctggtgcacacacgccctgacctggcctacaccgtcggctatgtgagccggttcatggagcggccaactgtcgagcatcaaggggcagccaagcgaatcctgcgctacctcgccggcacgctggactacggcctctactacaccaaggctccaggaagggcccgcctcatcggctacaccgacagtgacctcgccagcgacgttgacactagcaagagcacgagtgggtcactcttcttcctcggtggctgcttggtcagttggcattccatcaagcagaaggtggtggctctttctagctgtgaagccgaatacattgctgcctccactgctgctactcaagctctgtggctgtcacggctgctagctgagctccttgacagaaatgttgaggtggtggaactgaagatggacaacaagtcagcacttgctctggccaagaatcctgtcttccatgagaagagcaagcacatcaggatcaaatactatttcctcagaagctgcctggaagatggaactatcaaggctgagcatgtgtccactactgatcagctcactgacattctgaccaagtctctaggcaaggcaaaattccaggagatgaggggaagaattggcttgaggtagatcaaccccaaggcacacaaggctaagggggagaattgacagggttagcctagtgttagcctagttaccatttactttactgtaattgtgttttactttacctaataggttccttggcagccaagttgaatatggtgccttgtgaaccaagttgctgttagacaattttgctttaggtggttagaatctttcagggacatgttggggtgctgtctgctctctaggctatatatgcagcagcccccctctcccttgtattagtgtgagttctatttgcaagttcaatacaatccaagcggcctccggccaagctgccctctggcagtccaatttctgattcgcaattagttcatgccaacactatttaatctttcttttttgttgtttataaaagtaaatatggtggggtgtttaatttaagtgttgtacaaactaaatgacaacgattggatccctttagtatacttctaatacactggattgttttcctgaccaatcttgtgtgttccctcatttaggggactagtatgtgtagaaaatagagaaatcaccacacacccaatgtgggtggggagcctttcataatgtgccaattaggcacacaaggaaggtacaaacatagcaggctatcactgcacaaggcaactaggctatacatagcagctagctaaactaggggatctctctaatcgatcctgatatatacatatcgtaatacccgcccacagtcgtagcagaagccggaagtatcacggacgcacagaatggtccaaaagttagtgaagtgctagacaggtagacccttagtcatgatatcggcgaactggtgcgcggaggggacatgaagtacccggaactgtcccagagcgaccttcttgcgaacgaagtgtatgtcgatctcgatatgctacgtgcggcgatggtggacgaggttggtagtcatgtagacggcgctcacattgtcacagtagacaaccgacacaagcggagcagcactcaaatttttgcttgaccagcgtttgtccacagttccgcagcaccagtggatcagcaaactttttggcttcgatttctccgtggagtatcgcccgggccgccttaacactgtggcggacgagttgtctcgccgggacactgaggttgcgacgccggttgaccaggaaggcgtggatgctgccgccctagcgctctcaggtccctcctttgcgctcctagatgacattcggcgggcgcaggaggccacggcggagggccagcagctgctggctcggcaccgcgcgggtgagctggaggctccgtggcgcctcgtcgacggcctactacatgggacccgcgtcttcgtgccggaccatggggacctgcgccaccaagtgcttctcttggcgcactcggctggccatgagggcattcagaagacactgcgtcgactgcgcgccgacttttacattccccgggaccggctccttatgcaggattgggtgcgctcttgcactacctgccagcgcaataagacggcgacgacgcgtcctgcggggctgttgcagcccctcgatgtgccgacccaggtctgggccgacatatcgatggatttcattgaagggctgccgaaggttgctggcaagtccgtcattcttacagtggtggatcgcttctccaagtatgcacacttcatcgcgctcggtcatcactacacggccacgtcggtcgcccgcgccttcttcgatgggattgttcgcctgcacgggtttccctcatcattgtcagcgaccgggacccgtcttcaccggtcatgtgtggcgggacctcttcaacatggcaggtgtcaagctccggatgagtacggccttccacccctagaccgatgggcagtcggaggtcgtcaacaaggtcattgcgatgtatctccggtgcgtcaccggtgaccgaccacgcgcctgggtggactggctggcatgggcggagtattgctataatacttcgtttcacaccgccttgcgcgccactcccttcgaggtggtctatggccggccgcccccgccgttgctgccctacacgcctggcacagccaggactgacgctatggacggggcgcaggagcttgccaggaagtactacgacgccggccatcgtgacttggagctgcaagtcggtgattgggtgtggcttcgtctccttcatcgcgccactcagtcacttgcaccccaggcgaagggcaagcttggaccgcgctatgcaggtccctgtcgtgtccttgaacgcatcggcgaggtggcttatcgactggagctaaaggagggtttctgtctccacgacgtgtttcatgtcagcctgctgaagcgtcaccatggggatctgccccagcagcctggccggctacctcctatgctggacggtcgtcgcacgccagcaccggccaaggccctgcgtgcccagttacgtcgtgatgtctggtgggtgttggtgtagtggcacgacctttccgaggaagaggccaccagggagctgctggacgatctttgcgccgcctaccccgacttccagctcgaggacaagctgtttcagcaggcggggagagatgttatgaccggcgtgagttattcacgccgcaggcccacaagtggctaggagttgtagggggctaaaggcccatatttattatattaattagctatttattagaatatttcctattttctagttgagagggttataaatacttgtaaacattattgggattaattaagcagaaacatattgtttctcggcttccctcagggagtcgggagttctttgtgctctagccctaatctgcagccagcagcagcaacggcgccgccgcgccgccttccccacgcgctccatgctcgcccagcgatcagccacacctacaaccttcgatctctctcacgcagggctaggaaccctaacattttgattctccaagattcttggaacgactattatggagggagtagtaaatttatgacttcctcacaagaagaggacttgtgaaataatagaccagagaaaggttctcaatatgactcattcgataatatggagttacattcaattgcatgcggatgtttttattcagcgtcttaaattctaaacaagcagagtcacccaaaaaaaaaaatctaaacaagcagcaaagttccaatttacatggcttccacgacaaatctggtactacagtagatttaaattcgacagaatatactttattccatataagcaatgaagcttatatacgagatatgggttccaatgtccataggtgaacgtgaacccctgtttcaaaggagtcacctaggtgtccaggcatgccaagcttgccttggggaacagtagcaccttgtctcctaggtgccgcctagatgcctagttgcctttgaaaccatgatgtgaaccctacactaggtcggtcaaactttgttttcctcaaatgacggagggctgcatgttatttcattaagaagtactccctctgtcctataatatagtgcattctaggaattttaagacaaattaggagagaacataaaagacgcatgtaccctcattttatttcctaattagacgctatcatcaacgtgattcatggtgattggttaataaatggaaattatttaatgtaaaactggtttttgttctctagaatgcattatatttgaggacaaaatttggatgctacaatgcactataattacaagatggagggagtacttatataaacttgacatgcactgttgtaatattgtttcctattctattttcttgcttataagtacatttttactgttcaatgaccctttagaatgttgacagatgatctattttactgtttgaattcttaggaatatgatgtcagagaattggcgatttctgttgctggccgattgtctgaaaagaatcctgcatatgtactgcctgcccttcgtcgctatcttatacagttgctcacatatcttgaccagaggtttaaaccacacatttttttgataataaatgtggtttccaaagttacatcatgttgctccagcatttttctcatgaaagtctgtcatttgcagtatggatagcaagtgtagagaggaaagtgctagattattgggttgtttaattaggagctgtgcacggctcattcttccttacattgctccagttcacaaggttagcaagaagtgaattcgtacttgtgtttatcttgtaaatttgactttttacattggttttgttttaggcgcttgtgactagattgtgtgaaggaacgggaccaaatgctaataatgctcttgctgcgggagtgcttgccactgttggagaactggccaaagtggttagtcttcatctataactccattgtggtgtttgcgtcctcataattgcacagtttttaaaaatatgttctgcgttatagggtggctttgctatgaggcgatatcttcctgagctgatgcctgtagttgtggatgctcttttagatggaggtgctgttagtaaaagggaagtggctgtgtcaactctgggacaaattatccaaagcacagggtatattcttctttgttccctttttctgtcctccttgattatgtatttcacattccaacataggtttctgtattgttttcaaagatttttgcaactagtatttttgcctgtttgtctgtgaagtttcttgccactttgagcttatttgttcatgttttacaaatgccctccagtcacagattcttcctgttttcaacaagactttggtgaaaattttgaaactttaactgcaatatcattaaaaaatggcttgaaacacgaaaattatatttattgatttgtcctggaaagtcgtaattccgtaagatcgtcagattttacggacatgttccatctgaaaatagtgtcaaagctagacttttgcattgttcaaaatgttaatatttgtgactggaggaagtgcagaattctgaggtctaaaactatagttatgacctcaataagtctggactctcctagaggtttttttacaaagtcatgtttttttttccaccaactttattttgatgtcgtgcactgaatattttcctagtactttgcagtcatcttgtttgtctctttaatgttgctgtggtctcctacgacaaggaactgcttctagtgctttgcttctgccatttgtagatgttctctctttgagtctgctgcattttccctaaattacatgttttcctacccagcatatggttcgactcttaagaacattgaacacagctgtgtgataatcctctgtagttatttcattttatactaaaggcttgtttggatacaagggctaattgctagcgagctaaaaattagctctagcgcatccaaataagagggctaataggtgggctaatttattagctaagtcttcaactagttgttagctaactaactagccaaccacagccaatttgggctaatttttagatccaactagctactagccatgtgtatccaaacatgtcctaagtgtattactgcagcttgaacatgatttatgttcttttgtatgggtgattcaccagctatgttatcgccccctataacgagtacccgccgttgcttggcttactcttgaagttgctgaatggtgaattggaatggtcaactagactagaagtgctaaaggtatttgtttcaatttctgcttaaagttttttaaaaaattgtataacactcctggccaagtaataaggcaatatttttttctcaggttttagggattatgggtgcattggaccctcatgcacacaagcgaaatcagcataatctacctggtcaacatagagaggtcctacggccaacaatcgagactgcacagcatattgtttctatggaagagttaccgactgacttctggccatctttttcggcatctgaggactattactcaacagtatgattttatgttccttcattagacatctgagattcaggtgttaccctatttcagctcattcccattttgctaggttgcaattagttccctcatgcgaattcttcgagatccttctctttcgagttatcaccaaatggtggttggctctcttatctttatttttaaggtaatacttctaattttctattttaaatagctattttcctcagcaaccttttgttcttgaacagtttgatcactttatttattattttttctctatgacaaattggcatctagtcaatgggccttggctgtgttccatacttaccaaaggtgagagcctcccgatttgctttgcttaactatcacccctatgctgttctatagatttctttatttcatttatttagtgcctatatgtcttgtgttaaccacagtaggatctacaatttcattatgctccatgtagtctaattgacagcaaggcacttgtttcagcttcagttatgctaaatttaactaatgtagacatcgatgaccttcaagcctggtattataactgatctgggctaacaagcgcttgttgcattcttgaagtatttgtattttgagccctgggactagttcatgattgtatgtgattctaaaagtatttgtgtttgactgtttccacaatatttcattttccactgtccattaataaatgtcacaggaagaataatgtggagaagcatcttcaaaccttgggctatcaatacatcttttctgtatgatttgttactagaagttttaatatgccgcatgaaataaaagttagactgctgctcttaagaatgctaaatttttgacatcatgctagaatccactttaagcatttgtgatacagtttcttattattggctttgcattgtaaaatgcttaggctttggtgtttctatctttctatttttgacaactcagcagtcagcatggaatttcaaatggttgtgcctagtatgttcagacattattttcaagaaattgtggtggccgagttgatgattcgaatctttgtaattttaaggtttcaattataattggttggatgtaatacaactggccatgcttgtgttttctgggaagagataggataagtgcacataaatttctgaaattttgtcttttgcttctaaaggttctccctgagctattgcgtgctgttcgcatgtgcgaggatggtggtttaaaagagttcataacctggaagcttggaacattgatatctattgtccggcaggtaatgtatctttttttattgatgcaaattattgttagtttctttgttaatgcctggcatattttattaaagttacttattttcagcacatccggaaatatttacaagacatactttcccttatctctgagttgtggacttcctcattcagcttgcctgcaccaaatcggaccatacagggcccacagggttcaccggtaattgtgcttgacttttgtgctgtcttttgttctattgtcttcaagcattttgtagacccttacagtgggccaatctatttggaccatgccatcatctaagctagcataagcatgtctgccaaactatggccttttgtagattccatcacagcgtatggccttttgtagattccatcagtgtatgccctttggtagattccatcatagtgcacagtatctcatcttaacaattgacattggtatctagtggaagaacatagttatcttaacatgttccttgctgcaatggtgggtagatagttaactttcacactatttcttttttatatatatcatggatgtttttctaacagcccaaactaccagcgctgcatatatgtagatatgaattataccgcattgcctgctaacgtatggggttagtcctatgcactgtatataatcagcccatggggctcaatgcaatacatctacaatttgcgtggcataccttctctaatactgtccaccctaagaaaagcttgaaaatgacccatgagcttcttcatatctcctttaattttcacattcttagtttatgttctagtgatctttctctctttttaatatctcttctatcctcttgattctataagctccttagtcctctggtggtcaggcctaaccgaagtatgccttgtatgagtgagtattcagtaagcctcaaatggtgatcagtatcatcatatactgaccttgctggtaaccactggaaaccattactgggtcactagtgaggaaacaggatgattattaggctggaaccctgtatcagttcgcatattcactttatgttgcctttttctttctagggtgattgttaattcttaaacattgagaagaactaggcccatcgtgctcttgcttctttctttcaaggtttcttgtgcatggataatcagcatagtaaccttttggcatatctgtaattgtctttacactctcttatattacctgctgaaggtttactttttctgatccttgtatttcataccatggttttatagtttaactatttgttttctcttcaggttcttcaccttgttgagcaattatgcttagctttaaatgatgagttcagaatttatttacttcacattctaccaagttgtatccaagtcttaggtgacgctgaacgttgcaatgattattactatgttcctggcatattacacacacttgaagtttttggtggtgtgtctccatttctcacttagtttcatgttcacaatggatgttattttgattataacttatgttgaattggatggtgacatttaggaaatttggatgagcacatgcatttggttgctccagtgcttgttcgtttatttaaagtggagctggttgatatcagacggcgtgctattgttactttgactaatcttattcccaaggttcaggttggttgatgctattattgggcttgatattttgtcaatccaattatgtagttttaaccaaaatggtcaaacattaggtttttgtatctaatgcacatcatgtgtattttacgtatcctgaacaggttggcactcatgtttcggctttagtgcatcatctgaagcttgtcttagatgggtaagattttttactataagtaccctttcttcatttctatatggtgtctgtcttttgaaaaagaaagaaagttatttatcatggtgcgttgattcttgttgctcggagtgttgacaatgagctaatgactatctgttagaattagtccagtaccatactgatttttcagcttacactagaagtcatcagtatattttccattagtggtaaacttcgacaatcaatcaattactcaaaagtaaaggactctcaatcaattacttgttatttagagacatcaaacataactttgaccatcaatcaatttctcaaaatgtattcttgtttagcacacaagagatgcaccaacagattcttatgtcacatgtcttttagcaagacattgattttgtagtaattgatagcatattgtaattctcaaagcatattttgaaagatttcctcaaagcgtaatatgccttataaaaataaatggagcaagtacaatttgtggcttgtctgcaagaagtttgcatgattagcttatttttcattatgacaacacttcatttgctgtgttttcttttggctagcaacaatgatgatctgcggaaagatgctgcagaagcgctctgctgcctcgcacatgcccttggagaagactttactatcttcgtaccatcaatacgcaaaattcttgtgaagcaccatttacgggtatcttattttttttctttttcgaacacacgagagctggatatcattttattaagaagaagaatatagtacaagaggagagcagaaacaccaatgtttataccattttgatttcatgcttgtaccattttggatgtttgtctaattatgcttgtcatttcttacagtacagaaaatgggatgagattgaaaatcggttactgaggcgagagctactcatcactgaaaacttgtctgtacaaaagtacacacaatgtccacctgatgtcattagtgacccccttgatgattttgatggtacaccttctgagatagctgatgaaacacagcgacaagcaagaagtcatcaagtaatatgcttgcccttctactcattatacatttcctctcttgtaccctacgtcttctattatgccatgacgagctctaaaatggtacttttctagagagcttaaaacaatgttttaatagattctaaatggtctcacagtgattttgatattaggaaaaggcacttagttctacctcttgcttgggctttgacataatcatattcccaggcacagcctttattatatgatgacttataatatttgaaagagcttggaccacacacaggattcctgatgttcatttgtgatgataaaaatatgttgcgcataagtaggaagttgtttttcccactcccagtaaacaaatagttgcaaaaagatctctggaatgccacgaagaatttagctattctggatatacatcaatgttctgttttgatttttcttcatatcatgtctgacatgtagcaatgcttttctcttttgcgtgtagcctctatctctgttggtatttttagaatttaagtcttttgactgctccaggtcaatgatgtccggttgcggagtgctggtgaggcttctcagaggagtactagggaagactgggctgaatggatgagacatttcagtattgcacttctcaaagagtcaccatctccagctttacgcacttgtgcaaggctagctcagcttcaggtgaagtagttctttagatatatgacactcatcttatgagtattttctgacacaaattgtccagccttctgttggccgcgagttgtttgctgcgggttttgcaagttgctgggcccaaatgagtgaatctgcccaggaacaacttgtgagaagtctcaagacagccttctcatctcaaaacattcctcctgaaattcttgctacactgctgaacttagtaagttgatcttgtgtttaacttgtatagttgatttggcattcatttcttttatttaatattttcattttgtaagtaggcagagtttatggaacacgatgagaagccgcttcctattgatacaaggctgcttggtgcacttgctgagaaggtgagttttgcttctgctgtttgttcggtttggcagttttttcaataacatgacactcattcaaactatctgttagtgtcgagcatttgcaaaagccctccattataaagaaatggagtttgaagctgtgtgcaccaagaagatgggtgcaaatcctgttacggtggttgaatcccttattcatattaacaatcaactacaccagcatgaggtcggttctaatgtcatgtactaggttaaaaaaaatatatcttagtttgttgacacctgccactatttcttcaggcagctattggcatattgacttactcacagcagaatttggaagttcagttgaaagaatcatggtatagatttattgctcttctatttagtttcttccagaaacatgttgcttccaataccattaccaattcatgacctttcctaaattttgtgtaatgcaggtatgaaaaattgcaccgttgggatgaggcccttaaagcatacaccataaaatcatctcaagcacctggtcctttacaaaacttggatgctacattaggtagcacaaaatcctgtttgctgtcttttggttctttcaaagataatggtaactaagtaacattcgtgcatattttaggtcgaatgaggtgtctagcggctttggctcggtgggaagatttaagtgcattatgcagagagcaatggactggtgcagaaccatctgctcgattggaaatggctccaatggttgtggatacctctgattacccatttggttgtagatggtaattggtgatctaatttctttgaacttctttttattttcataggctgcaaatgctgcttggcatatgggtgagtgggaccatatggcagaatatgtttctcgcctggatgatggagatgaaaataagctccgtatgttgggtaacacaacggctagtggtgatggaagcagtaatggtgctttcttccgggcagttctttcagttcgttccaaaaaggtaattgctccttgctttgtgtgctttatcgttttcattatttgattttacttttattgacaattttatgttttctttgacagtatgatgaagctcggatatttgttgagcgagctcggcggtgtttagctacagaacttgcagcactggtatgacctatctgtggtactacatagtgcagcattttattaaatttgccgttacatcttgtaccccaatcggacgaccttatgatgctatctgaagcaataagtatgaatgtattatagtgcaattcctaatgttcacctgcaatataccttagaattagggaaaaatggaaaagttcattcactaaccccaggtctccagctattttggtttgtccacttaacccccacccccctattaagttggcccagttttccctataacgaaattttgttgtttctccttgtacaagttgcacttttgctttttttaagttcacattttacagcatgattgctgacatgctatgttacagacaattagaatttcatgattattttcatagctttgaagtatccaatattgacaactattgatacaaagatgcatgagaactgatcacgaaaaaaatcttgaaatatttttctgacatgggggtatgatccattacaccacaaagttgaacttagaaaccaacttgtacagggagaaataaaaggaagcatttcattttttttctgactggcctactcccaaacacccttgattatggaaacgaagcatttcattacagggtggattgatccagtaatacatactccctccgtcccagtatataaggcataaccacctcgggttcaaagaccaagaacacatttaattctctctcacagcactagtagtactgcatttatgtttgtgagagagcatgccttatattataggacatgagcaaaaagtggttacgccttatatacaggacggaggtagtagttgggaataaaacaatttgaaattttgtacagggagccaagcggacagagggcatgattgcttgcctgcactatgataagcctgcattacgccctatgcagcatagccttaggctgtataagtgcatgatgaggtgttgtttggtttgcctgcatagcccccttttattgtaggagactgtttggttgcagtatctgtcttcacacttttgtaatgagttatttagctacaattagctggcatctgctgtatctatattaattattctgcttacctgttctgtgtatttctactgatgcaataagatgttattgctttaaggtgctaccagttcacttttgaaatttattatttgtatcataattgtatactctttatgtgacaatacttgtcaggtacttgagagttatgagcgcgcttataataacatggtgcgtgttcaacaactttcaaaactggaagaggtatttttcttgtccacttgggtgcattctgaatgaaattgatgttttgctaacaaaattagtggtttgtcaattaggtgattgattactgcactcttcctgcggaaagccccatagctgacggacggagggaacttattcgcaatatgtggaatgaacgcattaaaggaacaaaacggaatgtggaggttgatattatgtttctgatattgagtgctgatctgtgctgcatttactgtctgcattgacctcggaaaatatttcaggtctggcaagccctacttgcagtcagggagttggttcttcctcctaacgaagacagagacacctggataaaatttgctaaactttgctggaagaatggtcgtattagtcaggctagatctacattagtcaaacttttacaggtatgtcaggtccttagcagtcaccaataattggaatgtgtgtgtgtctagcttctctataacaaaattaatttctgacaccacttgcagtttgatcctgaatcttctcctgaattgacactgtatcatgcacatccacaagtagccctggcttatctaaaataccagtatgcagttggtgatgagcttaaaagaagggatgcattttctagattgcaagtaagttttttttgtccatgtactttgatggtacattgcaatgcacatttaagtgttgtacagtgtgcatcatactttttttttctttgggggataggagttgtctatgcagcttgctactgccatgggcaatttccctggaacatcagcaaaccatggtaccatgtcaaatgctggagttccactcattgctcgtgtttatttgacacttggtacctggaagaaggcgctatcacctgcattagatgatgattccattcaaggtaccaacaatgtcagttttctcgctttgcactttaaccttttatttgaaacaatatttttatttttctctccagaaattttgatttcttacaatcatgccacactaagtgcaaaggactgggggaaggcctggcacacatgggctttgttcaacacagaagtcatgtcacgctatactttccgaggtcgaccagatattgctggaaaatatgttgttgcagcagtaactgggtatttctattctattgcttgtcaatctactacgaaaggggttgatgatagcttacaggtgaatcttctcttttcttagttctgttctgcaagctttgctttgaccaaaggttcttttttgaactcaaaattgacaagccttgacatgcttttatctcactcttttaatggtaggattcaccttcacacagatatttattgtatgtaatagtttgctttttttgtcaccatcttactgttttctatgaagtgtttaatatgtccatggctccaagcatacaatgggagtaagtgttagcatttaatatgactctgtaactgtgcagatgccttggcacctgtgtgctgcgcctgggcacttatgtgccatagttattagctactttctctagatcccaagagctggtttcacaccttggctccttggttactccctctatatatatatgtgtaatccctcctctgtaatctaagattgattcaatatatcttcagtaagatttgccacatgaaaaacattatttgatttttggtagatttcagaaacaaattcttagaaagagtaacagttaaggacacctagaatgcctcaagtcgctgcgagacgaagagaacacagagcagagattagggttggaaaagagaatttacagtttggaaggttaaaaaactagtagtaattgtgcttctaccggttggagcctaaaatcagatggcccagttcggcacaccagatagtccagttatcatgttagctgctagttttatgtgttttttcagtgatataaatgcagcgacacatatattattgctacccctccactacattgttttccagttgatgtccaaattttgcaaacatgaacactttttatgtctgatgatatcttggaagttctagcattggctagtacagatttaaaccatcaactgctaaccagctggtgtggcaactttcatggcctgtaaacaccctgcctgctgtaatttgactgcagaaaaaataacattccctaatgctttatttattaattcaattcctgttagattttattggacttttgaagttgagttttgtttaattgtttgtgtaggatatccttcgtctgttaactctttggttcaaccatggggctacctcagaagttcaaacagcgttgcagaaaggcttttcacttgtcaagattgagatgtggctggttgtgctgccccagataattgcaaggattcattcgaacaccagagtagttagagaactgatacaatctttgctagttcgaattggaaaggggcatccacaggtatgtattattgtctgagtttgctacttctactgcgactatgtgcttctattattgtatatgcaggctattcatgtaatttaccatcgttgtacatcactacatcaactgtagtgatgtacggaagtatcattttcagtttaactatggaaaagggtgcaaaataaacttccatatctagcaatctagaaacaattagaaatccttgtcttggatcaaaatttaaaattattttaacattctttgttcatttgcatggtgtgcgtggctatgaagttattagcttttcatgttccacctttttcgtttgccttttctattctttgttattgcttgatcacaattgttttcttcattttctctttgtttttccccatgttttaaccaattttccagtgccctggagcttattttcaaacagacatattatccgtagcaatgaaactatggctactggttataactagtatgtctgttaactggccagacacccaacagggacttgttttaccttctaattctcctctttgaaccatcttaatcaggctttgatgtatcctctcttggttgcctgcaaatcaataagtatattgagacaacgtgcagcgcaggaggtcgttgataagatccgccagcacagtggaggtcttgttgaccaggtctgcatcattagttgtggatcttctaaggatagatgtgtatcattctaactctactttgttccaccaggcacaacttgtatcaaaggaactgatacgggtagcaattttgtggcatgaaatgtggcatgaggctcttgaggaagctagcaggatgtactttggtgagcacaatattgaaggaatgcttgctgtacttgagccattgcatgcaatgcttgagaggggacctgagacaattaaagaaaatgccttcattcaggtattgttttcatgaaaattatatgctctagtttaaatgtttcattgcttatccagttctctgcactaaccaccataccgtttgggtagtacttcataaaaaaaaatatttggtatatgttagctgctcaatctgttctgtttttgtaacagtaggtcatgctgcatctctttgaagtagcaaggtttaattccatattttggaatggatttattctataacacattttttaactaatgtttattaagaacatgttcaggcttatggacatgaattactggaagctcatgaatgctgttcgaaatatcgggctacaggagaggatgctgagctaactaaggtacataaaaacttgccattttgatagcttgcgtattgtcttatgttgataatgcatctaaggatgacaactatattctttaggcctgggatttgtattaccatgttttcagaagaatcgacaaacagcttccaagtcttacaactctcgatttgcacgtaagtatattattatttttattataagaaagcagtgttttttaccatctcttccctgatcaagtatttaatctttctttcagtctgtttcgcctgagctactcaaatgtcgaaagttggaacttgctgtgccaggaacttatgctgcaggttatccagttactgattagaatacttaatttagctctgttgttcggggtacctgtactgcatttcttacatctttgagctttcagaaccctaaatattgattctgcttcatagaattctaatatttagattgacattttacttccagattcaccacttgtgacgattgagtattttgttccccaattgattgttataacatccaagcaaagaccaagaaaactgacaattcatggaagtgatggcaatgattatgcattcttgcttaaaggccatgaagatttgcgacaagatgaacgtgtaatgcaggtctgtatttacactgatttaaatggtccttttgttagtaatataggcttgattagcactcatatctttgtgtagtgttcccataaaattgtgatagcccagctcccttgttttagaaaataaatcttattgcagctgaggctttacatttgagcagttatcttatgcctcagcagtattgatctgccttttttacttgagaccaaaataggctgagggacaccacaaatccaaaatctttaacgaagtcagttcaagtgtccattaagaaaacatcgaatgggccttagaatttataaatgtgatactcattctgaaactaggtgaaaaattgcactggcagctagtcgtggctgaaaaatgcataatctatgcataaatagcagtgtcttgccccaactgtgattctgaaagcacagtaagggaactggagtcccttgggcattcagttattatgatttaagaagaatttactagtttcaatgttttttttttcttggtagtggaaatagcataaatgttacctcttgcttaccttttttttgtttagttttgttcttgtacaatatctaatttttttttcttctccatttagctttttggtctggtgaatactctcctagagaactcaaggaaaacatcagagaaggatttatcaatccaaagatatgctgttatacctttgtcgcctaacagtggtttaatcggatgggttccaaactgtgacacacttcatgctctgatccgtgaatacagagatgccaggaaggtttgtctgctgtaatctcttgtttaatagctgtatctattttgctgccttttatttagcaattaatgttgtttccctttccagattttcttgaatcaggagcacaaacttatgttggcttttgcacccgattatgatcacttacccctcattgcaaaggtggaagtgtttcagcatgctttgcaaaacaccgagggaaatgaccttgcaaaggtattgtgttgtattttgtgtcaatgagtatgccctttatatttacgacattgtagcgtcattctatataaataaactgtggcaggttctgtggcttaagagtcgaacttcggaagtgtggcttgagcgccgcacaaactacgctagaagcctggctgttatgagcatggtatcagttactttcttattcttatttttcaaatggaatcttcaggttgggtattttcattaccttaagatgctgaaaaggtaattttcaggttgggtatttgcttggtttaggagatcgtcacccaagtaatcttatgttagatcgctataggtacatcttcagaactagtcttatattagtgtatgtattatgcagttacttctgtaataagatttttttttttttgcttcagtggaaaaatattacacattgactttggagattgctttgaggcttcaatgaatcgagaaaagttccctgaaaaagtaagtaatattgctgtgtgcattataccttaattattccctcgatttatttttataaggtgtgtagatgtttcaacattcaaactttataaactttgagcagaaattaatataccagtgtgtagattgcgttacacaatttgcacaatttgattcggaagtggtttcttatgattaagattttaaagtcagacaatatactgtaagagaaatcagaggtccatgcctgagatttatattcatagactactataagagaaattagtggtcaaagtatattcttgccttcttggagacacggccaacatttagaaatgtgtgacttagacattgcttttttgtttgacagtatcttaccagtttgcaatgtggtataggtaccattccgtttgactagaatgcttgtgaaagcaatggaagttagtggtattgagggtacattccgaacaacatgtgaaaatgtgatgcaagtccttcgcacaaacagagacagcgttatggccatgatggaggtgagatgatcgtcttattttctgtatgacccagagtagagcatctatcttggacaaatatttagtttcttcacttcagatgtggatagatatttttattcccagtacaaattctgaaaagtaaaaagaaataatgtttaggagttagttttcttaaggctggattcagttagatgttaagagcttgattaggtaaagcaagttgccactcactaaagaaattatcgtatccttgtttagcagaaattttaagtagcaaactaatttgtcatgtgtgtgccatattttgggttgattctcccaatgtttccacaaaggtctgattttgtagtgggaatagtttggagaacagaataggaagatgactgtctttttcccttcagttcgttgtgtgtttcttgtaccacctacctacatgcttggtgatcttgtgcttattaggcatttctttcctaaatattttgcttttgatctccccaggcatttgtacatgacccattaatcaattggcgtctgttcaatttcaatgaggttcctcaagtgtcaaactatggtaatgctcatgctcacacggttgtcagtagtgaagacgcagtggctaatcgagaactcatgcaacctcagcgaggagcacgtgagagggaactgctacaggttgcctgctcttctccatccacatgttctgattgcacccccttaccacgtagctggatgagtaaccattcatgttgtccatgtaggccgtcaatcaacttggtgatgctaatgaagttctgaatgagcgtgctgtagctgtgatggcacggatgagtgacaagctaacagggcgtgacttctcttctgggtcagctttggctggagcaggtagctcgacccaacatggcagtgagcacttggcttcaggagatgcccgggatgcgcaacctgctctctcggtgaaggttcaggttcagaagctcatactccaagccacctcgcacgaaaatttgtgccaaaactatgtcgggtatgaatctgttcgtacttcctcttttcttgcagctgccctccgttgtgtaattctgggtcagccatcgttttttgtgactgtcggttactcactgtatgttgcttgtttgtttcgcaggtggtgtccgttctggtgagcgctcttggaaacagtagcagctagcatgtaaatattgtgaataccgtgtacatagaggtttcgtggtgacagtttgtagctaatctgtgtagtgctgtaattagtagaacctcattcgttaataaaaagttgccttagaccatcctttcttcagcatctttggttttgttccctgcctaaggcctgctaatggggacccgccgcaaacccaccccgacccacaataaataagacagctcttgtaacccaaccgtacccaaaaagaaaagaaaaaaaaacgtatgaacacaacataactcgctgccgttggcaaactcaccaccctagcagcctggccacggcgacgccgccgatgtctggcagcaaggccgccggcaagagcagcgtgcagaggtgctacttcgcagtgtacgtcggctaggagatttgggccactcggcgttcgcggagctcctccgggaggcagagtaggaacgccccggcacgaggatacgatttggatccctgcgtcatgtgctggattgaatgcatttgttaacatcagagatctagcaacaggaactgagtaggaatagattagaaggaatttgggaagggaagcagaacacggaaggtagctaggacgagtcttataattgttc

SEQ ID NO: 3549 - DNA, 3501 bp, Sorghum bicolor
tgtctctttgtttgtacattaatgccacactagttaatttaatgctcatgaaactctcataaaacttgagtaaaaagagtagagacagacaaagatcaaattcttgttggtggcgtcagttttgggacaaaaccatgattttttttatgtttgtaacatgacctcaaatccattccagtagttgttcacccgttttgggtttagccaacgatccaacatcgaatgcgtgttgcctgcccaccctcctccccctatgtaacggtgtaacaatttttaatttcgtgtgcaccaatgtgttctacgtgacaaagcgaacaaaactataccccattgtcatatgtttcaaataatcttatgtttagaaaaaaaatatgtgtacaacgtataacttatgttaaaacttgaaaatacaaaagttatgaaacacaactctttcttttccttttttcctctttttactttttatagtggtatatcagttttcattttatgcattttatcaatatatctgctactatgttgtgatattaatttataaatctaaattgtatagaataacttatgtacacaagttgtacataacaacttatatacataaatcgtatttgacaactttttagataagttgtttttttaactttttgtgttttcaagttttgttattagttataagttaattcgtactttgtgtttaataacttttgtgtttttaagttttagtatgagttaagataattcgttctttgtgtttaataacttattatgcacataagttgtgtttcgtaacttttatgttttcaaatttaggcataagttataagttatatggtataacttatatgctagaagttattatatacataaattgctactagaaaaaaaatcttcgaatcatattcatgtagagtctagttttgtttatcttgtcgtggacgaaactgaaaataaatttacaagaatcttgtaatttgttggctcagttcttcggaggtgctcataagagtaagtttgcatacatatatttataggatgagtgtgcgtgcgttgttaggccttgtttagtttacccaaaaaacaaaaaacttttcatgattccccatcatatcgaatcttgcggcacatgcatggaacattaaatatagatgaaaataaaaactaattacacattttgcctgtaaatcacgagctcttttaagtctagttactccataattggacaatatttatcaaataaaaacgaaagtgctacagtgttaaaatctattttttcatctaaacaaggcctaagtatctatattatcctatgtaattctaataaaataaaataagtattttgttttttagactacgtcagcaccgaggcaagcagtgccggacgctattgtactgtccaaataggaacaggtgggattttcctttacttttgtcaggaaagaaaattatgcttatttcgcatcggatgagcgttggctctttagcggggtcgtaacgtgatcatggttgacaacaagtgttttggacccccagcttgttcattagtctctgcgattgtggctaccacaccaacaaagttaaaattgtggcatgggctggtcacgggagctgggactcgtgcactattatcttatattatattatatgccacatagtacaaatactcttcctaaggacactcacaatacgagactctatcacagagtcaagacaattaactacatattatttatggtattttgctgatgtggcagcataattattgaaaaaagaggtagaaaaaaaagactccaagtcttatttagactccaagtccacattgttcaaggtaataaatagctttagactctatgatggagtctgtactgtgagtgtcctaacagcgaaagtgctactataaaagtcgaaaacaacctctaagacgcccggaattgccgattaagcccacaccactttccgctcgttataaatcccccgacacgcactcattcaacagctccaagaacagagcgaaccgagcactgaatctgaaggagagtgagctgtccaaagcctcctccacaatggcgcaccacctcgcgctgctcctgctcctgctggcctcgccggcggcgacgcgtctagcatccgccgcctgcgggagcgagaagttcccagcggggcgcgcgtacgcgtcgtgcgaggacctgccgaagctgggcgcgtcaatccactggacgtacgacgcgtccaagacctccctgtccgtggcgttcgtcgcggcccccgcggcggccggcgggtgggtggcgtggggcctgaacccgacgggggaaggcatggcggggacgcaggcgctggtggcgctggcggggtccgggtccgcggcgcccaccgtgcgcacgtacaacatcacgggctacgtcccgctcggcaaggcgtcgacgccgctcgacttcccggccaccgacctcgccgcggacgccgccgggagtggaggcaagatccgggtgtacggcaagctgcagctgcgcaaggggatgaaggccgtgaaccaggtgtggcaggtcggcgcgtcatccaccggcggcgcacccgacaagcacgcgttccaggcggataacctcagcgccaagagcaagctcgtcctcgccggcaaggccgccgcggccgaggccccctcgcctgcctcccccgcgcccgaggccggcggcccgtccgcgtccggcgcaggcagcgacagcggcgcggcgtcgtccatgtcgccctccaagtcgcctaacgctgctgtgcccgcggctggcgtgtccgcgcccgcactcctcgtgctcgcgctggtgggcttcttggtgacggtatgatgatgatgatgatgcatggtggctggatggtgggcggtggcaccattcccagcgaaggtggcggcggcggcggcggtgggtaggggaggggaggaaatattgtggctgttttagttcatttttcggtttgtttttggccgtgaaataaaaaaaaggggggttgatgtactgccgtactgattgttgagctgttgttaggtaggcatgatttactatttactgtagtggacgcggtgttcatcggttctccataatgagttctctggcctttagttgtcgacgaaagctagtcggcagtctatcttagggtatacccacggtagtagtttatcggtagacggtgcgcgaactacgaactcgacggtgacgcaagacacggacaagctttttatccaggttcggccgccgagttggcgtaatacctacgtcctgcgtctggttgtattgatttgtgctgagagaatatgatgtatatgacttgtcctctaggggactcctgcccctccttatatatcctgaagggacagagttacaagcaaagtatcctatttggtacaaaatcttgtagccttgcggtgcacgccgaccagtcgtgcgccgcacgtcttcatcttgtgggccgagccacctctgatggtgcggcccatataggcccatgagggtatag

SEQ ID NO: 3550 - DNA, 5163 bp, Sorghum bicolor
tcgtccacacagcccttagagcaagccgtcgccggcggcctagagctatccctctacggagtacatctagaaggcaccatttttgtcaaatccgatcgcgggtggcagagcaagaggatgagtgaggagtgcacacctaaatccttatagctcgtgaggcaaggatttcgctaaattagtagtacaacaattaataagaagaacaaaaaaaaaacactctatgcatgcaaagccaccaaggattccgagagctcggtcggcagtgccgagccccgggttcaccacaagtcacaggatctccgtctttctgggggaaaatggccggggtccgtcaagaaaacagctggcacggcccatgatacggtgccacatgtgtcggcgtgctcgctttacccgcaggccgccgcaggagaaaaccaacaccgccaccaacactgtactccactgccggtcgcgtcgtgtcgctggctgcccccctcccggctcccggctcccggcgtccataaatacgcggccgtgcaccaccccaaacccccgcacctcccacccgctcctcacttgccgtctgctgctgcattgccttgccgctccggcgacgctctaggagatcgatcatcgccggcgacgctccgctactttgttgagagaggcagagagagagagagtgctaatcgccggccgcggccacttgtactgggagtctgtccggtaaatgactggaggccttgccggcggcgtcgtcgaggtagaggtgctgggtccggtctcgttcttcccgacgtgcctatcgtcgtccccgtcgccggagaagttgctgcgtggtcgcaccggagggtttatcaaggaaggtacgcgtgtacgtatacatatgcttatatattaattaatctatccgagttagagtattaatcgaatcctcacacagtatttcctcaaaaaaaaaattatcacacagttgccatcaagttatctgtccgtcctttctcctttgcgatacaactagtaggtaggaacgaaagtatatagtaaactgattttgtaagagtacgcttgtgtgcaacgtacatgcgcaaggaactcgtcagttacagtcgcgctactaaactgaagtgattttgtttgttggcgtgcatggtaaaagaaacaaccacccttacgtttgctgctctgctgtgtgtgcacaacgttcgacatcattgttatcgagcctagctatgcctatatgggcgtgcatggtttacacgatgctttggccggacggacaggtagctgcttcgtttctggagtcagtagtgtctgatatggatacgtgcagaccagatcatgccaaaagagccagctgacggcggcacatgatgaccgtctctgcttgtttttacgctagtgcacttcgggagcagaaaaagacatcttctgcatgctcagctttgttatataattaatagttgtgtatctaattaggaagcgttatgcatgtttttttaatctattgttacttcatccctaaccggagatactacatatcacaatcacagggtaaatcttgctggctagctcaaggcttcgttagggaaagggcgaaaggctgcagaaattcctgaagaagctgcagggaataaattaagcaacaaaagggtatcctgttagaaatatgtacgtatttcagaactcagttacaactagaacattttaatcggaacacttgctgagtttccacatcatgacagttgatacaaacttccatgcaggactgttgtgtaacagcatcctaaatgaaatagttcaatacagtacatagtacagcaactaaaaagataggcagacagctgcatctcatctcatatgaaccgtgaactaataagactgataaggagagattgtgaagaacaaaaaaaaaaaagtagcattggaaattctggtaactaactgttggtttattttctgaataattgatgacgcagtctactgaacaaggttcagaaaactcactggacaagctgatggatcctaccactattgattcgaaatggacgtctcccatcactgaagatgggtccatggacagacgaggaaacccagctgtcaagacaaccaccggaggatggagatctgccatcctgctgttaggtaaaagctatttttctcaaaaaaaagaaagaaagaaatgttgtaaacatctcacgtgatgccgattccctctgtacatgactacatagttactagattctgatattgtaaagaactccggcatggaacagttaattcaactgtgtaatttatcactgcaaccgtttccgtttgcaagcatattcccatgcattggctgcctctgcctgagttgaatgcagttcagaatcaacaagaaccccttcttcggctgaatagcaacaaactccagagtgaggagggttactccatcactaattcactggaaaaacatcctagtactcttcaggttttccactaagttttgccctcccatcatcgcttcactctggcgtgatgcacaaactctgttttacatacattcgaaacctgactaagctcaaacagatgtcacaatattggttccgggtccgaaaccgcggatcagatgtactgagggctgaaactgacaagatcacgtctgttactgatgcagctaactatggactcgcgacgtgcgccttcttcggcgtcggcgtgaacctcgtggtgttcctgcgccgggtgctccaccagggcaacgccgaggcggccaacaacatcagcaagtggacagggaccgtctacatcttctccctcatcggcgccttcctcagcgactcctactggggccgttacgtcacctgcgccatctttcagatcatctatgtgacggtgcgatcatcttcagacactgaccaacccatcagtctcctgtttctgtgatccttttctgtcggtgcgctgttcttacttgcctttatttggtcagggcctggtgatcctgtcgcttgcgtcatggttcttgttggtgaagccctccggctgcggcggcgtcaaggtgcactgcgacgagccgtcggcgcccggcgtcgcgctgttctacctgtccacctacatgatcgcgttcggcaacggagggtaccagccttccatcgcgaccttcggatcggaccagttcgacgagacggaccccaaggaggggcgctccaaggtcgccttcttcagctacttctacctggcgctcaacgtggggtccctgttttccaacacggtgctggtgtactacgaggactcagggcggtgggtcatggggttctgggtctcggcggccgccgccgcgctggcgctcgtgctcttcttgctcggcacgcccaactaccggcacttcaagccgagcggcaacccgctgacccgcgtcgcgcaggtgttcgtcgccgcgttccgcaagtggcacgctgaggttccccgcggcgagctcctccacgaggtggaaggagaggaccctaagatctcgggcatccgcaagatccttcacagcgacgagctcaggttcctcgacaaagcggcgacgatcaccgagggggagaagatggagaacccgtggaggctctgcacggtgacgcaggtggaggaggtgaagtgcatcctgaagatgctgcccatctggctgtgcacgatcgtgtactcggtggtgttcacccagatggcgtcgctgttcgtggagcagggcgccaccatggacaccaacatcgggtcgttccacttccccgcagcgagcatgtcgctgttcgacgtcctcagcgtgctggcgttcatcgccatctaccggcgggtcctggtgcccgtcatggcgcggctgtcgggcaacccgcagggcctgacggagctgcagcgcatgggcgtcgggctcgtgatcggcatggcggcgatggtggtggcgggcgtggtggaggtggagcggctgaagcgcgtggcagccccggaccagccgagctccctgagcgtgctgtggcaggtgccgcagtacgcgctgatcggggcgtcggaggtgttcatgtacgtggggcagctggagttcttcaacgggcaggcgcccgacggcgtcaagagcttcggcagcgcgctgtgcatggcgtccatctcgctggggaactacgtgagcatcatgctggtgagcgtggtcacaagcctcaccgccggggagaagcgtccggggtggatccctgggaacctcaactccggccacctggacaggttctacttcctcctcgcagcgctctcgctcgtcgacctcgccgtctacatcgcctgtgccatgtggtacaagggcatcaagcttgacggcggcgacggcgatgacagtagaaaggtctctgcgcatgtctagccactgggcctgggcctttagttctttctggttcagagacgtgccgggctggccgtatatatagaaaataaaaggaatgtcaaagaagctgcttgtaaaccatccgctcagtattggacggcccatgctgttctgcatctttggtcagagcagaggctccaagtaacttcatgtgaagtactaatgctagtatatgtatgtatttatgtatatggatgtcggctgaacttgcttgtaaccatcctctcaatagacaagttgtgatcgatccaaaactccaaatggaagcaaagctgcctgatccatgtcagattgtcatcttcgtgtgtagtaagtcactactgcaaatctacaatgcatgtttttctcatggttacccgcactcgcgacgcgtcatcgttcttagcagagctgagcatcgtcacagccggcgtggggtctatggtgacacatgcagagcaagggcggattcagagagggttgcagcgtgagctctccagtccccctacaaacatgaatgcaatggatctctcataggtctccctacaagttttggacatcgataaactgatggaagtagaagaaaaagaaaaagaggaagtgaggccaagaaagaggaagaagagcaagaatagaagagaataaaagatggacgagcccttctagtattgttaggctgtgtttgtgtcacgacgctaactctatttggattactggagtttaatacttagaacctgtttggcacaactgaacttactagtaaagttgtttttttagaaaataactttataagcaactttctagatgaa

SEQ ID NO: 3551 - DNA, 5738 bp, Sorghum bicolor
ttgggaagaggatgctgagtgaataaaaacgacatgcatatgcatgtttcagatgaaaaacatcatcgtttccaaggatagaagtccagtatcttcatctcatgcatgtttagatggagagtaactttttaccaaggccagtagaaacatacaccttcgttactcgttagtggtgtactggtgttctaagatcagcgccaacgcacagtggcggacccaggaattgggagcaaggtatgcctatggtaaaaaaaatttggatgaacaacacaaaatatttagatctgcttagataaaagatacatatagttcaaatgcattgcatatctgtaaattttattttgcaattgaaaatgacatttaatagaaccaacaaagggaaaaggaaagggatttaagttttattactccaagcaaagggggcgtcgtggccgattggccgcgcggggacgcccgatgccggggagcgtagccgccgaagcggcagcgcggggacgccggcaaatcaagcatccgcacaggacgcagcgcctacctgcgcgtctgtggcgaatcacgagcggcggcgcgcggtgaaagcggcggcgagcggttgagagtcgcggaagtgcctgcccgcgcgtcagtgcgcggctgccctacccctacggactaggcctgatggttttaggattttgggggagtggaaaagtgagtgggaaggttagatgagtcatggaccgtttggattcgcgtggcttatggggctgcttttgagttagaggtgaattgctgaataaaatgacctagaaacacagaaaacgtagttttaacaccttatgcatattatatatgtatatatctcaaatatctattaaatttttttccaaaaatgtagggtatatccgggaatacccgagcacaactgtaggtccgtctatgccaacgcacaaactcaacttgtaggcctagcttgctagctatatttggatgtcacgctgttctaaattcatatgccttaaaattgatataagtcaaaggctactatttcctcaaaagagagaaaatgacatgtgcgtacgtgagacgggaattagaggttgtgtccgctttagcttctttctgacaaatgctgtaacgtctttgtttgcaactgtgcgtgcagccgtgagcttctttagctttggttctgacataatgccacagggcgtctataggcgttgtttaaatacatcaaaaacccaaaactttacaagattttccatcgcatcgaattttacagcatatgcataaaacattaaatatagataaaaaataattaattaaacagtttacctgtaaatcacgaaacgagtttttaagcctagttacttcacgattgaataatgtttgtcaaataaaaacgaaaatgctacagccataatgttgaagctggcgtgaggggtaccaagcatgtccttgagtaaaaagaaggccccggtgaggaaaaaaaaagttcaatcctagttggcaaaaataatggttctatgattcaatatctatatgtcatgttaattgaaagaacagtggttctaggatcatgtgctatatcctgtttgtttgaatttataatgatgctgaaaaatattgttgcgctgataagttcgagtgaacagatattaacttttgttgcgtgggtgaaggccatgccatggcctaaagatcaaagagacgccatcacggtgctgcacttttcggctccctcctgcttccacatgccgcgcgtcgtctagaaatccctgattcagcagcacacctgtgcgcctagccgcccacgcgtacactgataaacagtttttttctagtccgcccacacgcgcgctccgagccgcagatcctagcaagcgccgcgcatccgacggccacgacagcgcggtgccgtccgccgcccccaccgcagcttgtccacctcctgacccatgagcggaaaccacggtccacggaccacggctgcgttccagtccaggtggaggctgtgcaaccccggttttcgctcgctgcgccgtggtttgctgcccaaggtggccggaggtggcgaaaccgcacccggatccttcccatcgtttctcatctcttcctcctttagagcttagtatataatcagggctcttgtctcctggctcctcacaggttcgtttcggtttggattgattggtttgatcagtcgtggggtgagggtcttggagtcgattgatctgggatactgttagaggatttggggagggggcaatggcgaccgcggggaaggtgatcaagtgcaaaggtccgtgatttctcctctgtttcttgatctaattaattttggtttatggttcgtgaaatcgtgagtacttttggggaaagcttcctagggagttttttttccccgatgaacagtgccgcagtggcgctgatcttgtatgttgtcctgcaatcgcggtgaacttgttctttttctatcctttaacccccatgaaaatgctatttatctttcttacatcttccagttccagcactgctattaccgtccatccgacagtctggctggactgacactacttatggagcattgctttctttgaatttaactaactggttgagtactggctctgtttctcggacggaagacatttgctaatccaccatgtccattcgaattttgccggtgtttagcaagggcggaaagtttgcgtcttgatggttagcttgactatgtgattgctttcttggacccgtgcagctgcggtggcatgggaggccggcaagccgctgtcgatcgaggaggtggaggtagcgcctccgcaggctatggaggtgcgcgtcaagatcctcttcacctcgctctgccacaccgacgtctacttctgggaggccaaggtatctaatcagccatcccacatttgggtcttgtcagtagatatgatgcagcaactcgcggttgacttgcgctttcttggcggcttatctgtcttaggggcagactccggtgttccctcggatcttcggtcatgaggctggagggtatgttctattctccgatttacttcactatgttgctggctaagtggctatagatgtactgtgtttatactttacaaatgtattatgttcgagcgcctgaatttatggttgtcgttggtggtctttgtttaatggtttactagatgcatgtggaagagtcattaagaaacagtttctgtttgaaacggtatatcaacgtttgaatattatctgtgtggacgtcagatgttgtggtattggcagtggacttagatttataattttcagcagcagtttcttcagctaatttactctcgagtatttttcagtttacaaagacagtacaactagggttgttcagtccttaattggcatatatgagattttgctttaatttgagattcgttatctgagtcaaatttgcttattctagcgccctgaaatttcttgattttgacagtatcatagagagtgttggagagggtgtgactgacgtagctcccggtgaccatgtccttcctgtgttcactggggagtgcaaggagtgcgcccactgcagatcggcagagagcaacatgtgtgatctgctcaggatcaacactgaccggggtgtgatgattggcgatggcaagtcacggttttcaatcaatggaaagcctatctaccattttgttgggacttcaaccttcagcgagtacactgtcatgcatgttggttgtgttgcaaagatcaaccctgaggctccccttgataaagtttgtgttcttagttgtggtatttctactggtaagttcatttattacatttgggtatggatgttagcatatatttatgttgagatgctgagttatataatttctatgtttaggtcttggtgcatcaattaatgttgcaaaaccaccaaagggttctacagtggctattttcggtctaggagcagttggtcttgccgtaagtgttgaaattattcacttgttctatcttctatgacctttccattacaatgaaaatgtgtgttgggtttgcatctgattacgctgcacatgattaggctgcagaaggtgcaaggattgctggagcatcaaggatcattggtgttgacctgaaccccagcagattcgaagaaggtgaatccctttaatctaatagctgataactcagtagttattttactattttgttttgataagtcagtagcttacccctttgtcccattttcagctaggaagtttggttgtactgaatttctgaacccaaaagaccacaagaagcccgtgcaggaggtctgtttctttatctgagacaacaaaaggttatcacagcttatgctgaacttgaccataacatgcaattcctttatggtttaggtacttgctgagatgaccaacggaggggttgaccgcagtgtggaatgcactggcaacatcaatgctatgatccaagcatttgaatgtgttcacgatgtaagtacactcttatacatgttaagctattgttctccaagttctctttattcacatgtcctggccgctgtgctcttgaatccagggctggggtgttgctgtgctagtgggtgtgccacacaaggatgctgagttcaagacccacccaatgaacttcctgaacgagaggaccctgaagggaaccttctttggcaacttcaaaccacgcactgatctgccaaatgtggtggagctgtacatgaaaaaggtaaatgcaaagtgttgtttcttcagtttccttaccagttgacctttgctgaaattgttatacccaaagaaacgtccctacaactctgcttaactgtgcacaggagctggaggtggagaagttcatcacacacagcgttccgttcacggagatcaacaaggccttcgacctgatggctaagggagaaggcatccgctgcatcatccgcatggagaactagatttcgctgtctggtttgtgatctgacctgggttgggttaataaaaggggcaatgctgagcctgcccgttcgatgcggtagatacaggaccacgcttgtgtgtcgcgttcagtttggctttgtcaatcagtagaacaggttcccgtgtcttgtaattatatatcggcatgagtcttatgaaccaccatcttttggcgtaatatatatatggtatgctaccactatgagtctatgagtttcagtctataaacttcttctggcccacttgcggtgatgttttagctattttgctgctgtttgtgttgaattttgtctaaacttgtctctagttatttactctgccccttcaaatcagacatatgggccaggaaaatctagtgtattttcgtcgattcacaggcgctgtgtcgcgcgtatggtccagactccagacatgtcatcaaaatattcagaaatcaatccacagagatgtaaggaaagaattagcttcgttttcaacagagccaagtttaatctgctgcgcgaattttgagggaaattgaatttgtatatatgtatctctctggacggatgacacacaagatcaaagaactaaagaccacacctggctcgtatgtccaaagttttaaaaaaaaaaacacagaagaaacaccaacagaagaggaaatcaaccaatgaatttcagagcaagccggggcgcgagtggaaggggaactgatgcatcacaactacgggagccttctcacgatccctcctcttcctctccttattgcctcctgctgctgctgcggctgcggcggcggcggcctcc

SEQ ID NO: 3552 - DNA, 5418 bp, Sorghum bicolor
acgtggtagttactcctctgttctctccgtttagcccgtaaatactgaaaaccagatcaaatcaggaggagaaactgcgaaagccggctgaagttgacgtcgctccggatcgccatcaggccatcacatcaagcaaccggtaatgcagagatctcacttctcccctcctcgctcgctcgctcgctgctccgatccgtactcgtcgtcgctccctcgtgcgccctgcctgtagcctgtaggtggttgccatggcctgattgcgcttctcggtctcgcgtgagagccactcaaagtcgaaatcaccagctttccttgggttggttggttgcctccgtggcggttgcaaccgatttcgggtggggcgcgcgatgccgtcgtgatggtactggccgtggccaggccggtctgctgcgtgccttttcctcggcttcactccattgtcggcgggttcctgcgtaaactattgttgtcgaggagctcagagctgcgatgcagatctggtgtttgttgaaatgtctctctgggactgggaggctcttcgcgtttcctgttgttggggtgatcgctgctgctgatcttggtagtggtggggtgggatttttaaaaaattgtgatctgtttagtttgttgtcttgtgttttatttatgacgatgtcctaggtcttggggaaagtgatgtgtttaatgcaaattatttgataataaaatagaaaatgtttaaaattttatttagcttataattttttaatatatttttggctttgtcagatgtgtattagtaggagtaccttgatatgtgccgacttgtactaggtagaatttatgtacgtatcagttaagcgagaaaacaggggcatttgttgacttggtagcttcaacatgtgccgatccatgacttagagctatggaaattattgaactttctcactagaggtagcttaatgaagaaaataaagatggagtctttgtcagtctacttgctagcattaatcagatgacagtgactgcaggctaagaaagttctctcttttcctgcttacactccgtctctgcataaagaacgtctctccagtattttttttcctttttaatttttggagtttcctttcagtagatccggcctctgtttcttatcttaatcagcaaacaacaacacacgttttgtttggtggacagtaatctctgccagaagcatcagcatcaccttcctggatctgactgtgtccaggctatgaaaatttctactgcctcggctccgttgatctggcctgccatatttttgggggaaatgatcgggcctgcattttttacgtctctgtcactaatcctgtaacttttgcgtcctcgattggtactcgttccatattatattatatggttcagagcccaattattcgtttgctgcctgtagttgaccggggattaaattacatcaactcttaggttattcttcagaccatgttccttgacttgcttccagttcatgggctacatgtacgcatccatcttgcctgaccagctgacctcactctctgtgcagtgtgcactgaacgagagaagaaccagatctgatcagagagtaatcagactgctcattacaccaaaactgctcaatcagtaactgatgaaaaaaagaaaagggagaagctttatcagcagcaccttttgtttatgcgcttgatggtgcttgagaataatttttccttttttcctgtgaggaggttgagggcatagaaggcaatggtttggtaggtggagtgtcatggactcatgtgagagagccttttgattaatgcaagtttggtggcagtggcatgcatgagcagcactcgtcgtctcccagtttctgaccagccttgacgcggttactactttttttttttctacgggacaaggcacggttattttttgaagcggaggggtagatctgattcggtgctttgcggggctgggggtatttaaggactcgtggcgtcgcctcttctctgcacttacaacacaactcgtaggcagcgagcgtctctcctctcccacgcatcgcgccaaggaagagagagatcgccgctcctcttctcttcgtcgctggtgcgggtgcccgaggagatcttgctgcagttcttcgagatctggtgagactcgcaccctgatcccacgcggttactttgattttttttcgtttctcagttccgtgcctgatcatgctagttgaggatcgtgatttcattctgcggctagtctgttcctcggcttcgttcttctgcaagcagttgtctcctcgagttcgttatctgaggaagacgctgtcttcagatctggcagtttcgtggtttggatctgataggagttacggttatgcgttgtagtggctggaggggatttacgcccctaaattctgagtttcctttgctcccctatcggatcagagtttcagatctttctggttgatcgcagttttaaacgccgtgtcggtgctcacatacaagtaattttcattttgtaatttcagtggccttggatctgtatcctgcccttcactctgtttaggtggtgttggtgtcagatataacggtagtgcacgtaatgggaataggatcacaggtgtctggtggtgtaatggtggttacttttgtctggtttgtctaaggaaaggttttagaaaccattaatttcagatgtattcggtggagaagagttatatggaccaacccaatcttgatcagcacaaaacctgagatgtgtcgtgcctgatttaacaaacatgagatctgaatgcgtcctaaaacttccaaacaaaataaaccttttttagatgtggtttgacctggtaggtggatgttgccaattgctatacctagtatatccgaactcaatttattcagttcagtaagtaaccttctcagaacatgtttagctatgctctgttatttcagtcttgcactaagtgtagtgttcaggatctggtgcgtttgcttgtgaatcttgattgcttctgttaacttgggaaacttggttgacatgtctcatctgtcagatactcagggcatgtgctctactttataatccactaatgaagcaccttttacaattacagatcacagatctttctgacaagatggtgaagatctgctgcatcggtgctggctatgtcggtggcccgaccatggccgtcattgccctcaagtgcccagacattgaggttgtcgttgttgacatctccaagccccgcattgaggcctggaacagtgacaccctcccgatctacgagcctggtctcgatgatgttgtgaagcagtgcaggggcaagaacctcttcttcagcactgatgttgagaagcacgtcgctgaggctgacattatctttgtctcggtgaacacccccaccaagacccgtggacttggagctggcaaggctgccgacctcacctactgggagagtgctgctcgtatgatcgctgatgtctctaagtctgacaagattgttgttgagaagtccactgtccctgtcaagactgctgaggctattgagaagatcttgacccacaacagcaagggcatcaactaccagatcctttccaacccagagttccttgctgagggcactgctattgaggacctgttcaagcctgacagagtgctcatcggtggccgggagacccctgagggcaggaaggctgtccaggctctcaaggatgtgtacgctcactgggttcctgaggacaggatcctcaccaccaacctgtggtctgctgagctctccaagcttgctgccaacgcgttcttggcacagaggatctcctctgtgaatgccatctctgcgctctgtgaggccactggtgccaatgtgtctgaggtggcttacgccgtgggcaaggacaccagaattggccctaagttcctgaacgccagtgttgggtttggtggctcttgcttccagaaggacatcctgaacttggtgtacatctgcgagtgcaatggcctgcccgaggtggcccactactggaagcaggtgatcaagatcaacgactaccagaagagccggttcgtcaaccgcgtcgtgtcctccatgttcaacaccgttgccggcaagaagatcgccgtcctcggcttcgccttcaagaaggacaccggtgacaccagggagaccccggccattgacgtctgcaagggcctgttgggtgacaaggctcagatcagcatctacgacccccaggtgacggaggaccagatccagcgggacctggccatgaacaagttcgactgggaccacccgatgcacctgcagccgacgagccccacggccgtgaagcaggtgagctgcgtgtgggacgcgtacgaggccaccaagggtgcccacggtctgtgcatcctgaccgagtgggacgagttcaagaccctggactaccagaagatcttcgacaacatgcagaagcctgccttcgtcttcgacggtcgcaacattgtcgaccccgagaagctgagggagatcggcttcatcgtctactccatcggcaagcccctcgacgcctggcttaaggacatgcccgcggtcgcttaattccccctccctcatccgaggattgaattcggggaaggaagaggaactggttgaccattctttattacagtttgtttttgcaggctcccctacgattttctcttgtgtcaggcataaaagtaagttggtcggcgctgctagtattccgtgtttggttggtgtatttcatgttggaggacgtctgtagatgtaaaattcctcaggcccttgtgctctgcttgaggaaatttccttgtacggttgtaccctggacctgctatagccggttgattcttcaattgtattcctaaaagttaaagttactatacgatcgatatgtttttttttgcagaataacaatacttgtctcacgtttcatcctttatttatttatctttccacagagaatgttagtaccctagcacagtaaaaatgcattgtcaacgaaatgcctgcaggtagattaaggtttgaggtactagtagcgcatagtgcattctcttctttgataaagtttgtaatctctgttttcctttcacatcaacggcgaacgattcacgtgtatttggtttcctaccagcctgagcttggctgcgtaccaaaatttggcttaagttttttttttcactatatattagtctagtcttctggtaaaagttggacatacagatttgatgaccccaattgtaacatgacagtttttacttggctacgacgtggtaaggccttatttagtttacctcaaaatccaaaaaattggcttaaagtaggtgaagatctaacaccaccctatctccaactctgcaaacatcggatttgtgagtaaataatcacaaggtgcagtccagccctgcagcaatgaatttgcaccgatttagcttgtt

SEQ ID NO: 3553 - DNA, 4673 bp, Sorghum bicolor
ggaaaaaaaaaactaatggaaaaatgttcttcaggccttgttcagtgtacagcctagcttaacagttatatggtccctgcagaagaagcagaagtcgatggcaagcaaaacaagcagctatagctctctgaacatcactcgccatcgtctgaccagacggacggcagtggaaaaaaaaagttggcgcgtcgccgtcgcggtcaccccggccctgcggtctcggcaaattggattccatggaaaacaacgaccccccgcgctccatcgatggcgtgaaaggcgacttgtctgaccggtcggggtagcgttcgttcccggatccgtcgcgatgacgtgcccgcccggccgcccgcccgccgggggtcgagaccaatccgcccgcccgccgtgacatcgagacaggacgcccggcgacacgcacgttcgtttctagcgagaagaactccctgcggttccgcggacgattcccgcccgcgcggcgcggggcgatcaccgaacagctagcgagcgccgatggtaccgagagcgagagcgagagagagagacaggggcggcgtcgctttcggcgggcggggctgtgtccccgggctgtcgccctgcgccgcggcagcgctcgcgcgggcgtcaacaccgacccgtgtcgcgcctccggccggtggattaggtccccgtctttatgaccagcgcgcgcgtacgtacgtacccggccgcgcgcgccgcccgtgcgtgcgttgacgatcggcgccgcgcccaccaccgtgccggccgcacgtcgatggcagcagtggcagggagccagcaggctagccagggagcaggggacgacccggtacgatcgagtggtggacactggctgctgctgcctggctgatcgtatctcggctctcgcttggtctccactgcacgccatgccggccctctccgcaataactcatgtgccgggccggccatgcatgcatgcatgcgtgtgtagtacagcaacatgtgtgtgtgtgtgtgtgcccaggacaagccggaactgatcgcatcacgcattgatcatgaccggcgggattattatcccgctggtagtagctcgagcgagcgtgcgcgcatgattgcgcgcgtacgtgtcagtggactgcgagcgagcggcaggtccatccatggcttggcgcgcgggcatgatcggtgccaatgcgttgttggtgtgtgtgtggggatcgatgatgcacggaggggcccgcgcgccgggcgctctctctgtcacacaaggagaggattttgggtggtggtggtggccgcgcatccatcgcatcccggcgcgctcgagtgcaccccgtaccaacccaacacgtccgctgtcatggagagcccggagggtgcatgatatcattgttttttctcgttacaatgttctcttctttgattgttgttttgaacttattattatatataacagattaccagctaatatatatatatatatatatatataattcacaactttgtgtttgtgtcgcatatatatgcgatgagtgagaagcgtaaagagcacacatcgtttatatatcaaaatggaatgggctcgtgtaaaatgagagaaaaaaaagaggaatcctctacatgcatgtgtctcactctcaccttaatctgatcagctaaccagttgtgtcgatccgtccgccaactatcacatacaaaaagaagccttttatatatctttatttatttatactactactacaaagcatatatacaaaaagaagggcaaatattcttcgacacacaactctgatctccactatacgcgcatatacttttagctcaaccctcctttggcttttgtcagccactcagctctcatcgcctgctatatatacacagctctcctgctctccctttccttctcctttcttccgttccgatttcacgagttggtgctagattcactccacgcccccagccttctccatttctaaaaactagctatagctagccagctaccacgcgcaggcagcatggcggagtgcaaggacagcagcggccggtctccgtcgtcgtccatggatagcagcacgcacccggtgctctccaccacgtcgtcgggctgccggccggcggcgaggagggacgacctcagcaccgacctccagctagggctcagcctgtcgccggcgtcctcgtccctcctggtagcggagagcaagaggagcatcccttctacgccaaggtttggattctatatatatatcttcacccacaactatcttttctctccattcttaattaactcgcttcgtacgtgttagatgatatcagcgaattacagaatggaacaaattaactgggaagatgcatggctgattccggccgattatatctcttttcgtcttttttttttaaaaaaattcaattgattactcgccttaattagatgaatctgcaccacaccatttatctgttggagatcaattctgtgcgcatgtgcatggtgaattagagattagtatctggttcttcctgttcatcttttgatctcttcccacccacatggatcatgtacggccttgtttagttccaaaattttttacaaaatcgacactgtagcactttcgtttgtatttaacaaaaattatccaatcatggactaactaggctcaaaagattcgtctcgtcaatttcgaccaaactgtgcaattagtttttattttcatctatatttaatactccgtgcatgcatctaaagattcgatgtgatggagaatctgcaaaattttgtaaaattttttggaaactaaacaaggcctacgtgagccactatgagctcatgccgacatacattttgcatgcatctaaagattcgtttgtatttaatttcttgttatttccacatgcctataacagatctttgattattttcacaattactgtgatctgaattctgacatgtgaaacaaactgtcttgaattgagtattgtggtttatttttttaatcttgcaacatttccccctcatttttctcgagggcatagcttccttcaattttcaatcaaacttgatatattacttggtcgtactacccaaaaaataatacttgatcatactacaacaaattaatgtacaaaggagagccataaaagaatcagatttttcactgagccagaaattttagtatttttaagagtatactcttagccttaattgatcattgatatcttcacaacaactttcatatttgtattgtcgctatcatatctctataatatacagcatccccgattaatatcccaacagtactctccatccaattggttcccttgtgcacgtcatctacatttattaataagactttcaacacgaacggatgatgggcaggaaccaagtactcccggattggcccccgatcaaaccgttccttagaagcgccttgacagcctcggcacgccgacggagcacattgttcgtgaaggtgtacatggaaggcgttccaatcggtcggaagctggacttgctcttgctggatgggtacgacagcctcctagccaaactccgccacatgttcaaggcctctatcacttgtaagtatgcacgtagctaagttcattatcacagagttttaaggataggaaaccaaaaaaacgaaaaaaaggaaaatgccaaaccaactaagccatttgatggatgcaaaaatggatatacccacataattgaactatagaatgaattttaattcaacatcatgtcttgaagttttattgggattctagccactagcactagaccacaaatttgaattatttaatttttggaggaattcctgcctcacactttaaattggatagataaacttcaagacaggatgtcacatcttgttatgtcattatattgtattgcaatgcttgccggtcgctctataatcaatatgtgatatgattagatgctgatgttatggagtaccatcaaagagctcctcacgagaaggctgcacatgttctcacctatgaagaccaggatggagactggatgatggttggggatgtaccgtgggagtatgtttcttctccgcttaaatgattcacttgcatgcatttcatttactgttagctaatcttgtctctgtccattgttccggcaggctcttccttggaagtgtaaggaaactgaggattgcaagaacagataaatgctagttagcaagcttattcatgcggtggactctatatttctttcttctttttatatataggttcattaagaaaggttttgctgaacagagtggacatgtgacgctgaggccatactaaccgtgtacagtacactggacgactgaagaaaagtcaaccttgctatcttcgcaagaaaattaaattttggtattttatgtttccttttctgtttctttcactgccttgtaaataccatggttatttgttaaagaacagacaacttgcatgatgaatattataaatttcaagatatatatcttcgtgcaagtaaggagcatatgcagaccttttcttctttatagtgctacagttaaaataacgataacatggtgttataaggattacagaaaactaatcagtagtaatctcttgctgcagtgcaccaagtgaaagagagatattttcccttttctttttttgaacgttattttcccttttgttaaaccacataattctcattttgt

SEQ ID NO: 3554 - DNA, 6794 bp, Sorghum bicolor
tgggggttcaattcctgtggctgatagcttggctcttatgtaagcaccaagctgggcaaggatgcataggtagtagtgggcccaaatagcaaatgttgtgagaaggaagaggaaagagaatgtgtttgagacaagtatgagacaacttattgtataacttggctctaattacttggctctattattgatcttgctcttagagagtcctcagcagctacgatgacatccattgcgaaattgggtcactagtccaaaacgacatctaatataggtatggagggagtataatatctatttgtataaattaataaagttgtggccatacattcctggaaggagcagccaacggggcacggaaattgcgacctcaccctcatgcttgttcatccctagctaaccactcaactcatactatgtttctatccaatcgcaatattcgtcctatattctatatttatcaagttttgaaatactgagtttgtaaccttaaataaattcaaattaaaaaagttgacaacttaattatatacaactttagttttggtcatttatccatttgaggtcatttgaaaaaaataattttaaatgtgagaaattcaaacaaaaattttcatagatatatagatgatttcaaataaaaaagttgtaactacaaagttacataacttttttagatctacaacttttattttgatagtttctacatatgaggttatttgaaaattttgaatttgaattgtgagaaaattcataacgtaattttccttggatataatatttcaaatatataaaagataactgaaaataactacctaactctgtatacactactactaaagagaactcacatatggtcaagtcagatttttgaaggtaggcacggtgtccgcctctacaacaacaacaacattgtttgatatttttggaggcagttaagtgtctgttcctagaaatctatacctaatattaaacatgcaaattttctctccactcatttttttgtccacgtccatttagctagcatgacagtggagactttcctcccaggactcataacccatactaatacaagttaatacgagttatgacaactcacatctaacaatgatgagtatatcagtatatggaatctaatttaggttgtgctctgtgtatctcgtatgtggtctggactcatgacctgtggttacaaaaactcagcatttaacaatgatatgaagtcatattcctatatgtattggttctgttacaatgcatggacacatttactagtagattaaaaacaaaaagaaagaaaaaacatgtcgccaagcccattgagcccatccacgcattgctgagagagaggattatggtgggctagggttttatttcgaacctctttgtctctctccggcccctctctttcattaccacatcagcaaaaaattctacgtggcactgcgtgagacggagtatgagaccggtgaagtgtaatgatgtactttccctaaaggagttaataaagaatggtgttaccacaaaagtttctacttagcttaaaagataataaatctgagtaactgacaagaccaaaatttgaatatcaaactatcttttatgacaccataagattatcccacctaagaatagcctgtatgggagcccataatggtttttttacatggggtcaatgtttttttacatgggggagcataatggttgatgcaccatttagaatacaaatatcctataattttattctacgctgaaagtattgcaggataaaaatccatgtactacataagcatcaaatgagtcaactaaatatgctcaaagttttctgtagtttcttttagttttactcaaagcttgtccaaatcgtcagttcgttgcaaaccagacggagtatagtagatacgtagcaaagggtccaagcacaaggccactagctagccgcctataaatacatacatatgactcggctgttggagagccaagctaaacagaattacagaagggatcaacagaggcaatatgagtttccgtgtgtcgctactcactttcctcctggtgagttcatgcatctgtcaaagctttacgtacatacatatattgctgatttaatttgctgacagcttgctaccatacatgcatatatatcgctccatatcaaaaaaatgattaaaaacaaaaacaaatgctcttggacaccaatctccatttgaaggtatggactttggttgtagagtttagcatgacgatggagaccagcatatccgtttagcccatcgtggatgcaaccatggatgccatgcgtggaggccaccatgatgccccgcaatggagcacacaccactgtggagcattgttgtgggtgcttgctggcctacgttgtctctaggccttattggtcagttaatcccgtccccatatgtccatgttttttggagaagcttccccacatgtccatgttgattggaggggattgaaacgggatcagccccttcacattatttcagacataaattaaaggatttcaggagagacaccttcatctatttttagagataggtaaaaattatagactgtctaaaaataaacgtacgtctctataaatttactagtagagatgagaaaatccttaataggcttacctcagaaaaaagccaaggccccttaacgtaggatgcgatggtgcttttggaatagccaaaagaagtttattttgactacttataaaatgcatatatgagatctctagattaggtttttttttattcagaagtatcttctgaaacagtaggagttaatgacctataccgatgactttggccttgtttagctggcaatttatttttttttgtttcggctactgtatcactttcgtactttcgtttgtatttgtcaaatattatctaatcatagactaactaggatcaaaagattcatctcgcaaattacaggtaatttatgtaattagtttttttcgtctatatttaatactccatgcatgtgtcgtaagatttcatatgatgagaaattttgaaaaaatttgtagttcgctgtgtttggaggtatgcgcccaaatttggcaacaacggacggccgcagtgctacagtgcccagtgctggttctgctatcattgcatactggcaaaaaatgctacctgactctaccatgccatcagctatacgtgaccttttgacccccaataataatgctggtaagctagcttgtcccactgtactcttcattttattagttataatttgtctattattctaaattataataagttgttctaacttttctagatatataatttttgctcctcacatctctctctctctctctacacacacacacacacacacacacacacacacacatatatatatatatatatatatatatatatatatatatatatatatatagtatactctgtaggtagctacaaaatatgttattctgtagccacctcgatttacgataattttgtatactaatttacgataatatgtatacatatttacgatagttgggttactataacacatggggatatttaccgtaatgttataataaatcacttagtaaggagttactataatcttgtaaattaatatagtaattatcgtaactcaaagtgactacaaaataagttattttgtaggcagctatatatatataaggagagtaaatatgttattctgtagccacctctatgacgataaatttatatactaatttacgataatatgtatacatatttacgatagttgggtgttgggttactataacacatggggatatttaccgtaatgttatagtaaaccacttagtaaggagttacgataatcttgtaaattaatatagtaattatcgtaactcaaagtggctacaaaataagttattttgtagccagctatagagtcataagttattttgtagccactttgagttacgataattactatattaatttacaatattatagtcactccatactaagtggtttactacaatgttatggtaaatatctccatgtgttgtgttatagtaacccaactattgtaaatatgtattgatattatcgtaaattagtgtataaattaacgaaaatggaggtggctacagaataatttattttgtagctagctactgaatatactcaccatactgtataggttcatgatgacatataacacaatatatgaatgctaattatatagcaaatatcttgctagtcgcttggagttttttctgatcgaaacataaactagaatatcatattttggttgcaatatacaataatagtgatttattatgtccaatgaaatagtttagaattaactctacataagcttccttttaatccataagccatttagaaattagaaaatcaacagtcgtctgtaatgtgtggaactttgactatgctgtttttttatatgaaaagatgtgtctacattgatataattatgatacatcaaagtttctcatgttttatctagtatagaattataacactccctctattaatgtggaactttgactacacttttcttaaaactctgattatttcattgatatacttaagttctaatcgatgatatttctttatccaaaagatgcaaacaaagacaacccttacccgataccggcgtcagccttttatgggaaagaagcaaacagcctaaacccaacaatcttctatgggaaagcaacaaatggggacgacaacccttacccgataccggccacagccttttatgagaaagaagcgaacaaccgaaacccaacaatctttgggaaaggaacaaatggggacgacaacccttacccgataccagccacagccttttatgggaaagaagcgaataacctaaacccaacaatcttctacaggaaagaaataaatcgggacgacaacccttacgtgccggtcttggcttttcatggaaaagaagtgaataacctgaacccagtgaacaacctgccgctctcggccttttgtgggaaagaagtgaacaatcttccggtctcagccttttccggaaaagcaacaattgggcccgtccatgtgtccaaaatgaacattgcaggttagtacattggttcacgttatgtttatagaggccagaattatataatacgacactacagtcgagtacattactacccgatttgcaatattttgaaagctaccaggaatggttgatgttaacgtgttttttttttttttttgacaagatgatgctgaccatcatgttcacgaacatcgccatatcgatggtggccatgaccatttcgattcgaggaacatcggcttcctcttcctagaggacgccttgacacctggatccaaggttgccccttatatcgacccggctagcagccgaggtgctcctttgctgcctcgtgatgtggccgattccatcccgatgtccacaaagagcttcacggacatcctcagaatgttttcaccggtatcacgcgccatggcggagagcatatggtactcgctagagctgtgtgagcaccctcgccctatcaagggcgagaagagggggtgtgtgacatccatcgagtccatggtcgatttcgcagcgtccatgctcgggacaagcgacctccgggccttttcatccccaagcgtccccgtcgaaggccgtaatgcttccaaggtttacaccgtgctggcggtgagggcgatcaccagcccgggagacaccatgacatgccatggcatcccgttcccatacaaggttttcctgtgccatgccctggtgccaaccaaggtgtactctgtgacggtagagagcgacgacgacgacggcgtggaggagaaagagaggatggaagaagcgctggtcgtgtgccacctcaatacggcggagttcgaccccatgaagatgccgccgcgtgtgaaacctggagacgccccagtctgccacttcctcaacaacgacgacgtcctctgggcgcccgctgcaactacacttgggacacagcaaggagcagccgaggacgtcgtcgtagctgcccagtagaggcagcagctaattaaaggatggtgcttgcatatatgcatgcacaccgtaccgcctacgcaagtattgttgttacatatgtgtgaaaataatacggctagctatcgatgcatgcacgcactcgcagtgtgattgagcttgctagctagctaatgtgattgtgcgggtgaaatttatgtatcgtatatgtaaagagcagcttgttgcatattactaataaatctgttttaaattataagacgttatgattttcctagatacattgtttttactatatatatctatagacatagtgtatatctatatacatagcaaattcaacgtatttagaaaaaacaaaacttcttataatttgaaataaaaagaatattcgttttctatctactagactactgcagtactgctccagtactatatatacatgcatgtttgcactgtgcgtgttgatgatctatcggtttccagctactggtctggactgaatgacgcacgtcgatgacaagagcacaaaggcaaaaataattttgattacacctaaagtacttgagagcttgcctacttctgtgttggtcttgttggtcatgtgatggttatgttgaactggtaacccggtcttgtatcggatatttgcccctagtttctcaagcgaataatgtctctggcctctggtcagcgtcgtcggcaattttttgtccatcactaacagctggcaaatctattcataacaatttttcaacataactttagcataactt

SEQ ID NO: 3555 - DNA, 4187 bp, Sorghum bicolor
  misc_feature (1876)..(1975): n is a, c, g, or t
ctatggcctaggaaaatattgttatcatccaccacttttcgaaaagcaaacttctgtttactgctttacttttcagcacagaaacacacatcactacctgggatggcaacagtgcacaggctctgagagtaacaatttaacagatgcaatttttatggtgtggccattttgttctcttatatatatatacacacacacacacacacacacacacacacacacacatacacacacaagatgcctatattctagatgaaatgagataatcattttttcaaccgaaagtctgtctgttttgtggcagtatacctgagatacacattagcttccatggattggattgtttatctagaaataataatctgctaaggtttctgtgttgtattatacttgcctatataaataataagatgctctagttttagcgcacagcctttcacagattgaattttcttgcatatgcagattcagcagaagaatgagttagcattgtgtatcagaagattgctgctatctatcagcattcagcagttgcacatttttttcttgcacacagcataaattggcccatgtaggctttagttgttcaatatatgtccattgttgcccagcacagtatctgaatagcaaaaagtttggctgttggttgattgatgatgctccttcttatatcaacactccaaatatgtatcactgagttgacattatttttatggttacagagcatcagaccgcagtcatttcttcctcatgtcggcagatgtcttgaatacccacagattcttaagctgtcccttgctgtcatttctaagcaaaagtaagttgtaagatgggtccttgttttcccatattcactttcttgagagttcggtggattaagaaactctaattcttatcctttctttgcatctagttgcagaataaccattttgccacagaattaaagtttcatctttacaactgagcttttttattagcaaaagtaagctgtgtgctttttttagcaaacgtgaaactgagctgcacatctttgcattaaagaaaagaaccaaggcgatgcaccgctttctatgtctaattaattagttgttgtcttttctcggctgtttgtactaactcgatatgtaaatcaaactctgcagaggctaaactcaccggttgatcgtcatgttgacatcaccagtctcagtgaactaggatgctgactgcctgaatgtttcagctttctcactatttaaaatgcaacatttacatcatggtgcacaatatcatcaaaggcccatatacatatgttatgcagcttgcagagcatatgctggttgtttctcatggttttatctgttatagtgcaccactaatgatactggttggtgacatatagttgcttaagatggcaacacgggcggcacacatatatacccctgtgaggaatggaaggttcaatacttataaattataatcatactttagttcatgttgcatcatttgcaaacaaattgccgtgtttagaaatggataggtaactagaaatttgagctaatctattagcaaatagggtgttgttcatttaagatcaaaccatccctttgtaccatattggaatattgaggtacaataatcagcttggtcaaggatgttaacacatcacattttgatggacatgattatcaactctagtagaagtaccccatgatgctgtagtgcgattggtaactgtttttttaacaagggcttaacatggtacagtctactattgtcaaaaaaaaaaaacatggtacagtctattataggtcagacttaaactcttacttccagattactctatagtaaccaaatcaccatcgctttcttcagtgccgggatgtatgcaccgaannnnnnnnnnnnnnnnnnnnnnnnnnnnnnnnnnnnnnnnnnnnnnnnnnnnnnnnnnnnnnnnnnnnnnnnnnnnnnnnnnnnnnnnnnnnnnnnnnnnaccatgctgtgacaagcagggggtgatgcgagggccatggacagcggaggaggacaagaagctcattagcttcatcctgacacatggccggtgctgctggcgggcagtgcctaaactggcagggctgcttcgttgcggcaagagctgccgtctgcggtggactaactaccttcgccctgacctcaagcgtggcctcctcagcactgccgaggagcagctcgtcattgacctccatgccaagctcggcaataggtatactaagttgcatggtatagataacacgtgtgcatgcatgcatatactccattttgtatgttaatccatgctctttgttgtgctgtggtagaataagctatttgcatcagttccttggcatgggtgaattcccctggttgagttttgaagtgccgagcaaaccacataacatgttgatggaatacttggctaagagtagctagctttatgtgttgtaagtctacatgaagtgtagcagcagtacttactgtaacatgatgccacaaagtttagaaccaactgaattcatgcagttaagagtaacagagtcacatgcatgtggtattgttgtgaatcccccctggtgctccacgtttatcgagaaagaaatcctgcaataccataccaggagcagttaatcaagattacatagagtttgaaaagcgtttatcatgttattgagctttgcatcttacatactataaccctatcgttggtaccattttttacctttgtttttgtgtttgtccttagtttacccttagcagtaacctcttggtcgttccatgctttcagtgctcttgcaaatgccaagttatctcaaaaacaacaaaaataatggctctcttttcttagttgttgcactttgaattgatagttagtgatacgccgatgtggacttcacacctgtatgtgagtcaaagagcacactagaattgaagggcagtaatagcactgctcaggtcattctcaacctctttacttgtagcataaactccagttctaaaacatgaagcacacgattgtgaaaataatggaaatttgtatttacgcatttgcttcaaattcagctggctgaaacatgagtgaaaagggttagctgctcctttccgttcatgtgcttcgttctccagaaacaaaatactacaaccgctttgtgcgctcctaatgacttaaacttatgcagatggtccaagattgctgccaagttacctgggagaacagacaatgagatcaagaaccactggaacacgcacatcaagaagaagctcatcaagatgggcctcgacccggccacgcaccagcctctatccaattccaatgcaacttcctcacagtccacggttacagatgaatctgctaaatccagcgacttcagagaggagctgagcttgaaggatgacagccatagggaggttccactgtccactgattcatcagagcagtccagctggccagagtcaagcaccaacggctgtgatcaagaccctgaactgctggtgaattggccagacctgttgatggatgagccatggttgaattttatgagcagcaacgatgaacttgggaatgtcgagggggcgttgccatgggatggaacaacagactggctgctggactaccaagacttcggcatgtgcagctcgaactcagtcgacaattcaacgttccacgcctcaaatggatcgaacttctaaagaccggagaaagactgcccatcaaaataaggagaaagacagactgcaagtttgagcgcactgcacactgcacagctcccagtatagaaaatagatacagtacttacacgaataagattgtgaaaaaaagagataggcacggggcatatctagaccctagagtagtgataccttgcccttaaaagtaaggggtttgtattggtagaaacctaatgtttctcggtatgagaggctgaagaactagattcaaatgtatgaatcatgcaaggcaggctatatgtgacacgcagggtcatgctcagcaggttgcagtgaataagattgccgattttctgtgcaagttaaggctgtgctctgagcagtgcagcagcgaggtatatctgatatctccctgtcgctctcccgggcaactgttgagcaattacagagttcagaacatgttatgttagtgactcgccatccttccaacagtcaactcaccttccttccaacatcacact

SEQ ID NO: 3556 - DNA, 5009 bp, Sorghum bicolor; identical to SEQ ID NO: 3539

SEQ ID NO: 3557 - DNA, 4043 bp, Sorghum bicolor
ctcaccaaaaaccaaaaacttaaaactttttaagattctccgtcacatcaaattatatggtatatgcatggtgaattaaatacggatgaaaacaaaaactaattgcacagtttgtctgtaaatcacgagacaaatcttttaagcctagttaattcatagttggacaatgtttgtcaaataaaaacgaaaatgctacagtagcaaaatccaaaaaaatttcacaactaaataaggtctatatattggaatgaaactctataacatcgttcgacgcataaatacttgtggttctaactcgtagtgggcacgtgtcgtgagtttagagttcagatcacatatataagacaaaaagagttccattcatgtagccgatgctagctattttgcactctctcttctgctttgtttcgagtttcttgctcagtttcttctgagctgttgtgtgtttttctggtaaccctgtagttacctagcatttgtactgtcaagacctttccacttaatgaaaaacacgcttctgcgtggtctaaaaaaaaagagttccatgcttctaatttgtatgggacttgagtctgtcccagatgagaaaatgagacataagagcattataagaagtaaaaaagatgcgtgaattttctttattctttaatacgaggtatatatatgaagagatatatagatacagagatataaacatagatatatattatatatcgatatagatatagataattatatatatgaatgtggatgcagatgtagatttaggtgttttcaaaaaaagaaaaaaagatgtagatgttgatacaaatataaactaaattataatattctttagtttcatttcatctccagatatatacattaaattatatacaatcctcttttttgatgtgtttatataatcttcattgttccatttcatctactaactaacatagtgtgtgtacagtcccgcccgtaagtactcgtttgcaacgcacaacacaacacaacacacggcaggtccacaaaacaaggtgctgctgcgtgttccgttgctagatactactactctatacatcatacacgttcaggattgaacaggtcacggcaggagatttccatgagctcctgcaacaagaattccagttccagttctactgacgacgacaatcagcgctgccgctggcctacccagcatttgcatgcatgcagattaaggagtcataataactttatctgtaccagcacgttgttgctcagagaagacctaactaagagactagaattagcgcgtggaattaaggagagagggccagggtttggtgaaatccccgtaacgaacgaaaagagaaaaaaggactgacttcgccgaatcggatcggggagtgccctttttaaattgggtgctgaccacaaaattaacagatgatgaatctagtcacctaggagtactgagtgtacataacatacggtcgtctatatatacaacatgtgccatagtattgccaggttagaaactctaattcaaaagtctgattttgcttatatgaaacatatatccattacagccactgcactgcacatatagcaacgtttataacgcctgcaacagcactatatatatatcatccgtgacacagcttgacagggcaaatccaaagctatttactagtcgctggtgagatcaggtgtatatatatcaatcaactcacgtgtttgtagcccgtgctaaacgctgccgatatctgtcacttttattatctatataaaataacaatataatcaggtcttcgcaaaaaaaaaaaattcgtgtgatcgtcgttagcattagcaataagtgaagtcgggccgggccgggccgggccgttcccatcccgtcaactcacacccacacaacccaacccaacgctgcccacccaccaacttcctttccttccccatcctctccttctcatctctcgccgcttgccaaccacccgcctataaaaaccccgcgcccccgcccacccgctgccattctccaatccaatcgccgagctcgctcccctgcccgccctgcgcagccgccgcccgccgctccacacagcaaagcgatagccaaagcgaaagcgaaaagcgaggcaagaagcaggccgatggggcggtcgccgtgctgcgagaaggcgcacacgaacaagggcgcgtggaccaaggaggaggacgaccgcctggtggcgtacatccgcgcgcacggcgaagggtgctggcggtcgctgcccaaggcggccggactgatgcgctgcggcaagagctgccgcctccgctggatcaactacctccgccccgacctcaagcgcggcaacttcaccgccgacgaggacgacctcatcatcaagctgcacagcctcctcggcaacaagtacgtgtctgcccgtctctgctgctctgctccttcgcagtacctgcctggccggcctctcgccggtttccttcatcggcggcgccacccagccaaaccaacctgagcatccgattgatcgattgccttcatcttcctgcaggtggtcgctcatcgccgcgcggctcccggggcggacggacaacgagatcaagaactactggaacacgcacatccggcggaagctgcttggcaggggcatcgaccccgtcacgcaccgccccatcgccgacgccggcgccggcaccgtcaccaccatctcgttccagcccaacaaacccaacgccgccgtcgcagcgcaggcgccacaacatcagccgatcaaggcggtggcgacggccgtcgttaaggtgcccaggtgccccgacctcaacctcgatctctgcatcagcccgccgtgccaacagaaggaagacgaggagctggacctcaagcccgccgtcgtcgtcaagcgggaggtgctgcaggccggccatggcggcagcctctgcttcggctgcagcctgggcatccaaaaaggagcccccgggtgcagctgcagcagcagcaacagccaccaccgcttcttggggctccggtccggcatgctcgacttcagaggcctcgagatgaagtgaatgaataagccgcccatggccatacgatcgatcgaaatggccagcagccgaattcttctccttcgtttggtttggttcttggcttgttggatttgggtagggtagctagtagttggctagctgttggttttttagtaggaggatacaggatgagaaggagaggcaagaacggcgaggaggattcgtagctcgtgtcactactcactacctcatcagagagcatagtggtagtagagaataaatcctccctgctctcttctcttccattttgtgttttttttttaaaaaaaaagtcccctggctgcctgaatgaatgtcaggaataatcacatatagtataatctgatgctagctagcaggtaattagtacatgtgtaaattttcagcctcaacgtcttgttttgtggagaacatatgaagtattcagagtcgatagagtgcatatgctctgttctctgaatacctgatcctctgttttgtggagaagataaagagtattacagtcttacagacatgtgcttacctgcttaccaaattggttttccagatttagccgtccaatcatggcgcgcttagcttagctgacctgaccacacagacacagcctgcatgatctctgaagcctgaagacacttgtgtttatttattggccatgcataaagatcttggactcaaagaacactttcttcccggatacttttcactcgtcttgtgctgctactagtagtagtagtagtagtaactaaaaggaaaaagtgtccctgagccgttgctattgggcacgagagaaaaagagggatgaagctccagcagcagcaggtctcctctttctgaggtcgccatcgttttcagcggcagctgatgccgcggccggtcggcggtggcaagttgccggcgagagtagattgcggcggcggcgacaaggaaaagcagcggcttcgcttcgggcggcacaaccaaccaaacggatgggcacaggtcgctgctgctcgaggcggacggac

SEQ ID NO: 3558 - DNA, 7417 bp, Sorghum bicolor
tattttctcatgtaggtatgcaaccagcaactgtacgacttgggccaaaagatagtgtggtgggagggcttgacataggagttagtaatgcacctatcactttggaaactattagtgaattgtgtattatgatgtattgacttcaaggataaatgataatttcacttgtaatattcttatggatatgttgatatcaatataatggttgggcaccataacaaaatgtctatatgcaaataatgtttcaattgaatatagtaactagaatagtaaaatttactgattactgcaattagtttttttattgttagtatagacttccttggggggctcttcagaaaatcagaattaacttggcagtcgatgacagtcaaggaaaaccgtaatttccttagaggtgaagggcagtcaagaaaacaaaatttaccttggcggtctagagtggttccttggaggttatctaccctcaagaaaactactttccttggaagttgttggccctcaagcaaactactttctttgatggtttcaacatttcctcagcgctttagtaaattaagtctagccatagtttccttagcagccaacattcaaggaaatcatccttgagtgtcagaaccatcaaggaaactaatttcccttagcttctatctttgagtgtgtttgcttgacggtttgtggtggcgatttaacctctattcttggcagtttttggcactcaagccaattcggggttgtggtagtgtcaatggacaacactgacgggaactaagatcgtcaatgtccccttccatgtccacctcgtgggcagcagcatccctcgacagacacctcgtggtgcggtggggcggccacacgcatgccacagggtcaggaggaggaagagaagaggacgtggcggcggcgacttcaggttggggaggaggaaggtcgggaggaggtggcggcggcgactgcgagaatggaccaggcaggctccggtttgagatggatgtagacgtttctttggattagcgggtctgtttttttaacccgctaaccaatctaggaggctccgcgggtagattcgtgtgtgatcaaacacattttacgtgtgcatccagatggcagatggcagagtatgtactcgcgggagtaaaaaggaatatatatatatatatatatatatatatatatatagagagagagagagagagcgcgcgcgcgcaaatgaaactggtggaggagacgttcttgactttgatgtggactaattaagttggcgccaaaaaaggatgactggacatgttgccgacagtgttagcgccatttctcatggttcctttgtccgctggctcacttgatgtcggccctacgccacttgggctggaaaacgccgtagcgggtgcagaaagaggcccacttggtactagactggcagcatagtggatagcacatggaaattgcactgctgctgataccaaaagataatggtggcacatcatcattaatcataatgtaactagagaaaacaacaaataaataaaaactacaaagtataaagatcaaataaagaaagtttaatttgataaaaaaattatctgctagttattcagcaatattttctctcacaataaatcagtgaacaatactgttaactatggcttttcaacaacatttttctctcacaacaattaccctccctaagatgcgattttatctttccgtccggtctctagctgaaaaggctcagagttataataacaaattcaaaacgtgcaaagtagtagtagaaattttgccgacatgcatgaagtcattgcgtttttcagtccggtccaacgtatgataggagtctacgctagtcaactgtggggtcagcaagaaaagcaagttgcgcaaagaacaaatgcaagtagccatgcaactagctagggagtatagcacgtactagccagtatttaacactggagcaacaggcaggacgggggcttggacatctatcccttccctatccaatccaaccattttcacgccgttcatcagctagctagccttgagagatgggtgagaagaagaatacggcgggtttcgcggacgccctggatttctggcaagaaaaccagctgcggatcctcgtcgtggcgagcctggtgatccagtggttcctcttcgtcttggcgccctttcgtcagcgacggatcccaggtttgctgaggctctccatctggctggcgtacctgggcagcgacgccgtggccatctacgccctcgccaccctcttcaactcccacaggtgcgacgacaccggcaccggcaccggcggcgtggagctgctgtgggcgccaatcctgctggtgcacctgggcggccaggacagcataacggcctataacatcgaagacaacgagctgtggagacgccatgtccttacagcggtgtctcaggtcagtgcatgatgcatgcccggatcaaataaaggtcctaattataaacttctgcatagaaaataaagactgcggcattcttaggattaaggccttgtttagatacaccaaaaaactcaaaactttacaagattccacatcacatcgaatcttgcggcacatgcatggaatattaaatatagatgaaaaagataactaattgcacagtttatctgtaaatcacgagacgaatcttttaagcctaattgctctataattgaataatgtttgtcaaataaaaacgaaagtgctacagtgtcaaaatccaaaaagtttttggatctaaacaaggcctaagacgcttgcttatgtttgcttaagctttgggatatttgtttcggtatagataggctataaccagctactgtataactggtagggtgggtggttcacaaaatggatacctcaaaaacaaatgcatgcatagcacctagaaggcccaaaaagttgtactgctagctttgcattactagctctcctcagctctttacagtagaatgtagtactagtagtcatcttttttgtagcatgaaaaacatgagcagattcagtttgggcaagtaggcagaaatgccggctgcttttcttgagtttgctccactgatgacaagcactgccttaagccagtttttgcataccataccagcaagccgtcccatcccatgcttacctgggctgaccccagcccctactcactactaggccaagcccatatctctccaactcatccaggtgcactcgttcacgcctacctctctcagtagttttgctttgtgcgtctctttttttttttttgagcaagtgctttgtgcgtctcctgtcaggggcacacagatcatgacaagtatatatgtccaacggcctggtgctgggccggcatggcccgatgccgtgccatgtcatgctgtaggttgtcgggccattacgagccatcgtggaaaaaaatgttatgcctctacgggctttgtgtcttgccttcagcccaaggcatggcctatgggtttgttttcgtgacgtgctgacccatcaagcacgtgttttttccatgtcgtgccggcccatggtctatcaaatcaacaacagcttattttcatcaatatatttatatgtatatctactactaaagaggtaaatttcaacctctttttggtctggatttttttagtctggtctatttattaacctaattattacagtgttcctgtagaaatccgtatatacacgggtggagctacaacatagtcgttgtgggccgcggaccaccttgcgctcggctccacgaaagccgaggattcacgttgcttgggcttctcgattggcaagagactcgtgtcgcgtatttgtgtcagacttccacccattagagtaagtattaaaagtggcgaagagctggcgaaatctgacgtgggagagagagaaagtaggagagagaagaaagtgggcgacgcgctagacgcggcaaaaagcgggcgaaatgcactgtggctgttgctcttccactccggttcttccacgtcgcagttaagcattaaaaattgtcagggtccgtcattattactcggcagctcgggtgacctagagcttcctgcagccggcgagcgggcgtatccactagccttgctcttagtattctcctccgtgcagttgtgcagtgcgcactccgtgaaaggcaggtgacgtcgcggcactactacagcctgtgcggtatgggagcaacatacgatttatctagataaagcaaaagcaatctcctatgtttgcattcaacctacgttgtctaatccagtctaaataaatatattttctagaatcatagatgatgactgccatgtaaaaaatctagataaagcaaaagcaatctcctatgtttgcattcaacctacgttgtctaatccaatctaaataaatgtattttccggaatcatagatgataactgccatgtaaaaaatcaagagaggtctctctcatagcacaaactaattcttgacacgtcaacaaataacttgcagactatcattaaacattttatgggtcctaaaaagtcacaaaatattatggatatcatagttatggtaaaataaattatatatttcaagttttatacaaaggataaactataaatagaaatatatcattaccatggtaccttcccattaaggtttgaaagttttatttttctcctgttgcaacgcacgggcatattttgctagtttttactaaatgttgaaatatttcatcaattaatggactacacaagctctttacccactataactaagaagagttcatccacatatatgctcactcttgtgtggcgtgttatatatgacaggtggcggccgctatttatgtgttcgtcaagtcgtggccaaattccaacgtgactaccagtcatgtaggagtacccaatattgaccagataaaggccatcaaggctcacaacgaagagatggaggcttacaagagaatcttcacgccagcactcctgctgttcttctgtgggatcaccaaatgcgtatgcaagccctgggacctcaagagagtcagcgtcaacagccttgtggactcttcaccagcaggcagctcagaagcagaagcaggcaagggcgagaccgagaccgagaccgagatcaattcgcttcacgagtacgttgcagctgcaacgcagcatttcgaggcccggggtggcagcggcgacggcggcggcgacggcgacgacaacacttgtaaagtagaggaaatctggaagccctacaacctatgcgtagacctcgcgccaccctactccggccggctgagctgcctgaaacacctggtggtgcgcctcccggcagacggagctcatcggctggtgaaatccagcctctccgcgacgttccaccagctctacaccaaggaatcgctcaagctgcacgacgtctcgcacctggtgttcaccagcaacgccgccgagaaccgcttgacgatgctcacctcggctcgcggcgtacggacggtggccgcggccgtcctgctgggggcgatcgccgtgttccactacggcggcggcgacgacactgaaaagtccaaaccgattgacgtcaccatcacgtatgccctgctatggtctgctgtcgtgatggagtacgtcttgcccaccgtgatccaccacacgtctggcaggatacagcgactgtgcaccgggcaccggacatggccggagcaggtggcgcagtacaacctcatggggtacgtcgcccgctgcagcaggaagcacccctggctcatgaaggtggcggcgttcctgggctgcagggacctggtcgaccagctctggaccatgaagccatgcaagggcggcgcggcgatcatcaccggcctcgtccacggccatgtcgccggagcttggacggagggtcacatagccggcgccgactcgttccgggcgttcaacgactacaggggccagtggacgctcagcagggaggtcgccggcgtcggcgtcgggcgcagcgtaccatccatggtattgatcatgagcgtgtcgaggccgccgttcgacgagagcgtcctggtgtggcacctcgccaccgacttctgcttccacatactccgggaggacccgtcaccttccagcgccgccgctcgccgctgcagggagatgtccaactacatggcgtacctcctcttcgtgaagccggagatgctgatgcccggtgcccggcgaaacctgttccgagacgcgtgcggcgagatcgcggacatgctcgagaaggatcctcctccgagaacgccgaggggccgggggaagaggggcctcgcgcacaaggtcatccagctgctcaagagggacggcgacggcggcggcggcggcggcggcggtagtgtcgttcgacaggcttggagtgtcgccgaggagctcatggattcgcacaagggcaacgaggagaagatgtggacggtgatgcagggcgtgtgggtggagatgctctgcttctcggccagccggtgcaagggctacctgcacgcgaagagcttgggaaccggcggggagtacctgtcctacgtctggctcctgctcttgtacatggggatggagaccttggcggagaagatgcagaggacggagctgtacgacggccccacgccagcacggtcgtccatcagtggccacaatgtttgatacactaccatttcttacaacaatataatttcaaaccaatttcaaggacgtacacatatatcaatataagcacatgcaaattaataatgttcacatcaatcaaggttgttagcacagaatattaatagtactgctcgaaggagcccttttttttccttgccaaaatgaatgtggagacagtggaaggctcgattttactagtacaaaaaagctcaacggcagcagttgtatctaatttgtatagacgtttctgttatcacgcgtcagtgtaaagaaaatgaccgacccgaccaataaaccgtctgtgtaaaccactttctacataaggttcacttaacgaaaccgctagtggaagcggttcaattaagtaaaccgcctgtagaaattgatctacactggcgtgtcgacttaactaaatcgcaagtggaaatcaggcatttacactagcagttcagttaagtcaaccgccagtgaaatctctgttataaatactcctttctcctcgagcaaaggtgtttctcgcagccatcttccatagaaggctatttggaggctatttgaaggtctagttttcactaaatacaagggaagaggttttgatctttatttcgcggccagcagcccagcactggcactggcactcaataggccttgcacgggtgccctcgaccaggcctcgaggcaccaagtatccccactcagcccgtgaaccatgtacgaaaatattttctttaacgaattttgtagtgtcgttctactatatatgttacaattcagagtagagactct

SEQ ID NO: 3559 - DNA, 3501 bp, Sorghum bicolor; identical to SEQ ID NO: 3549

SEQ ID NO: 3560 - DNA, 9051 bp, Sorghum bicolor
tccagtaatactagggcctcgttgttctgaaaagatttcagatttcgtacgtatttttgtttttatttgacaaatactgtattatctaattatggactaattagactcaaaagattcatctcgtgatttacaaccaaactgtgcaattagtttttgttttcgtctatatctaatgctttatgcatatgcctcaagatttgatgtgacggagaatcttgaaaagttttttattttttgggtgaactaaacaaggcctagataactctgtgcttgagtttatttgtcaaatctaccaactattttagaagtgtttttctttcataacaaatcagcgaaaagtactttcagccggcaaattattggtgaaataaatgataaccttgtgcttatcatattttgcacatgttaatagatacaatggcagttatgtatgtagttggtgttttgaaggagttaattcatttagaatttagaataccttataatttaagataaaatttggatgttttgatacgttatattttaggacagatagagtataattctacctttatgttaagtccagttttctaaggttataagtatcagtattgatagcaaactaatattcatgatgaattgaataacacttaaatattgatctttttataaatgaattaaatgtaaaatatttgactagatgctatgctagactgcattctttttaggaggggggaatacaaaatgaatgtttcactgaattctcgtctataaagtctggaattctagcacaatattaagtataaagatatcaatatttatagtaccaactaaatatcacaagatttgtcatgaatatattttatagtatatttatatttagcatcataactgttaatatttttacctaaatatatttgttaaatgttagatattcttgacatatgtagtagattatagataggttcacatcctgcctctgggtctgccttcataactcagttaattctgtactttttcgctaattctacaagtaattggaaagttgaagtttgtaggttggacgaccgtacaactgcaccaatcggctactgtgggatacgagcacttatataactacagtagtgtgcagtgcatactttattgcatgactgtacgtggatgtgcttcaagcctcatcaaggagacacaaaaaaatggcaaaatggtagaacgttcaagcgtctaccattcttgaccaaaattgaggccttgttagtttaaaaaaaattcagaccgtcacaacaaatcttactgtacatatatggaacactaaatataaattaaaaaaataactaattatatagtttatctataatttactagacaaatcttttgaccctagttagttcataattggacaatagtaacaaataccggatcacgtattatcaaccaattttccggtgtgtttataagctcacaacaaatcattaatttgacatcgtgcagcctttttatttatttaagaaaagaaaagaaaaactaaagggttaagttgtcaatgaacagtagagtaggcaaacatttatctgtccgttccagcagcattaatcaaaattcagacaaatccatgtcattcttgcattgttgccctggcccccagtcactacgcttcaaagcagcagcagcaggccagcagctgacgccctgaccctacacccagtcaaaccgatcgcctcctccgatcgccattaacgagtcagttgctctgcgctaccacgcggccgagatgctgctggcgcagcaagctcaccgcccctagagcctacagcgagcgagcacgcacggcagctactagaaggctagctagcgcataccaaaccaaacaaactcctttaaagccccaccagcgggggcagcgcaggcaccgtcgtcactgccaggctcgagggcagagctaggggacctcaccgccgcgatctccggcgtgtcgagcaggggcgtggcgcggcggccagggacgagcgagctagggcgccatgagctcgtcgtcggacaatggcgccggcccggaggccggcgggaagaagaagaagaagaaggcggcggaggaggaggcggcggcggccaaggtgccgttcctgaagctgttctcgttcgcggaccggtgggactgcgtgctgatggctgtgggctcgctgggcgcgtgcgcgcacggcgcctccgtcccggtcttcttcatcttcttcggcaagctcatcaacatcatcggcctcgcctacctcttccccaccaccgtctccggccgcgtcgccaaggtaacggcgccggcgcgcgcatggcgcatctagctcgccggccgttttgtagagatctcggcgcgctcgctcacctaattgcttggtgcaacgacgacatgggctgattttttttttttcgcttggcgtgcacacagtactcgctggacttcgtgtacctcggcgtcgtcatactcttctcgtcctggaccggtgcgtgcgtgcgtgcgtgcaacaagacactgctgcttctagtatgcaatgcgggccgcgcgagcagcgtgcgtgcagataaaaaaagatgacttgcgcgtcgtcgtgtgtgtggtgcagaggtggcgtgctggatgcacacgggggagcggcaggcggcgaagatgcggcaggcgtacctgcgcgcgatgctggaccaggacatcgccgtcttcgacacggaggcgtccaccggcgaggtcatcaacgccatcaccagcgacatcctcgtcgtccaggacgccatctccgagaaggtacgtacgagtgtacgaccacgtgacccggtgaccgtgccttgccttgccttgcctacctgctgcgcgttgccattctcgctgtggcgcgccgcgctgccgaccgccgggggcagcagctcaggcgaggcggaagggggaaaggacgagaggaattaacgccggggcggctagctggtgcgctgatctgatcggggccggcgcgcagttactaggggccggggttggtgaggggcattgaaggcgtgcgcgggcgcgggcgcgggcgcggcatataggagttgtacgcaaagtacctcgccgatttattgggaagtagaatagctacatgccgcttctctgtatgggatttgaatcaaccagtggcgttcatgttcacccccaagaattgtagccgtggtacctcagcgtatgtttatcggttcgtacgagttcacaagctaagacgtggcaatcggggataggtggatcctgtaaagtcgccagcataaaacctgttcactagtctgaaaaactataaaaactataattaaaaatactattcgctgatttattatgagagaaaaacactgttactggcaaaaaaaaaaaagacttataatgtttttacaagtactattacactactacttttttttcacgactgtacctaagcatatgtttttggtaagaggaaacaacgttacaatgtgaaaagattgaaagagagagttttaaagacatcatcatctaaaaacgtacaaaaagttaattacttccttcattccaaattagaagtcttttttatttttttacatctattttgttatgtatctagataaataatatttagatacatagcaaaatggctaaactaaaaaaaatcaaaacgactttagtttgcaagggagtgagtacatgactagtggaagtgtttgttttttcccaatagttcatttgcgttaaaaaaacagcatacgcttccatgactcgtggaaaatgtttcaatagcaaatgagcattaatggcctcatctcaagattgacatgaagcacaatcaatggcttagcatgatgcaccgtctgtctagatggatcgtacgtaccttgccatatgttccaactgtcctccacaatattcttggtccaccgaattgagtatctcgctgagtgcttttctatttcacatggaagtcacctatggtcgtttagataaaattattcgtacccaacgtgtatagattggagtcgaaagtcaattgaattactcctctgtcttaaattcaactcctaaagttattttaggtcaaatcaaactattctacgtttgaataaatttatagaaaaaacttcagtatttatggcatgaaattagtatcactggtttcactatgaaatatattttcacaatctatttatttggtacgtaaatattgttgtttttcactatgaagttggtcaaactcaacacaatttgacttagagtgattctagaagttttgttttcggagagaggatattaaatgaacacattgaagaagttaaagaagcatcgtcgagtcacgagtgcggaaaattatcatagctagttgggccgcagagattggatagttggactctatcgccgcatcattttgcgcctcggccctcaaatcaggcccacataacttcctccgtcccactcccactaggcccttgctggtcaaacagtcaaagaaaaatcgagcgacgagctcatcgcagatagcgtgactgtgcctgttactgttatgtgcatgttctgacaagtgacaacctgatggatggtgtttccgtggctctctgcaggtgggcaacttcatgcactacatcagccggttcctggccggcttcgccatcggcttctcgcaggtgtggcagatcagcctcgtcaccctcgccatcgtccccctcatcgccattgccggcggcacctacgcctacgtcaccatcggcctcatggcccgcgtccgcaagtcctacgtcaaggccggcgagatcgccgaggaggtcgaccgctgctgcctcaaattctctccttgtgtgcttgtatataatcggtcacggacgcgcgtacgtgtactgacgctgctgtaggttcgtgcccccgcacgcaggtgatcggcaacgtgcggacggtgcaggcgttcgtcggcgaggagaaggccgtgaggtcgtaccgggaggcgcttctgaggacgtacaagtacggcaagaggggcggcctcgccaagggcctcggcctcggctccatgcactctgtgcttttcctctcctgggcactgctcatctggttcaccagcgtcgtcgtccacaagcggatttccaacggcggcgagtccttcaccaccatgctcaacgtcgtcattgctggcctgtgagtgcacagagtttaccggtctgcgtcgccgagcaatcgattggaaaattcttatgcgcgtgcggctggcaggtcgctcggccaggcggcgccgaacatctcgacgttcctgcgggcgaggacggcggcgttccccatcttccagatgatcgagaggagcaccgtgaacaaggcgagctccaagaccggccgcacgctgcccgcggtcgacgggcacatccagttccgcaacgtccacttcagctacccctcacggccggacgttgtcatcctcgataggttcagcctggactttccggccgggaagatcgtcgctctcgtcggtgggagcgggtccggcaagagcaccgtcgtctcgctcattgagcgcttctatgagccgctgtccggctccattctgcttgatgggcacgacatcaaggagctcgacgtcaagtggctgcgccggcagatcgggctggttaatcaggagccggccctgttcgcgacgagcatccgcgagaacatactctacggcaaaggcgacgccaccatggaggagatcaaccacgccgcgaagctgtcagaggcgatcacgttcatcaaccacctccctgatcggtacgagacgcaggtcggcgagcgcgggatacagctctccggcggccagaagcagcgcatcgcgatctcgagagcgatactgaagaacccgtcgatactgctcctcgatgaggcgacgagcgcactggacgccgagtccgagaagagcgtgcaggaggcgcttgaccgcgtcatggtcggccgcaccaccgtggtgatcgcgcaccgcctgtcgactatccggaacgccgacacaatcgcagtcgtcgacggtggcaggatcgtcgaaacaggcacgcacgagcagctcatggcgaacccgtgcagtgcctactcctcgctgatccaacttcaagaggccgcccagcttcagcacaaaccttctttgtctgacagtgcaagcatcaccaggccactaaggtattctctacttggcactgtaaaagaaggccaaatgtgtcattctgatctgataaacttaattcattcccttgcagtttcaagtattcgagggagttgtccgggaggacgagcatgggcgccagcttccgctctgacaaggactcaatcagccggtacggtgctggtgaggcgcatgacgaagtgcgcaaggggaagcccgtgtccatgaagaagctctactccatggtgcggccggattggttcttcggcgtgtcgggcaccatcagcgcctttgtggccggctcccagatgccgctcttcgcgcttggcgtcacgcaggcgctggtgtcctactacatggggtgggagaccacgaagctggaggtgcgcaagatcgccgtgctcttctgctgtggcgccgtgctgacagtcgtgttccacgtgatcgagcacctcagcttcggcatcatgggtgagcggctcaccctgcgggtccgggagaagatgttctcggcgatactgcggaacgagatcgggtggttcgacgacaccagcaacacgagcgccatgctatcgtcgcggctcgaggctgatgcgacgcttgtgcgcaccatcgttgtcgaccgctccaccatcttgctccagaacatcggtatgatcgtgacgtcgctcatcattgccttcatacttaactggaggatcacgctggtcgtccttgccacctatcccctcatggtcagcggccacatcagcgaggtgcatactaaacacatggtctttgcgtgcttaatcggtccaatcaactaagaatcctgtatgatctatggaacagaaaatgttcatgaaaggctacggaggcaacctcagcaagtcctatctgaaggccaacatgctcgccgcggaggcagtgagcaacatccggacggtggccgccttctgctcggaggagaaggtgataaaactctacgcggacgagctgaaggagccttctaagaggtccttccggcgaggccagggcgccggcctcttctatggagtctcccagttcttcctcttctcctcttacgcactggcgttatggtaaagcgtatattggatggaacacaatgaaatctagtttttggtctccatcgaaacgtaaaattgttccaaaattcaggtatggttcagtgctgatgagcaaggaattggccagcttcaagtccgtgatgaagtccttcatggtgctcatagtgacagcactggcaatgggggagacgctagcaatggcacctgatatcatcaaagggaaccagatggcgtcctcggtgttcgagatcctggaccgcaagactgacgtccggatcgacacaggtgaggacatcaagaaggtagaggggctgatcgagctgcgcggcgtcgagttccggtacccagctaggcccgacgtgaccgtgttcaagggccttgacctgctgatgaaggccggcaagagcatggcgcttgtcgggatgagcggctccggcaagagcaccgtgctgtcgctcatcctccggttctacgacccgatcgctggaagagtcttgatcgatggtacctcttgttcaaagatatagctccgatcaaaatcttctgcctagcctaattgcgttgatgcaatgtgcagggaaggacgtcaagaagcttaagctgaagtctctgaggaaacatattgggctggtccagcaagagccggcgctgttcgcgacgacgatctacgacaacatcctgtacggcaaggacggggccacggaggccgaggtcgtcgaggcggccaagctggcgaacgcgcactcgttcatcagctcgctgccggaggggtacaagaccaaggtcggggagcgcggcgtgcagctgtcgggcgggcagaagcagcggatcgcgatcgcgcgcgccatcgtgaaggacccggctatcctgctgctggacgaggcgacgagcgcgctggacgtggagtcggagcgcgtcgtgcagcaggcgctggaccgggtgatgaagaaccggaccaccgtgatggtggcgcaccggctgtccacgatcaagaacgccgacgtcatctcggtgctgcaggacggcaagatcatcgagcagggggcgcaccagcacctgatcgagaacaagaacggcgcctaccacaagctcgtcaacttgcaacagcagcaacagatgcagacgcagcagagctcatgagacatgttgaataaaaagcgtgtgtttctatcttgctgtggcgttgtctttcttgggcttttgtaaaagatctgtgctggtaatcttttcaatgaaatgtttcaaaaaaaaaacttttcagtgaaagggagtgttcagaattacaggataaagcgttattggattgttatttctttgtatgtactagattattacagctgaattttagtagtgtgatacatctgtatctctgacctccgtgattaaaaaactgtacatacacttgcaatgttattctgctgcatggatctcaatatttagtgcttactcccctcgttttaaaaatagtatcgttttagaatttaaaacatcttatttgattatttgccttatttatttttttcataaatattatatattttcttaagacttatttttattattaaagatactttattaataatttatttattttataatttacaaaaaataaaataaatagtcaaatatgatatctaaaagtcaaattgtcgctctttttgatatgttgggattacattgctagatgaaagtccacaagagccgtctaggtgacggcaattatcaaaaaaaaaataacaaatcccgtttctcaatttcatctaatgccacgttccaatagcatcagcatcctcaccgcaacgaaggcccaaccgatcgcttgggcccataacaagcagcagttcgactcgcgctggcct

SEQ ID NO: 3561 - DNA, 8068 bp, Sorghum bicolor
tggttggtccagttcaaacctacaccttgcaaatcttgagacttggggttcgccgttcaacttgttttccaagaacaaaagggtgcatgttctttccagcatctaataattgaccaggtgcccatgtgtgacgtgtagccattggtttccgctttctgtgcgagtcaagcatcatgctacagtcacgtgatatataggaaaccagaaaaaaaaaactgttaccaccggtccaccacaagtctatgagcattgcaaagatcgaagagaagcaaaagtatgaaacgctaaggtgtagtgccatatcttttgataatgtcgaatcaaacgctaaaaagtgaaggagcatgtaagctataatcatccttttttcagacttcagtatagatggtatagtgtgaccaacaactctattattattctaagaataagtataataagggtatgtaataagtaggcttatagctgagatggaaggtaagagctgatgcacaaagctccaagaagagaaagtgggctgtattttaatgggaaagtatgtttttatagtgggctatataatatatatatatatatatatatatatatatatatatatatatatatatatattattagccatactctaaaatgatgctctacacgtaagcagcaaagagaaaaatgctaaatggccacctcactctgtttcgacttttttttgtctctaggtcaaatgtgacggaagcaatttgcaagcctttctgatggagaataagaggaaaacaaaaggcgaaggcaacattcgtttcctttatgaatatgttcgagatctctcaccgagtcactcgccacaacttctaagctgcaacaaaaaaatctcatcatatagtacaccacaactagatttactcaatttgtgtttggatgagtttttttatgcttaacaaaaagcgcacacacgaattgatcatagatgaactggttagatttcttgtagtgaaatctaccaatttctaaatttaacggcactatgcttttagtggtaggtgacgtctccgtcgacagcgagacgtctgtggtccttcagaggtgctcagatagagttaggatttgcgtacatgtatttgaggtgtctgcggtcgtgcttatatagggttaggattcgcgtacatggaagtgaatgtgagtgtgttgtaaatgtctgagcacacacaggatgcaaacacacatctttcttcaaaataactaattctttccatttgttgacattagaaataaggaatggaagaaaatttacagttaaggaaacggcggtacttcataggatcaaatagtctctctcctcagcttcattcaacatttttttttgattacacataacagcctgttgatagacagctccattcaacattgaaacaacttttttattagaagcgacattgatagacagaattttttatattttatttattaacaagacagaaaccggaaggaaaacatcccacatcacatcacaaaataataaatggaaaaaaaatcacgtagcttgaatcggcacagaaagggttagccaagttaattatagtttcatagatctctcataatctcttcgtcccaaaattaatgacatttttcacttctaaatattatgtttgaccatttgttttatttatttttaagtaacaaaataagttaattataatgataaaataaagaaatcatataacaaaataagcaatgtttatataaaaaattttgaataagaccaacagtcaaagatgatgcgatgtctatacaagttaaattaaaaacgtgatatattttggtcggagggagtaggatcaaaggaggagcataaagtgccaaaatttgaatcctccatcttgtataataaagaacatagcttgatgtaatccaggcaagcaaagcccatctacagctttgatctgagacttttgtttttatggcaaagaccaaagagtgaccttgtttgttttaacttttaacgcaaaaccgcggctgtgttcggcggccctcccttctccttcctctcgctttccggcgggcgactggcgtgcgccgcttgtttgattgcttccgtcgtcccctccccacgtacgccctgaccgccttttataagcaccatccatctggcctcttttttgacaacgccaaaccatctggcctttgcagccccgattcgccacgaaaccggccgcagtgtgagagagggacgccgcccgttgtccccggcgtatacgcaatccttccgtcgctgcgaagctgatccctcgtgttcgccttcgccatggcccctgcctccagcgtcgccgtggagaacctcaacccaaaggtgagaacgccacccgttttcctccccctctctagctgtctggcccttgaaggttccattttgatggatttttcggtgggaagtttgggctttgacgaggcggaagaggctctgtggatgtgcgctgcgttctgcgtgtccctgatcgattcagcttagccgcgggctggattctcgtttgcttgaaaaatctgggctgaaaaaaattctctttgattcgctggagtggtacatgccgtgcctagttcttgttctgatgatctgattttgattcacactttgaaatcaaatgagaatttttttgaggataactgtaacaactgcacgggcgcaaagttccatcgttttcctttagatgatggcaataagtctagttccttttccccagatcactagtcgctatcgctacctctcaaaccagaggtagatctcagtgcgatccgagctgctggagtgccttttctttttgttttgttgtgaccgagaccagagtagtttaatgtcatctatgtcagtgtcctttttctcccctttgactcaaaagtgggtacggcgatttgtttgggctgctgccccacagcccccacttgtggtcctgtgagatctgaggtactacttcgttggcaatctgtgccttgttactaaacctattgaagtttgtaaacctgattgtcgtgtgatcttgattttcacctgtttcatagacggcagctttcgtactttgcttgtctggataaggcgagtgtggcttctcatgcctagctaatacactaataactattacaggtcttaaaatgtgagtatgcagtccgtggggagattgtcatccatgctcaggtatcttgagtgactactgatattcaacaaggcttgctgtctacgttcatgttcccaaataatcggttaatcacgttaccacaaggcaatacagttaaatcaggcaatgttcatatacagagtttcgttagactgttgtagtaatagtattgcttttgacactgctatctgatttgagtgaattaccaaagaacagcatagtgcactacctggattcacaaacatgcattgtgttatagagcttactttatagctttggaattctagtttggttcaggaaaggaattaagcatgtagtctacttgattgctattaaccatattactttagtaatttaatttgcaattgttccctgatgaaattcatcctaattattgaaggttaataatcttgttcaccatattttgtatggctcactgtgaatgcttttaagactcttgagcactccatgccactggcaggtctgccattaaggaactgcttcgaaattgatttaatataaccccactgtttttttgtctgttaacagcgcttgcagcaacaactacaaacgcaaccagggtctcttcctttcgatcaggtacctaactgttgaattaaaattcattaaaactacctttatctttcctttttttttaaaaaaaattatatagctcattccaattatatttttacccttgcagatcctcttctgcaacattgggaatcctcaatctcttggtcagcaacctgtgacattcttcagggaggtatgcgtttatttgacctgctgattctacctttgtttctttggtatttacatggtaccttgcaggttcttgctctttgtgatcatccatgcctcttggaaaaagaggaaaccaaatcattgttcaggtaaatatcgtcattgttctattcattcatcgttcaatttataggtcttaaatggacagatctagtgcaagcacttgactaagtgatatcctgctacttttcccaacttcagtgtcaaatcaacctaaaatttctaaaaatattacagagagggcaatctatctttctccaaaaacaaagctgtggcaacagaattatgtggaattttatttgaaaatagtaaacatttatataaatagtaaaatttcctgtgaaatctgtcaggtatttaactttttccccgttcatctttgacattaattaaacatacctaggaagacagttttagagctcccatgtttaattgagctgttcatcagaagaaccattacatcattgcctaattatgcatgccctttcaattaatttattttttctaaaatttcccttgatgtcatttccagttataaagatgatttttgctatttgttatctgtcttgtttgtactgtttaatacttttgttatccacaaactttcagaagtagttcagtgtcccatttatacataaattcttatgtgtacttgatggctcatctcactgcagtgctgatgctatttctcgagcaaagcagattcttgcaactattcctggaagggcaaccggtgcatatagtcacagccaggtgaacatctcagtctgatattatttattgaccacaatgagaaaggaatcttggcttcatttgatttctttatttttcctagggtatcaaaggactgcgtgatgcaattgctgctggtatcacctcacgtgatggattccctgcaaatgcagatgacattttcattacagatggagcaagtcctggggtgtgcattttttaatttctctttgaattgtcctggacattttctgaataaacatgatatcactgaagtctcatcattaccctctttttcctttttaaggtccacatgatgatgcaattactgattaggaatgagaaggatggcattctgtgcccaattcctcagtaccccttgtactcggcctccatagctcttcatggtggagctcttgtatgtactttcatttgctcagcagaagaatatggtctatagtgttatatattgtatcaccgacacctaaatcgagcacatgttctttcaggtcccctattaccttgatgaaaaaactgggtggggtttggagatctctgatcttaagaagcaactcgaagatgctcggtcaaaaggcattgatgttagggccttggtggttatcaatccaggaaatccgactgggcaggtttgtaccgaccatttatcctctctcattaaagaacatctctgcttgcttggattttctatttcccatgcacaccatactctttataattgatgtaataacatgaggtgtgtatttcttgtactcctgttttaagttagtgaatactttgtatacttgcattgtctagggaaaagtttagcttagaaaaaagtaagtgttttttgtcgttctgcaatgtgaatgaatgttttttcagttctggtggccaaaacacaaattttattgaagtggttcatttatttgtaggttcttgctgaagacaaccaatatgacatagtgaaattctgcaaaaatgagggccttgttcttctagctgacgaggtgagtgatgggctggtagctgatgttaggcgtcagaacaacacaaaaaaatttgccacagctgtaacactgatgccattttcattggtaggtatatcaagagaacatctatgttgacaacaagaaatttaactctttcaagaagattgcaagatccatgggatacggcgaggatgatctccctctagtatcatttcagtctgtttccaaaggtagattgatataaccaactactttatctgccatttggtcaagtcactggcttagccaaaagattctgctgatgcaaccaggatactatggagagtgtggtaaaagaggaggttacatggagatcactggcttcagtgctccggtaagagagcagatctacaaggtagcttcagtgaacctgtgctccaatatcactggtcaaatccttgcaagcctcgtcatgaatccaccaaaggtctgctatatggcattctttgaattatgccctgattggaattaggaaatgctaagttgtccagttaaaaatcattgctttattcttcaggttggggacgaatcatatgcttcctacaaggcagagaaagatgcaatccttcagtctttagctcgtcgtgcaaaggttcgcctggttgcatatctactgtagttttgagtaataacttattaaaaatattcaagatttttttgtttgttctacaggcattggaggatgcattcaacaagcttgagggaatttcatgtaacaaggctgaaggagcaatgtaccttttccctcagattcatctgccacagaaggcaattgaggctgctaaagctgctgagaaagcacctgatgcgttctatgctctccgtctccttgaatcaactggaattgttgtggtccctggatctggatttggtcaagtgagtcaactcaacctttacatattgtaatatacttgtgtgcctgtagctgtcgatgtataggttgaagcatatggataagtaacgggagttttatattttgtccaatattaccttgctggattatgtgttgataggttttcatgggacatctagtcagattgttaactcttaggtctagtacaggttgcctttatattgttaattttctgtgcaactaatttaagctgtggcatttatagttttgaattttagagtagggtgaattttagaactatacatgctaaagctacttctaagagcataggatagtgggttcatggagatgcatttttcatataaaatcagccatagctatctccctgtatttcatttcatgttaaccgtcctaatgatggtctgttcctttgttggactgcacaggttcctggaacatggcacatcagatgcactatcctgccgcaagaagacaaaatccccgcggtgatcacccgcttcaaggctttccatgaggcgttcatggctgagtaccgcgactaaactgttacagtgtgaattaagatggagattcagtagaagagtccatcttttttcctccctttgttccccctttgtacttcttgtactgtgttttaatatattttccagtaggggctaaaaacccctccggttgtttcctaaaaaaaagtagaagagttcaatgacagagcaaaaaggggccagtgttagaaatcttatttcctccactggagcaacaattgtctgtcttcaatcaaaacaaaaatttcgaactggactaggcaacttctcactgacactgttgggcttgacatggtagaaaattgtgtgcacctgcctgccacgggagtggctggtggaatcctactagcgggcgtctgaatgatacttcaatcgacgcacgactaggatgacgccatcaaccatttctgtcgatattacaatgttagctgaaatggtccctttcaggtgtttatgtgtctcaggccttgtttggttacccttgctaaattttaactagctaaactttaatcactttagtagctaaagttccaaacatattaacttaaaaggagctaaaatagtttagttccattagtcatccaagagtagctaaaattataattttagctaggtaaaatttagcaaggggaaccaaacggggcttcaatcggacgcggataaagttgatgaccttcaactagctgagatagcactccatggaaggaaatttacctggtgcaatgatcaaacgatcaccgactatgactaggatagaccatatttctttgcctccactgattggcttgagctgtttcccaaagcaaatctacaagctcttgcctctctcggctctgaccattgcacgccatttctccaaggagacgcttctttggatttctaccgttgcttcctcttcgaatcatggtggaccaaatagccagattgcctctc

SEQ ID NO: 3562 - DNA, 3931 bp, Sorghum bicolor
gcctccagtactctccaagcacctccttgaccataggaagcttgacggccccctccctatccccgccgacgattccctcgtcggcgtcatcctcgtcggcctcctcagccaccgcgatggcgttctcttcagggcgcgcgagctcggcgccccaaagggccgcgcccaggtcgcgcagccggtgctcgtgcgcggtgctggattcgcccggcaccgagtgctggaacttgctcttgaggcgcttgagcttgtagtacaccttggcctggtcgaggtgcggcgcgagggagtccttaatggactcgaacagttcgcccatgtccgggaggcgcggcgcgatgccggtgcggtccttgaaggcgaccgcgcccgtgagcagcgcgacctcgtcggcctcggtccagagcttctggacggcgcccgcactgccacggcccccgccgccggcagacggggccgcggcggcggcggcggaggcggaggcggcggccgcgaccgaggccatggccgtggcgagcgtggcggagtccgggaaggagcgcggcttgggcttgcggtcgctcttgcgggagggcgcggcgccggcggagccgtggtccgcggccgcggcgcgctcgcggcgggagctagggttagggttcggggaggagcggcggcggtcccgggaggagcggccgcgggacttggagcgggaggtgcgcttcttggagcgcggggtggaggggcggaggcgcgcggcggctgcggaagcggcggcttcgtccatggcgtgcggggacggccgcttggagggcatcggcggcgtgcgggcgagggctcgggacgcgggcgattcgaatttcgggggctcgcgaaatcgggaaggagatggggagggagccgacgcggaagaggggaagaggagttcagtgggcagcggcgcagcgcaggcaggcaggcaggcaggctgcgctccggagtcgggaagggagcgcggcgtggcgtggcgtggcgcgcgtgtcgagttgcgtgcagacagcgagcctgacaagggtgcggtttcttcgtgcgtttcgcgacgccgtcccccggtgtcgctcgcgctgccgtgcccgccttccacttccagagcctgcgccgtgcgctgcgagcgtgacattgcacggccacggtgcatcctgccgctggtgccggccgttgtttgattgaaacgcaggatttgtttacatgcgaaaaaaatttggatttcgctactatagtatttttttatttgtttatgacaaatattgtccaattatggactaactaggatcaaaagattcgcctcgtgatttacaggtaaactgtgcaattagtttttattttcttatatatttaatgtttaatacatgtgccgaaagattcgatgagacgggaaatcttgaaaactttttgattttcggagtgaaacgagaccttcgagtcagtctgcaattttaacggcatctgcaattttcccctactgtactactgctagttggataacataacactggcagcaggccaggcctgctctgaagtccacgatgaccagagttgccatggccttgtttagttctgaaaagtgaaaacttttcggtactgtagcattttcgtttgtttgtgataaatattattcaatcatggactaactaggatcaaaagattcgtctcgtgatttacagctaaactgtgtaattagtttttattttcgtctatatttaatgtttcatgcatataccacaagattcgatgtgatggggaatcttgaaaactttttggttttcagggtgaactaaacaagtcccatggctcgctacacggtccttggtgcctgcgctggagttgcgtgaccgtgatggagccgtgcattgccggggcaaaaatatcctagcccagccggccagcacgattgagatcgatggcccatggatgattgatcccaccccgcttatcttatctcacccgtcgcgcgcagagccccaccaccaagtacaccatcgatgtctgccaccgaaccggcagccggcctggcctccgatggctatgaccgccggcgcgagctgctgcaagcgttcgacgacaccaaggcgggcgtgaaggggctcgtcgacgccggcgtcacggccatcccagccatcttccgccaccccccggagtcactcgaggcgacctcgtccccaccgcccaccgacgtcgtggccagcgccggcaccatcccggtcatcgacctcgcagctgcagcaccgcgaggagaggtggccagccaggtgaagcgcgcggccgagaccgtggggttcttccaggtgaccaaccatggcgtgccgcgggagctcatggccggcgtgctcgccggggtgaggcggttcaacgagcagcaaccggaggtgaaacgccggttctacaccagggacactgcgcgcaaggcgaggttctgctccaattacgacctcttccagtcggccgccgccaactggcgcgacaccctcttctgcgagctcgcgccggacccgccgcggccagaggagctcccggaggctgtcaggtatgaacacacacgcaggcacactaatccccggagtatgcactactgaatctctgtctgatccatggcgaacgaaaaggggcgtgatgctggagtacggcgacgcggcgacgaagctggcgctgtgggtgttggagctgctgtcggagtccctggggctggcgagcgaccacctgcgcgagatggggtgcgcgcagagcctcaacgtggcgagccactactacccgccgtgcccggagccgcacctcaccctcggcaccagcaggcacgccgacgccaccttcgtcaccgtcctcctgcaggacggcacgggcggcctgcaggtgctcctcgaccgcggcggctgggtggacgtccctcccctccccggcgctctcatcgtcaacatcggcgactttcttcaggcatcccactcgatctcgacactgcccgggtctccattctgctcgaaacttattgactgttgtcgcgccttgctcgtgatgtggatgcagcttgtcagcaacggccggttcaggagcgtggagcaccgggtcctggcgaacaagagcagggacacgccgagggtctcggtggcgtgcttcttcaacgcggacgccaagagatctacgaggctttacggacccatcacggatggcggcagtgcgccgctctacaagagcgtcacggctagggagttcgtcgcgtactcgtacagcaaaggtctcggcggtcgcccgcttgagcacttccggttgggggcagaagactagagcatactcctagaacagctgcgtagtgccgtagtcagtgatgcaagtcctgcattccaaattgtaaattattccatgaatcttgaagtaagtttgaccgaatttatatgataaaataataattattataataccaactaagtatcattagatcttttcttaattatattttcatagtatactcactttacgttaaattcttagtatttctctctataattttggtcaaacgtaaaaatgctttgactcttcaaaattcttggaatgacttacaatttgagatggagggagtataatggtatttcatataatttgagcaaggtaagaaataaactcaaggccttgtttgttgtgcgggtataaacccctatacccttacggctagacttcggctaggaagcttggcccattacgagacgagttcaaggcttgattcgacagcttggagttttgcgcaaggaaacaagatgtggagatcaagcaggattctagtcggttagaataggaattgatatcgaattatccatgacaattgtaaccgactaggattagtttctagatctgtaaccctgccctccagactatataaggaggggcaaaggacccccctaggacaaattatctctcaacacaatcc

SEQ ID NO: 3563 - DNA, 4019 bp, Sorghum bicolor
cttccattaagaattatcttagggtcaaggaggatggtgatagatgggtggcagcttcaataacacgggatcttttaaattaatattttgaactactgtaaggggaacttccaatagtttcacgggcatgcctacaatttacgctttgttgtttcaataataaagcgggaaaccttttcttaaataagattaggtctaggacttttagattcaattcgtagttggtacagtaatatgatcgatattatatatgatccactctaccttcccttagcttgttcgcgtatgctgtatatcgtttggaatttgagtagagtgcgcgcaggcagccaagcatcatatccatgatcgactgcatgcctcgaaatgtgtatgtatatgtatgatgcatgcatatggtgctgggcaccttttatcgatcgatccgatctcgatggaacgccagcccaactcactcactgcctaactacactagctaagctttgctttatccactgataatataatatcgatcgatgaaaccattgtccaagcatggcactagctatagccaaattgatttgcatatgaatatgctttgtcgttcatgagctagccgagaaatgcgcgccctgtgtatgcacgtgcctggataatgtactggacagctagtggccattttactatcgttactactcctctccattctgaaccaatcatatcacttcatgtcttagatctcgcgtagacatggtttctaagttaaatccagtttctatgatttttgctctctctctttaataactaccttgctacatcagcaaaatgcttaggtgacaccataattaatgtctatagaaactatgatggtttctgcattgggagtgctctgatctgtttggaactccaccctgtctggttttgcatatactgtactttatttaccgccatgcagggaccagcatgaccatgagagggaaagagacacatttataaagctatactatttttttaatacaattgagaccttttggctctataataccataccatactgagttaattagataaactgaccaagctcatcaaaatgctaaagtataaggcaatgcatttatatttcagcatacttgagttgtcgcaacaaccacaatgatactctttagccacacgaaacccaactactcgatcagtgatcaccaaggttatatatggcgtgacatagtaatgctggtctatttaattactttcggtttcaaaaagaatacgagtacaatgtaaattttaagtatgaatctgaataaagacttgtccagttcatatctagaaattatatttatttttagacaaagggaatactccctccatacccataaagaaagttattttggacaaggtttgagccaagcattgtgaatataaatcatgaataattttttagttgttaagtttaaaaatgtgaaaactatatgaatatatttatcatgaaaaatacttttgtaaaaatatacacataccatttgttaatagatattttttatagaaataaagagtcaaagttaggctttaaaaccgtatcattgtccttaatgactttctttataggtacgaagggagtatttaaaaaaaacatagctcagtcttcaatcaagcacgaagtttaagatggcataatcaatacaacatggttagttagccgatggttgcccctcaaacaaacatcgagatcaaggcttagcagcctcccagagacgtacgttccaaaaacgcgaatgctatcgtttacgttataaaacgatactctgagttctcgttctagaacaggggatgatgagaacatggctgctatagattaaggactaaatttaaacacacccaaagtccttacattttgaaacggtggaagcagctagtaggagggggcatcatcagtaccaaaaaaaaaaaaaaaacctctagcaatggtctggtggtcggcatgagttggctataaaaaagggagctggttgacgcgaggtaggcacacactcttggagtagcagcagcgcctagcctagctagtagctatagtagaagacgagagagatggctgctgctgtcatggccattggcctgctgttggccggcgccgtcgtcggcgcagtagtgccgcctcatcatgatcatcttcagctggtgattgacactgacggtggtttgtcgctggacttccacgcggcgtcgtgcccgcagctggagggcatcgtgcgcgccgccgtgcaggccgagcgaggccaggacgtccaagtcaccgccggcctcctccgcatcttcttccatgactgcctcccgcaggtacctcatatcttctgtatgcatgtatcatgcatgtacagtactatatatgtaacgatatatatatatatatatatatatatatatatatatatatatatatatatatatataaaactataggggtgcgacgcgtccatccttctggacggcgagaaggcctttggtcccaatgcttctctacagccacgggcgctgcagctcatcgagagcatccgcgccaaggtgcacgccgtgtgcggcgccacggtctcctgcgccgacatcatcgcgctcgccacccgcgacgccgtcagcctggccggaggaccgtccatcgcgatgccccagggccgcaccgacagcctcaggccggccaccaacgccgaggtaaacaccctcccgtcgcccttctccgacgtgagcacgctcctcggcaccttcagccgcaggggcctcgccgaccccgccgacctcgtcgcgctctccggcggccacaccgtggggaaggccagctgcggcttcatcagggggaacgacgacttctcccggaggctcgccgcgaactgctccgccggtcgcaccgggaagcagagcctggacgtcatcacgcccgacgccttcgacaacaggtacttcgtcgcgctgaggagcacccagggggtactgctctctgaccagggcctcgccggcgaccggcgcacggcccgcttcgtcaccgccttcgccagcaaccaggccgccttcttcaaccagttcgccaagtccatggtcaagctgggcagcatcaaggcaaccgccgccggcgagatacgccgcaactgcttcaggcctaacggccgcgtcagcttcgacgacgtcagtgctctcactctcaccggtgatgatgccgccgccgtcgctaccagcgacgagggctttgcagcctctgcttaatgataagacatgcatgcatggtctggcatccatgtactacgttcttaattatttcatgctaagtttgctttccgtgagccatcagtaaggtagaaggtagctgaatcgatggatggacgagatcggtactgtaataatgccagtgcagtgttagcactcggcaggttgtagcatgcatgatgtactccaatatgcatgcatacgtgttttaacgctagtagtttgatggatcatcgatcatgtgaatgcatgcccagccagaccagatgcttcatgcatgcatcacgttattattataaataagtttgtctttatatctaagatacataacaaaatagataaataaaaaaaatcaaagcgactttaattttataatttagaacaaagtgataattaatactggatagaagtgtgtgtgtgtgtgcggcggctttatcaactactcagaacggaacattaaaaacgctgtacccgtgctagcgtgcatgttatcgcactcagaactccgacccacagcaagaaagtaaagaattttgtggcgggaccatgcatgaccagaacgtacgtgtaaccaattaagcagcccaaatggcctcagttttttaagctaaaggtaagcataccactaaccgcccggcgtcatttcattttgatccactcgcatactataactattcatatagaaatgtgaaaagcgactcgagcagcaacgcatgcatgcaatggcacgttctttgaaactaaagttgaaacgctagctgatgagagcgagcgagggtccatgaattgca

SEQ ID NO: 3564 - DNA, 7315 bp, Sorghum bicolor
ttcccttcctccgactccggcttcgtggcagcgccgccctgtccccacgcccgccctgagctcgtcagaggatgaccgtgacactcgcttggtcctgatgcccctgctcctgttcctgctcggtcctcggccatggcggaggtggtggaggaggaaaggaggggccccgttagccatggtcgccgcctactccctctctcttctagatccgacatgcatggttggatctgtcaaggatgcgagatccatcgaggacggcatgacgtgcgagcgttgctggccaccatgggagctccactgcgccaccatggaggtccaccgcgtgagcgtcaccagccaccatggcagccatgggagctccaccaccggcaacggggcgtagctccacctccaccagccacgatcatgggagctcctacatgtcttgccctcctctagactcccgcccgcctggagctcgccagatggtgggcactcttgcctttctcctctgcgcgtcatccctcttctccggactcctagcagccacgaccatggcaacgacggaggttccttctgtgcatagaaggtgttcgatgaattgcttttatgcaggtaaacttacctaaactcagatgtagtgattctatataagaaacacaaccaaccaaacaagaactctctgtagcctgtcccatgtttacacacaaccaaacacgcgctggttggctagttgggaccagtccttagctgcgcaggttacgttttctggccaggctttagaacacgcccatagtatcatgtataggtgaagttgatgccaactctttgcagagcaataggccatgaagtgcagttcacagaatctagaccataaaagttgatgctgaggccaaccatggtcgatgcgcgaaaagaggcgatggaacaagagaagcctgtctcagttggtggaaaggccgggtctatggcggagaccgtggatctgtggtggcggcggcgggggggggggggggggtttccggaaaaaggcaaaagccgaaggggcggctggagggaaaaggtgactgccaaggaaccaacttccggagggaccgggccactgccgccatggggttagggtttgggtccaggcccggggtgaaccctgaaaaatactccgcatccggatttcgcgggggtttttgggcctcaccctgatttcggcctgtattctaggcctgaaactttttgagcctgtttacttgcaaaataccaaattgcaaaaaaaaatatatatatttgggccaaaattttttaaaagtaaacaaggcctttgccccaagcccaatcacatcttcgatgctcttgaaggcaaagtagtaggtgggagttatttttaactaattttataggattataatataaattaagcaccttataaaaatattttataataaatctagtgatactaatttaataataatataaatctttaaattttattctagaaagtcagttaaagtttaaaaattttaacttaaaacaactgaagaaatctatttattaaaagagagggtatactttttttcctccagcagtctacgtcgctccaacccaccttttcaaaatataaatcacattgtgtcaatcaagacattaaaaaggcccagtccgaatctccacgtcgccatccactcggctaggcccgcgccatttttttttggtttctgtagtataatatttaacaattaaattaaataattaataaaaaaatttaaaaggcgaaaacatccgatacgcgaatgctgccggctgcgcactcccaccccgcgaacgatagcgagcgaaaacgttcacccgcccccaagctgtcaggtgtcagcgacacaccctgcggctgcgctaacacagtcccagactcggcgtctcctccgcttctctcgtgtgacggcagcgtctccgccgcgtacagccgccggctacccatctcaattctcgcgacgccaccgcctagtcgccctccttgacgacgcgacgccatgcctcctccccaggacggggcccatgactccgcggcgcgggtcccgctcctcccgccccctgctccgcgccgcgcggccgtgaggctccgcccgctcccgctcctcatcgccgcggcgttcgcggcctcctaccgcctcctcttccacctcgcgcccgcgccgtcctactaccagtccctcctcctctccctcggctccaacgacaccgccgccgcccacttgcacgcgctcaccatccgcccccacctagcgggcacgggcgccaacgcgctcgccgccgcgcacgtcgcctccgcgctctcctcccactccttccccacccgcctcaccagctactccgtgctcctctcctaccccgcgcaccgctcgctctcgctctccgcgccggatcgcgacacggtgctcttcgctttgaagcaggaaacctacgcaggcgacccctacgacgcggtctccgacgaggccgtccccaccttcctcgcctacgcggcctccggctcggtcaccgccgaggccgtctacgccaactacggccgcgcggaggactacgcttacctcgccgctcgcggcgtcaacgtcaccggaaaggtcgccgtcgcgcgctacggcaaagtgttccgcggcgacatcgtcaggaacgctcgcgacgccggcgccgccgcggcggtgatatacaccgacgcgaaggactacgcggccgggaaggccttcccggacggaccgtggatgccgccgacaggcgtgcaggtgggtagcacgttcaagggggtcggggaccccacgacaccgatgtggccgtcgtcggagggctgcgagcgcctgagcgtcgcggaggcgatgagttccgatgacatgccggggataccggcgctgccggtgtcctggatggatggggagaccatactacagctcatcggcggcgatgtggcgcccaaggattggcaaggaggcgatggcgcggccgcttacaggattgggcccggcccggcagtgctcaacctgacctacatagtaagtggcttttttgctgtacaggagctggatatggaaacttggaaaggacagagaaaatcttcttttttgctatttgttgttttctttgtataggggaatgagacgatggttactattcagaatgtcatttcggtgattgaagggagagaagaacctgaacggtatgatcaagatccccaaaccaacactatcaccttacccccaatatcccatccaaactccaatttaggaaaggggcccaagcgaataggctgtacaaatccgtctgtggccggcctcaagcgtcagcttgaaatgctatgaatgaaaaattcaatcttcgttaggtaaatgtgactcataaaataaagtgtatgagacactttttctttgaacagtgtgtatgacacactttttcattgaacagtgtgctgacacacactaagtatttgtaattttactatagaggcagtgttatatttcgtgcagtgaccatcatttacggaactttgggtggctagtgaggaaacagttaccatgaaccacttagtgttaaatatatatcacagattttgtatggtatttcaaactgcttaatcgcttaccaatcttgttctttgaaagttaaaaaaatctgtacaaattctgtgcaattatcattgtaaaacatgcaggtatgtaatccttggaaatcaccgtgatgcatggacatttggggcagctgatccgaacagtgggacagcaaccttgcttgaggtatgctatatgtgggtacccagttttatgttctaattaagatttgctcgacttcttgtgtattaacttccattagatgtagctagctcaacggttgtctgagctgcaaaagaagggctggacacctcgacggaccatcatcttgtgcaactgggatgccgaagagtatggattggtctctctctcgactcaattgctcatgaccatgtcctgttttttgaaagaacaattaacatgtcttcttgatacaattttctttggggaacgctgcagacaggatccactgaatgggtcgaggagaacagggcaatgctaacttcaagaactgttgcttacctaaatgttgatattgcggtggatggttatggattttacgcatctgcaactcctcaacttgatgaattgcttaaagaagctagtaagcaggtatagaaatttgaaagaattatagcagaattttggagttaacagagagaacttaactcatcatatgaccagatattgtacaagtggtttaattgtatggatcctgtagttatgtaaagggtacagtcacaatcagaggaacaaaaattattgatcattgactagcagtttgatttgtgattaattggtttttcttggatatacagttgctgttagtatgaacttctgctaactatgactaaagtcaaatggtgacttcttgtaccagtcaattattttgtctctctaaacatttctgttttcattgttattgacgaaggtccaaaatccgaacaatgggacacagagtctctatgatctgtggatggcttctaacagttctcctttggtaagtacaggcttgtcgtctttcagtatttcaagtggttagtatgtaaagggaatcatagacctagttttgtttcgtctttgttccaagttcagggtgtgttgcttttgctgcattagattgcaagtttaagatttcttatgaattaatgagagttctgttgacaaatgtatgcattaagattggaagattaggaggtggaggatcggattattctgcattcgttcaacacattggtattccatcagtggacatgacgattgggtcaggtttgttctactttcttgtatacttgctttcattaacaaccttccttgaaatgatctgctatactgttgtttaaattcgtatttaaatttattttttagattaaccaaataaaatattagttttactagataacttcgctttcacaatataattctgaagcatagccaattcatagagaaacgatgcaaaagagggaatcctattgatttttgttttccattttgtgctgtttgtttgcagactatgcagtctatcatagcttgtatgatgacttcatctggatggaaaagtttggagatcccttgttccagaggcatgttgcaggtatgtttacaccaacctacatacaatgacttggacttgtacctttgtcatggatgtgtctgactcttgggtttacatacttgcacgctatatttcattgcatgctttgtcagctgctggaaggagaaatgtgatacatttgacatttctaaccatttttcattttgaggagactggaactattttacttctgcacgcagttttctctagaacactactttaggtcagtttgtaatgtactccctctgtctcgaaaggaatgcaattctaagtttgggatgagtcaaagtttgacaaagtttatagaaaatagtataaatatttatgtgtgcaaataagtttattatgaaaatatttttcataagtaatctagtgatatttatttggtattgtaaatgttagtaatttttgcacttaaaattgtttgacttctcggcgagtgagaattgcattctttttaggacagagggagtacatcttgtttacttgttagctcttttgtacagccacagaatgtttaaaaagctttgtcgtctttatagaatgaaacatgcatatagaattgttggggtggaatttcctttgtgactttgtgattttgatccttcatccgtactttgacagagttgatcagtcaaagtggattatgcgaaattttgtttgatagtccatggcaacatccaaaattaacttgatgtttcctttccagttgcgagcatgtggggtcttgttgctcttaggctctcagatgaggagatcctacccttcaactacagcaattatgccacggagcttgaggtaacctgtccttcggagctctcaaacaaattatggatcacctgtttcagaattgctcactttctatttttcaatgagatgtccaaatttagagaatcatgacagttgatcattgttatcagaatggagcattggatataagtgaaagtgtactgggagtgtctgtcagcttatcgcccctgcacaagtcaatcaaagagttcagaaaggcagttctgaaagtggattctgaattgaaggtatctattctcctgattgctgcgtgttgttgcctgatccatgttttcaactttgtttaacttttaactttattttttttattataggctctacagacatggaaattttgggccccatggaaaaacagtcccttgaaggtcagagacatcaatgaccggctgatgatgaccgaacgggcattcactgaccgggaaggactatctggacggccatggtacaagcacctggtaagttcttttggtgggttctgagaaaatactgtcatcaactcatgttattgccagactcacagaaacgaaatcacacagatatacgcaccttcactgcacaacgactacggggctcaagtgtatccaggtgttgatgacgccattcagaaggcgaagaaaacaaatacttctgaatcctggcaatctgtacagcatgagatttacagggtctctcgagtcataaatcaggcagcgctagttttaagtggagatctaacttgagtatttcttacagtagccccgttttctggttgtacatggccctggccgttgactataacttcttgaaaacagtagctggactgatacagtattgcggtggatgtgatatggaaaacaaatgtaaattttactggcagtacttaaatttatcccgagttcttatgctgatccgttacttgtaaattgcatattttgctcttcaaacttcactctctaaacttgtcccacccttgactccctaaatttaggccttgtttagatacacccaaaaattcaaaactttacaagattccccatcacatcgaattttgcggcacatgcatgaaacattaaatatatataaaaaagataactagttgcacagtttatttgtaaatcacgagacgaatcttttaagcctagttgctccatgattggataatatttgtcaaataaaaacgaaagtgctacagtgtcaaaatccaaaaagtttttggatctaaacaaggccttattattgtacgatcctggtctagtcccccctcctgcattgggttgtcctcgcctaccctgccacacgtgcgctccccatgcggttgctctaggcttgatctgcaataatgtgttacagcatgtacaatgctttg

SEQ ID NO: 3565 - DNA, 4603 bp, Sorghum bicolor
agataatccagagggacacttcttcgctgcccttctcactttctttatgacgaccgaccaaattattgttaacagcaattggccatggtgatgataattatatatactttgaatatgcaatacgcattacactaaatattgaattatgactgcctatgcatacccaagcaaggttagtagtaagtgcaaataaaggatataaccaagtcggcacggaaatagaatgggatgcgttacagtggcttgattacattatgcatgactgatggctttagttcttccttatgtgtgttgtcaatgatttcaaatcattctcccgtggaaaattcttttccttttgattagcccctttcttctttgtatatatttggctaataactcttcaaagcttggcctcaccttgcttttcaatttaggacttttgcagacccggtgtttttgcttttgctctacccctcaaaaactcttgcttgcatttttctagcagtttaggcttctccaccaatgattacttcgagatcgatgatctggtggagcacttctgggcgcttcatggcactagctaggtagcatgatctgttgtaattttatcataatttgttgctatgtggtgtcatagacaatttcaggccttgtttagttcgcaaaattttttaaaattcctcgtaaatatcgaatctttagtcgcatgcatggagcattaaatatagacaaaaattaaaactaactgtacagtttacctgtaatttgtgagataaatcttttgagtctagttactccgtgattggacaatgtttgtcaaataaaaacgaaatgctacaatagccaaaaacaaaaaattttgcgaactaaacaaggcctcaatatgcccatgatttttatggttgataaatttgagttcccgcttattcgggtcctctcgtctgccactctagacagcggggacgcgggcttcgtgcacggagcggcatctcggggacctgtgttgacctgtttggctattagctcaaacatgcccttaattattaggtatatatacaccgcttgtacttgtaggttgctgaacatggtcgaggtccctgtggatcaaatttgtgagggaatggcttgacttttggagagggtgaacccatgctgcctccctggctgacctgatgctggtcaagattatgctgggatagaatgagaatagcccgtggcaaaatagcaaatgcaagtggcaggtctcatccctatcatcccatccgaatgtcattttcctagctaacaacggatcattaacttacgacgttgtaaactgtcatgcattttccaaatcaaaagaaaaaggtggcaggcagctagctagctttccaacctgcggagtgtacacttacactagacattcctattaacatgtatagtattcaaagatgtcgttagagaaatgcatcatcttgtaccacttgttggctcgctcttgttagtctaacctatctatcttggtccgtggaatatgatcgatgagcaggtgccatatatatattcaaaccaacagacgcgctgacaaaaggaaccaatgcaatgcatgcaagaaaaatggtcagcttgagtgagcaactcagggatagatgacactagtatttagtataacagtgagtagtaggtgggtgtgcagtgtatgtggaacgaagctgcaacgaagttgcatgcatatctatatatatgatatatatatggcggcagaagacttattgtgtctataataaaaatgttactaggatttaatttaaaacgcatgcgatgcgacataaaaatacttttacctcctacaaccattcacttgatccatgctaattattccttgctgctttactctatgatgatgatgcaatgcaaatgaaatggaacaagttgcagctagtggatcagaccgatgagaggattagagaataatatatggggctgcatatgcattcataaccgcgcctataaataacgcactacaccttctgttgacctgtgcaagccacacaccacacatcgtcgtgcttgctagctgcacctggcaagcagaatgggcaggtcgtcccgctgcagctgcagcagatcagtggccgccgtgcagctgctggtggccatctcagcggtctgcggcgccgccctctcgtcggccacggtgaccgtgaacgaacccgatatcgcaaacggcctctcctggaggttctacgacgcgtcctgcccgtacgtggaggacatcgtgagctggcacgtcaccgaggcactccgccgcgacatcggcatcgccgccgggctcatccgcatcttcttccacgactgcttcccgcaggtaacgatcgatccgccctggagctacgttaaaacgttgttgatgctgacgatgaccaattaattaagaccgaccaacacacacacacacacacacacagttcacaagcatataacaatatataatccatgaacgaaactgtgaataataaaacgtagtaccatcgatcacccatcatgcatcgatcagggctgcgacgcgtccgtgctcctgtcgggtcccaagagcgagcagattgagatacccaaccagacgctgcgtcccgcggcgctgaaactcatcgacgacatccgcgccgacgtccacgccacctgtgggccaaccgtgtcctgcgccgacatcaccacgctagctacccgggacgccgtcgtcgcggtaagtccatcgccggccggccgttcatcaccctagctactatatatctgagagtatatatgtacgttggataccttgctgtatatcgacgcctactccatccatccagtccggcggccccttcttcgacgttcctctggggcgtcgcgacggtctggcgccggcgtcgagcgacctggtgggcaccctgccggcgcccttcttcgacgttccgacgctgatctcggcgttcgagaaccgcggcctgaacaaggcggacctggtggctctctccggcgcgcacaccgtgggccgcggccactgctcctccttcagcgaccgtctgccgccgaacgcggacgacgacaccatggacccggcgttccggcggaagctggcggccaagtgcgccagcgaccccagcgggaacgtggtcacccaggtgctggacgtgcgcacgcccgacgccttcgacaacaagtactacttcgacctcatcgccaagcaggggctgttcaagtcggaccagggcctcatcaaccacccggacaccatgcgcaccgccacacgcttcgcgctcaaccaggccgccttcttcgaacagttcgccaggtccttcgtcaagatgagccagatggacgtgctcaccggcaccgccggagagatccgcctcaactgctccgtgcccaatatcgtcgtctcatcatcagcccacaccgccgccggcgacggcgacgaggggcgagcggccgacgagtgaatgatgattagctgtacgtaactcactgtaacaggtcatgggccatggcgtgtctcttctccatcagtgttgtcaaactgtcagatagcttagcaaccatgcgtgctgctgtcatggactcatgcatggtcgtcatatagcttttcaaataagccaggcctatatagttgagtgagtttgcttcttctgttttttctagttttcgtggtttgctactttggccttgtttagttccaaaaaattttgcaaaatttttcagattctctgtcacatcaaatctttagatgtatgcatggagtattaaatatagacgaaaataaaaactaattacacagtttggtcgaaatttacgagacgaaacttttgagcctagttagttcatgattggacaatatttgtcaaatacaaacgagattgggactattcacattttgcaaaaaaattttggaactaaacaaggcctttttccatcgagtttccgtttcttgacgcccgacttcactctgtccatgactctgtgtgccaggacacttcctgttttaggccttgtttagttccgaaaagatttcggatttcggtactgtagcattttcgtttgtttgtgacaaatattatccaattatggactaactaggatcaaaagattcgtctcgcgatttccagctaaactgtgtaattagtttttgctttcgtctatatttaatgcttcatgcatgtgccgcaagattcgatgtgacggagaatcttgaaaactttttgctttttggggtgaactaaacaaggccttatcttcttttttcctcgatcaatacattttacacagcaaatcccttgtcatccttttctctcaatacaactgtcattctttcatgggacgaaagaaaatgttctttcccactaaggctttgtttagttccgaaaatttttgggaaatggacactgtagcactttcgtttgtatttgacaaatattgtccaatcatggattaactagactcaaaagattcgtctcgtccatttcgaccaaactgtgcaattagtttttattttcgtctatatttaatactccatgcatgcgtctaaagattcgatgtgacggggaatgtgaaaaattttgcaaaattttctgggaagtaaacaaggcctaagaaaacacaacaa

SEQ ID NO: 3566 - DNA, 8544 bp, Sorghum bicolor
aaaggtccaaaacgtggtccgactgcacgcaggccgcaatgggcgtatttgtggccgggcggacatctcgcggcaggctcacccgcgataccatgggccaaggcctgtcctgaaagcaatcttagagccaaaatatccaaatcacctgattacatttgagattacacggcggggactaccagaattccttagtattattatcagccattttagctacatagtttctgcgatgtatcaaaatgtatatctaagtgtatacttatatattttaaaaaaaatcaaagtaacttataatttagattatggattcttttggttggcattcaggcttaatatatcataaaataattattaaaaaataatgggaagaattacaagtgaagataatggtcagaaaaatatgacttagaaaatgaatggattgtaggctaaatttgccgtaactgaggcaccctctatcataaattaatcattttggcttttctaggtatatagcttttgctaacctataaattagaacgatgggagtatatacaacctgtttgcttgagcttatcagctgaatctgttagtcattcagcagtatttttttctcacaacaaatcagcgaacagtactttctgtcatggcttggtaaatataacttagtcgtttggccacggggcatggactcactatttgcctaactcttcctaaggtttcgtgatggattttctttttacagaagtgcggcaagactaaccttaatatacttaggttaaaaaaaatacatggcaagtatagttgcaaccaaaacatgcccttcggtttagtcatctcttttgctaattccctcctgtctcctgtctttttcagaatttttttcctgtgtgtttacttggcatgcaattattgcacataagccataccattctttcaatcatactatcagctaatatgcctctcccgccaccgaaaagccaaacggctctttatcttccatgccccgtgttccatattccgtagtctgggtccatacaccagcgtgacactactctatatgttagacgcttcatgcttgtgtgttttgatccgcttgaccgatcaatcgctgaaagctactctaataaatttcagcattctaaacgaggagtgtgtgggtagcacaccgaaggcacctattatttatgaacacttttgtgccaaatgttaacgtgcggttaatgttgatatgttggcattatcattaagtatcctgtaaattgttggtgactagtactccattcatctcaaaaagatgtacatatcttgttatttgaaaagtcaattaatcttaagtttaaccaaatatataaaaaagacactaatatttattatgctgaatagatataattagattaattaattacaaaatatatttctatagtaaatctattcagatatataaatattgttgctacttttaatcaatacacatagttgaactcaattagttgattcctcaaaaaatgagatgtgtattattgtttcttgaggagtacttgctctatcctaaaataattatcattcttgtttctcgaggaatcaaataattttaactagaagcgaatatataaagtaaaatatcaatttatactatacaattagtatcattggatagattttcgaatctattttcataataaaatcatttgaaaatataaataatgttaatatttttctacaaatctagtcaaaattaaaaaaaaaataaccgacatgaatgtaaggtgacatttattttgaatcggagggagtctatgacatagagataatgctcatactagcaaaacattccttgtgccggtttatgtagaccaggcctagcgaagcttagaactgagatcatctgtgtgtgtgtccacttgtgagaagaaaacatattaataaccaccacctcctctgttctcatctgcccgcggttggtccacctcctcccctcctctggcctctgcgggcgcgctctcctcccgctcccggccatgtcgtcgccgccggaggatgtcacggtgggcatggaggaggagcagcggcccctgaaccgggcactgctccaccggagcgccaccaacaacacctcccaggtggccatggtcggctccaatccttgccctatcgagagcctcgactacgagtaagcaaagcaaacgcctctgctccctcccttctttggcattgttcgatccacttggcaaattcagctcattcgcttaagattatctgccgaatctattagtcattcaatatgcgtttcttgctcgagttgtcagtcactcaaacaaaactcatgttatttagtctgcaatatctgcccgatcgatcgatcaatcgatgcatcccttgtttggtgtgtgagtgactgctggattggattggatgacgtatttacaggatgatagagaacgagctgttcgaccagaactggaggacgaggtccaagggcgaccaggtgcggtacgtggtgctcaagtgggccttctgcttcgccatcggcatcctcaccggcaccgtcggcttcgtcatcaacctcgccgtcgagaacgtcgccggcttcaagcaccaggccgtctccgccctcatggactccaccaggtgtgccttgccctgccttttgcccctttcattgtcctatggagtatataccattaccaaaaaggcaaaaaaaaaaagtggatcgatttagaaggcaacaaatggtccttgagttttgtctctacgtactttgtccacgcagtatatgccgacctttatagctgtttcagatctatctgatcatcatgttcctgtggtgcatttgtactgtacgcatgcagctactggacggcgttctgggtgttcgccggcggcaacctggcgctgctgctgctggcgtcgtcgatcacgtcgttcgtgtcgccggcggccggcgggtcggggatcccggaggtcaaggcgtacctcaacggcgtcgacgcgcccaacatcttctccctgcggaccctcgctgtcaaggtgcgtcgtcgtcgtgcgtgtctgttggtgttcctatcctttcctatcctgccaggcctcgccgtcgctttcttgctgcctgcacatggcccccacctcgccgctgccagctcagctgtgtgcacctggattgttcacaaacactaatgactaatgtagcaaggactgacatcagttcctccaagtgcataatggccacgagaaaccgagcaatctgccaaaaaaaaaacaaaaaaacaaacaaagaaaagatcgatgcattgcacgggacagagtagacttctatgcgaagagtttactactgcagttttcgcattattaaatctgggagcatgtctgcatgttcttaccgcaaatactttttctatgatttgttttgatgtcaggggcgccaccaataatgaagggcacgggatttttctatttatgttgtgtggatcatcacgccactcatgtagtagatgtttgctaaggacgtcataggattttgacttcataatataatgtatatttccttctcaaatccgcattatacctcacaacaaagtcgattatattcccgcaaaagtatactcattatatatccatagttttttttaaaagagcgtgaaccatcaagataaaaatgtaaaacttccgtagcgttcacagtccaacattatattatattatgtagtcaaaatcctatgacgtaagaattgacaaatatattgtcacaagggtcagtcaatcctgacgaaatcatttgcatctttagcttacctttatcgttttattagtgacactgactcatttttggctgtttccacccttggatacacaataaaaaaaggagaaagaaggtcgttgtaaatctttgaactttaacctcggtatatatgtttcgtgtactctaaaataaacatatactcgcaaaatatgtccactttaccaactctccctcccggaaagtagaacaaagtactagtctcttttgttcaaatattaatagacattctgtttttctaaacgctaaacggtaaacagtcggtcacctgccgtttagtcattattcgggctaaagtctattaaacgggctaaacggtcaattaaacgggctaaatagattattaaacaaaaacggtgtaccactgtgtaacgtttatacggtgtttaaatggtctaaacgaccgtttaggcgaaccatatttatatatagcatatagtctaaggtctggtttgatagctcttgaggctcaggttttaactccccgtgtatttgtagcaagaaaccatttttcttttttctctcacaaaaggaactaagagttgatgaagcaactattttttgcttcaccgactcctattcctccgcatactatagcaaagagctagagtcttttggagctgtcataaatagggcctaagaatgaattggaattcacttgccatctagttaaagatgagactagtggtttttaaatggctttgagaaatagagaatgtagacataattcaccatttaattggaacatgtgtcgcggcgggatggtggtggcagcggtggcacgtcaagagaaagaagacggcgaagaaaaaatttggagtgctctcggagccaaaacagccgagcaacggatagacatatccttataaaattggcaggagtgaaaatttgtagaaaaatttagtggcactatgcactttcataaattgatttcgagataatgaaatatattcacacattgtcctagagcaaataaagggagtgtttggttgggggtgttaaaatttattaattactgtagtattttcgttttatttggtaatttgtgtccaatcatgcactaattatgtttaaaaaatcgtctcacaaattattctttagctatgtttttaatttcgtaaataatctatatttaataattcatacaagtgtcaaacattcgatgcggtaggcggtaaagtttaccacctcctaccaaacctggtctaaaacaagtactccctccggtccattttatctggcgcaggttagaatgacacggtctcctagattacattttgaccattcatttattttatattatattatttatgcttataaacttataatcattagatagtataattctttacaaatctaattatataaaatttgtgttataacagttaataattattagtctaattaatggtcaaagttttaaaagtttgaatcttggtatatgtgtgcgccagataaaatggaccggagggagtacttcactgatgatcagtgtccaaaatttgccttgaacgaaagttgagctgtgtcttttgcatgtagtactcaaactggtggcactgtacatgctgatgtgcaggtcgtggggaacatcgcgggcgtatcatcgtcgctgcacgtcggcaaggcggggccgatggtccacaccggcgcgtgcatcgccgccatcttcgggcagggaggctcccgcaagtacggcctcacctgccgctggctgcgctacttcaagaacgaccgggaccggcgcgacctggtgaccatcggcgccggcgccggggtggcggcggcgttccgcgcgcccgtcggcggcgtgctgttcgctctcgagtccctctcgtcgtggtggcgcagcgcgctcatctggcgctccttcttcacgacggccgtggtggcggtggtgctccgcctcttcatcgagctgtgcgcgtccgggcggtgcggcatgttcggccgcggcggcctcatcatgtacgacgtgagcaccattttcgacgacctcatgacctaccacctcaaggacatccccaccgtcatcctcatcggcgtcaccggcgccctcctcggcggcctctacaacttcctcatgatcaaggttctccgagtctacaacgccatcaacgagtatgcatgcattctagtgtcgtcctcatgattaatttgttggtcgatcgaatttcgattaactaaggacttgtttagattcaaaaagtttttgaattttaacactatagcattttcgtttttatttgacaaacattgtctaatcatagagtaactaggcttaaaagatttgtctcgcgatttacaggcaaactgtcaaattaatttttatttttgtctatatttaatgctccatgtatatactgcaagattcggtgtgacaagaaatcttgaaaattttttggttttggggtaaactaaacaagccctaaatgtaggagtaatcattaaatttgcaggagaggaggagcgcacaagctgctgttagcggccaccgtctccatggtgacgtcgtgctgcgtgttcggcctgccatggctggcgccgtgccggccgtgcccgacgacggggccgctagcgtcgccggacgggacgtgccacgcgctgaaccgtttccggcggttccactgcccggcggggcactacaacgacctcgccagcctgttcctcaacatcaacgacgacgccatccgcaacctctacaccacgggcaccaacgacgtgtaccacccggcgtccatggccatcttcttcgtggcgtcgtacgcgctcggcgtgctgagctacggcgtggtggcgccgtcgggtctcttcgtccccatcatcctcaccggcgccacctacggccgcctcgtcgccatgctgctcggcggccggtccggcctcgaccacggcctcgtcgccatcctcggctccgcgtccttcctcggcgggacgctccggatgacggtgtccgtgtgcgtcatcatcctcgagctcaccaacaacctgctcctcctcccgctcgtcatgctcgtgctgctcatctccaagacggtcgccgactccttcaactccagcatctacgacctcatcctgcgcctcaagggcctgccgcacctcgacggccacgccgagccgtacatgcggcagctcaccgtcggcgacgtggtggccggcccgctgcggagcttcggcggcgtcgagaaggtcgggagcgtcgtgcacacgctgcggaccacggggcaccacgcgttccccgtcgtcgacgagccgccattctcgccggggccgccggtgctctacggcctggtgctgcgcgcgcacctgctggtgctgctcaagaagagggagttcctggcggcgcccgagcggtgccggaaggagtacgtggccgggaggttccaggcggaggacttcgacaagcgcgggtccgggaagcaggacgccatcgccgacgtggtgctgtcgccggaggagatggagatgtacgtcgaccttcaccccttcaccaacacgtcgccgtacacggtggtcgagaccatgtcgctggcaaaggcgctcgtgctgttccgggaggtcggtctgcgccacctcctcgtcgtgcccaaggcctgcgatgtaagtgccggcgtgccgcacatcctgtcgtttgacttttttgacatcaattttgactactcatcttatttaaaaatttatacaaaatatcatttcttttgtcgtggcttgtttattaatcaaagtttttcaagaatgaccgataaaaaaagtcaaacgtcttataatttgagatggagagagtaccaaacatagccttgttgatttggctgataagacatgataaaaagtactgttggctcatttattatgaaaaaaaaatattatgaattcggctaataagctttcatttttattttgtcatatatattatgtatgtgctcctgacgatatatatatgtttgcagaggtcgccggtggtgggcatcttgacgaggcatgacttcatgccggagcacatcctggggctgcaccctgtgcttctaaaaagcaggtggaagaggctccggtggcagaggggcgccgtggccaagtacttgcgctcgctcattgagtgggtcgccaacagcggatgaatgaagcagatacattgctggcaggatgctgctggcttgtgtagattaaaggagtcattgtgtactgtgtttgtgaaataacagcagctgctgatagcttcatatatatacacatgcatatatgtgcattcaaaattttgtcttcgcttcttcatttatgtttatatattttccttgtgtggaggaagatgagtttgccatattgctttatgtcttctacatttattgagtttgatatatagttttcttgtaggtcgagggtccattactgaagtaagaattaatgttttttttgaattttatagggcgtggtgttgcccaagctctgtttacttaaaaaaaaaaaatcaaccaggagagctgccgattatattgataaagaagaaaccctagattgggtataacagaataacaacaatatatagttgtaacaactacaaacgactatgacaactctaccaacaacagtagtcacaaaatcatacaactaaggccttctttaggtcgtgtttagtttctgaagggaaaaattccgcgacactgtagcactttcgtttggactaactaggctcaaaagatccgtttcgtaaatttcgaccaaactgtgcaatcagtttttattttcgtctatatttaatactccatgcatgcgtc

SEQ ID NO: 3567 - DNA, 5949 bp, Sorghum bicolor
cctatcaaaaatttgtgttctcacataatactatccatttgaaagtataaaacaaaatttgagtcgccacaatctttgaaattgaacttcggccttcaaaatcataagatggtacttttgaatttggatagtttttatataattatgtatatataacaacttcggcaacttgtaaggctatttgtaaggccttgtttagttaactccaaaaaccaaaaagttttcaagattccccgtcacatcgaatcttacagcacatacatgaagtattaaatatagattaaaacaaaaactaattgcacactttatctgtaaattatatgatgaatcttttaattctagttagtctacaattatataatatttatcacaaacaaacgaaagtgctatggtagtgaaattcaaaaaaatttcacatctaaacaaggcctaagtgtagctatgggggtgtgcggctgctgcaccctatgagtgctgaaaaagctgcaaaagcagcggaacaagcccttggaaatgcacgtggatcgtgtatttctcttcattttcatttatttaccatagcattttccgtttgtttttctacaagtctattttacagaactaaaaatgcaagactatcaaagtatgcttgcccacaaattatatgatataggaattgaagtacctagaagaattatatatggtaaaaaaacacgttcataattctttgaaaggcgaaaaatggtagacgagaatagaggcattaaattaaaaagagataaaagaatgaagtaagtttgaaacaataatatactagaaacgcgcatcgtgtacatttgttttttgttttgttttgtttgttacaaacaatggacatgcatatggagaataaacgaaaggaaataattaagaggatatatatggaattgtatatttatttgtttgttattatacaaagagaaatatggttggtcggactaaagtttgtcgttagggtgcagtggcatgcacaagctgtgtaaaaaaacacggttgtcagaaagggcgggcggtttagcagcagaagacaagaagagcagtcaacatatatagagagagagggggaggagatccataatactattaaggggtatttggttttccttcgataaactttactgctcatcacattgaatatttgaacatatatggaatactaaatatagactatttacgagactaaaaacacaataaaaaagtaatttgcgagacgaactttttaagcctaattagtttatgattgaaaaataattttcaaataagacgaaaatactacggtacctattaaattttaccaaccccaaccaaatatcccctaagagcatctccaagagactagctaaaattatattctaaattacaagatttaaccatcgtgtaaaataaaaaactcactcaaagcatagagttccacaacagtctttgtataggatagctagtgaggacgacatgctatatatgacaagcgaaagtttaggaatagcaaacttgctattttagcaaaccagatagcacatccgttggagcttaacttttgctttaaaaatgtaaaaatagcctagacaacatgaatagcatatccgtgggagttgctctaagatctacgactggatctccttcctattcgctcgtaataaactgtatgtaagagaaaaaacatgagctaaaaattctgagatgaaaactgcacgaataatataaataaataaaggaaagaaagaaagaaaaaaaaaaggcaggcgtgtctgtttctcttccggtctcatcgtcatctgaattcatcatatccagcgacatgtattgtagatgtaagagtagtagtatatccatcatctcattctcatctcttgcacttccttccttccgaatcttcaattccttgttccaccccgatcgagcccgaggcgatcgagcagcagcatctcctcctccctccgcttcgcccaaaccctagtagtagtactcgatcagaagagaagacaatggcgccgcagccaccgcttgctcccgccgacggcatcgtcgatcgcgacgtctggctcgcctgcgccgtcccgctctcccgcctccccaccgtcggcgccgaggtctactacttcccgcacggccacgccgagcagtgccccgcgcacctcccggcgccgatccccgcgccgcacctcttcccctgcatcgtcaccaacctcaccctcggcgcggacgacaagaccaacgaggtgttcgccaaaatctccctcagtccaggcccccaccacgcccccgccgccgcttcgtctcttgttggtcccgaccccaccaccaccaccaaggagagcgagagcgacagccccccgcacccgcagccgcaggagctcagctacttcaccaaggagctcacgcagagcgacgccaacaacggcggcggcttctccgtcccgcgctactgcgccgaccacatcttccccacgctcgacttcgacgccgacccgcccgtgcagaacctcgtcatgcgcgacaccaggggcaatccctggcagttccgccacatctaccgcggcacgccgcgccgacacctgctcaccaccggatggagcaggttcgtcaacgccaagctgctcgtcgcgggggacatcgtcgtcttcatgcgccgcacaaacggcgacctcatcgtaggcctgcgacgaacgccaaggtacccgctcgtcttccccggggccgacgccaacgccaacgccaaccaggaccagcagcccccgccccgcaacgcgcgcgcgcgggtgccgccccaggacgtcatggaagccgcgcgcctcgccgccgagggcaggcccttcaccgtcacctacttccccagacaggccgcaggggagttcgtcgtcccgcgcgacgaggtggagcgcgcgctcgccacccgctgggagccaggcacggaggtgcgcatgcaggtcatggaggccgaggacacgcggcgcacagtgtgggccgacggccacgtcaaggcgctccaccaaaacatctggcgagcgctcgaggtctgaattctcgtcttctcgtcttccttccatccatctagttccaattgccattgaccaacctgacgacctgcgtgtcttgtgttcaccggaatcaccgaccgcctatatgctaatgatgctagccttattcaattattaattactacttagtacttattatcaatcaaatcaagtactacaaagctatcattacaacaatcttgacctgtagctttcaagccagtcgctcgtgctaaacagattttgttgttttcgatcagtgtctttttgtattgcgatcgggattccgattgcgttgtgggcctgccggtggttcttctgtcggattggataccttcacatgtctgtttctgtttccactctagtagcctgtactgtagggctgcctttctctgtctgctccagcttgtccatactactgccaagtacgtaggaatactctgctcaattgcaaactgtatattgatcctttaatcttgtcgtgactcgtgatgcctgtcagccttgccacttccggcttcataccggacttctgatttctgaatgcatgcatccggtcttcattccctgtttaatttaatttgttttcctacaagaaaccatgccagtttttgacatgtgcactgcacgtaggcctgtatccctcctgcaaactttagggggaaaaaaaactcggtccctgccaaagaatttgattcttccttatcatcacgcggattcccagcccaatcggctttagccagttcctatgtttgtgctgttgcttccatctgtttgttgaaaatgccagggctaaatatgtttattatactgttttgctatttctttctcttttttttttcgagctgtaactgatttgctatatcttttgctgtgtgggttcagttcaccctcttgtattacagccttattctttttgaactgaatatattattgtcttattattagtaggggaagattatttccttgtcagtcagagctaagggatcggtcttgtttgtttcccattattactgattgcctacttgatcactactgatgtcattaccacttgatacaactgcagatcgactgggatgactcctctccattatcactaaaactgagcagatttgtgaatgcttggcaagtccagcttgttgcataccctcctcttccaaatacagtgaggatttgcgacccaatcgcgcctctttgccctggagatgtctcttatccactgatcggacctgaaagccaggccatggctatgatattggggtcaccgattcctgctggcatgcagggagccaggcacaccggcccttgtgctgcaccctctgaatcctctgcaatgctcacgactcagttgctattccccctaaccaacacggactttcagatgccaccgcgtacaagccccagtgcttcctctgagattctggatcctgaaggtgcttctcctcccaacaactcagtaagcatgcgtccagcagagcttccagtccaagtgaagagcatacagctctttggcgccacaatcacaccccatgttgtgcagagtgctactaatggtgatggtatggctgatggcaatgttggaaaagatttctaatacttgaaggtatggtatgatcttctcaacacccctattggttgttgcaatgaaaaatgcagagagtttaagttgggtcagatacaaggtgaattgggggggagggctcatcaaatgctattacatacagaacctcatatattctgatggatcaaccaaaattaagatttgtttcatcatcatgggctcctgtcaccaccggcagagcctcatggaggcgaccccctttgcttgaatgatagtatgaatagaatgtcgatggctgcgcttcaagttttatggtttgcaaatctggataaatttcaaagaagaacatatagtgtatatggaagcataggaaatttaaatagtgatttttgcaaagacataagaagctgcagaggcaaattgttgttgtgatgaaaaaaacacagtctatctataattgtctaattgaccctgaacttgcaatgtttttgcagatgccggataagactgggagtatcactacctctacatctgggtttctactaccaaagtaccaagtgcctgtctctctggtgcatgcatgcatgcagtttatctgtagctagctttagtaggatgtgggagtattactattgcaaccccagcagcgccttattagttgttagctagagagaggggggtagcacgcatggctgttgtttagtaacatcaccttttgctacctgttacagtggaggtgcgcgcacttcattcgctgtcacttgcatttagattctttttttttctcgatccgtttggattagactaccgttggttggttgattcaattctgggagctggtcgtatcgctttcgtctgctctgctgtactgtaatccattgcttgcaaattgcaattacatcgtgtggaactatatgtgggtttaatttggtaacaatggtatgggtcattggtcctttcccctaaggcaaggctctaatcgtgtggcattaattgtttgtgtggtctggatcagctcatgtgaagtcatgtgcaagtgcaagacactcaccacctcaagcacatgctgccctgcctgcccagccgaatgttttcccagtgcgtgcatgcatgcatctctcccaaaaaaaaaggcagtcaagatgcaacgcatggtctttttcttttatattttagtttgcctttttttgccttgcattgatttgctttatttgatttgctgctcttgaaaaggggcattcaccatatacatgcatgcatcttcttttctgactttaacaatgcaaagcagagtgttgctgcatctgcatggacggacatggtgtgatccagttgctctcatttgtgaatgaattg

SEQ ID NO: 3568 - DNA, 6175 bp, Sorghum bicolor
tccttactatcccagattctcagtgaggattttttttttctagtttcttggccacccagccagacctttaacgctttcgctttttatcggttcagtctctcttctctccatttcagttgttcttttgttttagttgttttttctcatagttgagttgatgggtggctttgtaattatcgatttgtctttgttttctctttcattcaatcatttgtctaataaaatttacggcaaaactatttccatcctattaaaaaaatagaagaaccctccctttcgcccccctagaagcaccatcctgtagaccgaaacaaataaagcaggccacaacatctttgtcactgtgtgtgcgtgagctgatctctgaattgaggaacattgtactttgttggcgcctttgatggcaattgaggaaaattttgatcaaatctccgttgtttgctgcaaaatattgtttccatgtatgtatcaaagttttaaataccgggctattgaaaatagcggcaactttttttcaggagctatgcagctatagcgccgctatggcagatagcgtttttataaaaaaatacatgaaaaacacaagtaatttataaaaacatggtaaatataatttttgatgaataaaaatatattttcataagtccaaataacattacaaaataccaatatgacattacagcatggtttatgaaaactttattgtccaaaatactaaattagttacaaataataaatgataatctagtctaagatggagttgtaagagttagactaagaagatttatcatagcggcgctatagcgcgtaatagcagtgaaatttgttgtaacaaatacactttagcggcgctacgataaaagttatgattgcggaaaaaaatacaaatagcggcaagtttgtgttttttttttggtatgtattgatgatattggcaggattgcaagatctgggaaggcaccatctcagaggagtcacatcacaggtgttcatgcaggtcgcaggaagaatatggatcgggtcttgccgaagccgataatagtgctaaatgttcagtgtctcttttgtgagagtaattagagacggtttgtaatgcgtgagagaattgtggcacagtaactcttcctacgctttaaacgggcaccgttgccttggattctggttctgggggagattcctcctcgcagagatcagaatccggtgctccatctccattgtggttactgctgagggtactcacaatacagattctatcatagagtctaaagttatttattacctcgaacaatatagacttggagtctaaataagacttggagtcttattttttctacctctttcttcaataaatatgctgtcacatcagcaaaataccataaataatatgtaattaattgtcttggactctgtgatagagtcttgcattgggagtgccctgaggccagtctcaatgacctgtttcaatgcactgtttccaaaacaaatctgttgacagagcatcaatgaaacgaacaatgaaacaacctccacaatgcatgagtttcaccttgatgtttcctaggctgggcaaaacatttaattactgcaaaataattggatcacatgcaagatagtgaaacgatttagtcctcagtggggatttcatcctgtttcaccgcgtgggaaacaacgccagcgtacttccttctctcttctcttcgtttcatacaaaaagtgcagttttgctaacatggcgctctaataaatatgcatgatatcttagtgaaacctccactgtgactagcctgaggcaagaagaagaataggaatccataacaagaatggtggtgaacatggtgagggccacaccgtcccgtccttgtggcttgtgccgatcgatgcatttgcacgagcggcaattattcgtacgcttcccaccaaccgcatgcactagctgctgagtcgtcctcgtgtcgtctgtcattaattacctccgcgcattgtttgggcgattcttcccaaacctcgccggctcactcaactcggccaccccctaaacccgtaccgtagcactatttcgacttcgactacggcggcggcggcggtggcgtagaaagaaccaaagaaagctgcgcaggatgcctccttgcgctctcaccgtcgactccctaaatccaaaggtgttgctgcctgcctgcctgccatctctattttggcccccaaatataatgctggccgctctccggccggtctgacgaccacgttcgagtcccccttaatgttatgcttatgcaggtgctggcgctcgcggatcacctcggcggcgacgccattgcccgccgcgcgcaggtacgccattgatccagagatgcaggtgtagtgtagcccggcccggcccgggtttcgtttcgttttgttttctactcctactacctatcgatcaggtatgtggttgtggctgtggctgtggccacataaattacctgataccgtcgtctttcttggtttacagtgcatccaaaatgagatagaaacaaaaccggggtcacaccctttcgacgaggtatgttatttatgatgactggtgagaataatctcatttgtcccttcattcacatgtactgtcttataaccgcaccattttttttttctcgagactgaacttttccatgtcttctgctagataatctattgcagcctcagcaatccacaatccatgggacagcagccaaacaagttcttccgagaggtgcctgattattgttccccgtaattgtactacttactatatacagtatttctcatctcttcatcacaccctcttataaagattttctttttttttttccttttccaggttcttgccttgtgcgactatccccatcttctagaacagagtgaaaccaattccttgttcaggtaaaacatgaacgcagctaataagtatatggtgctggtgcaccagaagttgtatgggattccttgctaatccctgatgttgcagctccgatgcaatagcaagggcacgggagattctagacctctttcctgggagagcaacaggaggatatagtcactgtcaggcatgattctaaaacatcttcagacatgcagaaacaccctcctgttgttttttttggtcatttctataatgcagaattatgctacctccgtcccaaaataactacctttgctggttatccacctggaccaagtaagaaaacagttactttagggtaattgaattttgctaaactgaaatattttgactcatagggtattgaaggtttgcgcaatataatcgctgctggaattgcctctcgagataatttcccatgtgatgcagaggacattttcctgacagatggagcagctccaccggtaccttttcattccatcgtgcagagtgcaggcactttgaatgataattgggagaagcctttttcctctgctagctgttggacatcctgatataatatttgcatttagttacttatacaatgcttgttgttgtgaaaaagaaaataactagcatcagaaacctcaaagcctagatactctattcttgcggtgagcttcttttcttcttcgcagtcaagatggttgtgttgctccttttcgaacaggttcacatgatgatgcacctactgatacgggatcaaaaagatggtatcctctgcccaattccatcacattccttgtacacaagttatatggttctccagggcgctactcttgtatgtactacagttaacagagagagagagagaaaatatccatagcaattactatttcctatgccataccaatttttttttgtgagcaaaacatatctactttatcaggtgccatattaccttgacgaatccagaggctggggagtgagcatatcagatctgaagaagcagctggatggtgcccgatcaatgggtgtcgttgtgaggggacttgtggttataaatccaggcaaccctactggacatgtatatctactgatcactgacttgtgattttggtttctatataacagtccaaatgtgattatgttcttcataggtacttatggaggaaaatcagtgtgaaattgtggatttctgtaggaatgaagaccttgttcttctagcagatgaggtaaagttttgttgtatcttcctagtcgtagcttaattgaatctttgtgtcattttcaattgaatcctgatgaaaccttgttttcaaggtttatcaagaaaatgtttacacagatgaaaagaaatttcactctttcaagaaaatagcacggtccatggggtacggcgaaggagacatatctttagtgtccttccattcgatttctaatggtaattgatattgactacttcctttctttcatattccctactcaatctagctaccattttaaaaaagatgaagcatgaatgaaatttaaaatctcttgttatttaatttgttaggaaattttgccttcaacatcgaaaaccctaggatgataacataaatgtgcatactattacatgaatacagttagctgaactgacaaataagtggtgtactttaagcttttacttcaaatgtgtgtaaatgagtacctatccataaaaaaaatgggaacacagtttgatgaataattgtttcttgtataaattgtttgcgggtagtagtctggactcttggatgatggtgtatcatatactaaaaagttttcatcaatctggaagaaatgattcttttgtggacaggatattatggagaatgtgggagaaggggaggctacatggaagtcacaggctttaattgtgaagtaaagaaacaagtgtacaaagttgcatccctaagctcatgctccaacatcactggccagatcctcatgagcctagtcatgaacccaccacaggtcacaaaatgaaacgtatctccttgtctattgatttgccagctttacgaacaacgataagtcaccttttttcaggttggagatgagtcatacacctcttatcaggcagaaagagatagcatcctgtcatcttttgctcgctgtgcagaggttgttttagtatattttcgattcagtcgtgtcatctctgattttactattgcacagcaacaaaagatgcaacactgaaatcaggggcattgtattcttccactgttgttttaggccatggtgtgcacatttaaccgtctggaaggggttacttgtagcaaggctgaaggagcaatgtttgtattcccttcagttcgtctgccaaagaaggcaattgcagctgctgaggaatgtaacacacagccagatgcattctatgctgtccgccttcttgaaaccacagggatcgttgttgtgcctggttctgtttttggacaagtgagtgctttgcgatcatgtttaaggcacagtgaactgaattgttttattgcagtataaaacaaaattttcatcacatttcttttttggcattctaatatggtattcctctgttatgaactgaagatacatggcacatggcatttcagatgcacagtcctgccacaggaagagaagttaccactaatcatctcccgttttatggcatttcatgaagtgttcatggaagaatttcgcgactaacagtctccaacttctcttttttctatttgtattgtagcataacttattactgtactttggagaaatcctggacttctgtaagtgcatgattcctgtatgaaactgactgagtttttcatttttgttgtgtctgttatagccattttagtccaacataattatttccggcagcccaccattcttatagaatgataaaatcctattgttacagattttcacctggaacacatcgacttttgtttcagtctactataatcccgaggtcgagagaattgatggaagcaagttggaagtcattgtctcagacctaaacaaaaacaaaccaaaatatttttacccaataataatgctacgagagttagagacggaattggccagttgccactgattatctgtcaatgtcacagctgacaactgcacttaatctatgctatgcagcccaaccacaatcgttgccacgcctttcattgacctaaaatccatgtttatttagtacaatatcctccaccaccctcaccactagtggccatttacatgacatcagccccatgattatgattacttgtatcaatggttcctgcaaggcttctc

SEQ ID NO: 3569 - DNA, 3941 bp, Sorghum bicolor
atgaatttcatctccgtttgttgatttacctcctacaactactacaagaatggttagaaaaaatgctttttctgtccatataggactagcaatcattaattgtgatgaattcatctccacttggttgatttacctcctacaactactacaagaatggttagaaaaatgctttctgaccacagaaccttctacaactactacaagaatggttatgaaaaaaagtgctttttctgtccatatagaactatcaataattatttgtgatgaattcatctccacttggttgatttacctctgcaactagtacaagaatgattagaaaaatgatgatattgacatacacccattaaaaatcggctaaatttgttgtggaatacttttcgatattggtgtttcgatattgatggacactacttaacgttgtttttgttagaagatattcttcaattatgaaaattactccttgacactgtgactattaaaataacatttttaagagtgcacggaagagagaagattaaaaactggccgtgaaatgaacaaagggagtatatggtttttttctaaagcattgcttacataatatatgttgcttttaccataatttatggctttgctctaagctatgaatattttacctaaaaagttagccatttactccatttataccaaaaaaaatgctagatgtattagtagttttgttctagtataagacacaatttgtctaattaaataagtttcaaaaaatggatcgagtacataatcaatcttgttcgattaaattcacaataacatacctctttcaggtctgtttggatgcactagctaaatattagttggctaaatttagcttttaggcatccaaacagctccaactaaaagaccacctaaagtttagctaagtttagaccctatttagatttatagaactaacaagtagttgactaatatttagtccctaagtatctaaagaagcagactaattcttagtccagttatggactagttgttagttcactggtttactcataggagttaataggactggttgttagtcatagttcattcaaacaaccccttagctctttcaacctagctataaagccaactaaaatttagttgggtctagctggagaatccaaacactctagataaaagtttagctagaaaacttttagttggctttgcttaaaaaaaacttttagttggctaaagttttacttaaaattttagctagctaaacttagttaggtttattcaaacaagcatttaacattatatttatttgataccatagattctattatacttttctctgaatctgagaaaaaattagaagatttgatttaaaacaaaactaaggtgcttggttggtcatcaaacttttcccttgactcaagttcgacttgttcgtttggctggtaagtcttatttgttttgagagaaaaaacatcgtagactgattgtactttaatacatttacaatagtgggaagtggtccttgattcccctctttttcccccaaaattaccattgtgcaatatttaggccttatttagttccgaattttttttgatttttaggactgtagtactttcgtttttatttgacaaacattgttcgattatagagtaactagacttaaaagattaatctcgcgatttacaggtaaaatgtgcaaatattttttattttcatctatatttagtgttctatgcatgtgccgcaagattcgatgtgacaggaaattttgaaaagtttttggttttttgggtgaactaaaccaggccttacccatttttcattctccaaattttttactgctattatttttttagaaacttttactgctatataaaagtccgagtctggaatcaatgctaatgatcctggcatctgtcacctactacttgggtcgtttgatgtgatgtgacccacactgacacacacgctcccatcaaattctccagcaaccacacccaaaagcccaaagcctgaaggaaacgccagaggagaggagagcagcagcggcagcggcagcggcaggccggcagccgagcgagagcgcccaacccaacacccccaagcaaagatgctgtcgtcttccacctccaccctccgcctccaccaaccaacccgtccccaccgccaccacccgccggccccggccgccgggggcgccacccacctagcctccccgcggcggtggcgcggccacgccccgggggcgtcgtccccgccggcgctccgcgcacgggcccagcgcatccgcgcgctggacgccgcccagccgttcgacttcgagtcccgcgcggcggggctgctggaggagcgtcagcgcctgaagatcgccatcgtcgggttcggcaacttcgggcagttcctggcgcgcaccttcgcgcggcaggggcacacgctgctcgcccactcccgcaccgaccactccgcgctggcgtccacgctgggggcctccttcttcaccgacccgcacgacctgtgcgagtgccacccggacgtggtgctcctcgccacctccatcctctccgcggaggccgtgctccgctcgctgcccgtccaccgtctccgccgcaacacgctcttcgtcgacgtgctctccgtcaaggagttccccaggaacctgctgctcagctcgttaccgcccgacttcgacgtcatctgcacccaccccatgttcgggccggagtcggcgcgcgacggctgggacggccttcccttcgtgttcgacaaggtgcgcgtgggcgactgcccggcccgccgcgcccgcgccgaggcgttcctcaacatcttcgagcgggaagggtgccggatggtggagatgtcgtgcgccgagcacgacgcgcacgccgccgagacccagttcctgacgcacaccgtcgggaggatgctcgccatgctggagctccgctccacgcccatcaacaccaaggggtacgagacgctgctccgcctggtcgacaacacctgcagcgacagcttcgacctctacaacgggctcttcatgtacaacaagaactccaccgagctgctcaaccgcgtcgagtgggccatggactccgtcaagaagaagctcttcgacggcctccacgacgtgctccggaagcagctcttcgaggggtcgccgcacgcccccaatgtctcctcctccaacgtccgcaagtaaccaccgtgcttgctgctcatgtcatgatcgacattgtaccagtctgtatctgtattcttcaccccccaattcagatttgactttgttgagaggggttcgttcccgtactctttcttccttgtcagttctgctgtgttccatttccaagtgagggagaaaaagaaaatcttatctgtggtagcttgacactggaatttgtgatatggtcacgaataaaatgaataaataagcaatctttggcattgatgagtttctgtatctgtattctctcccaattcagatttgactttttgtgattctttctctcgtcttttggaggaggaagaagaacccccaaactcttttgtccttgtcagttctacttcattccatttccaggtgagggagaggaaaaaaaagatattatcttttcttccttgtcagttatactgctttccatttccaagtgagggagagaaaaaaaaatcttatctttggaaatgtggcagcttggcattggaatttgtgatatatggtgacgaaggaaatgaataaagaagcaatctttggcatcgcgagtttctaataccaggagtccaggatgggagaaaatcagaagcaatctcaatacagtagctttgtgcgtctttttcactgaggacgctgggattaggagcaatttccagtcaaaaacaagatggctttcggactctgtgagctcctgtcgtcccaattttctcagtgcgttggttgcgacagcgacctccgaagggcaaaaccc

SEQ ID NO: 3570 - DNA, 6168 bp, Sorghum bicolor
tgatctttggaagatgaacgtacactaggttgggtttggactacttttaccacaacactgaaaaactaaaggagtataattgtctttctctagcaccaactaacagataattaaccagcaatggtacacaagggaaagacaaaatttaaactaattacattagaagaagaacctatagtttttatagcgaataaaaaatagttatagattttgataacatcgaagaaattttctttattggatacatatagcgaagcaatgcaaccattgtttcgacctaccttctcttggttattaactgaacccacatatatcatagtgtttgccacggcttctattttcaaacaatagcaaagaaagagcttcaccaatcagctactctctctccacctgttctataattcttgtcgcttggaagttggaataatggaaatctcaaaaaaaaaaaatccagcttttggctatgattttctactattattaatacaaacagaaatcaatagatatagaatgatatcaaagtgctttgtaagagtagttatctatagtactccttaatctcaaactataagacattttgacttctatagagattcattgtttttattatatatttagatagacataatatatatctaagtgtatagaaaaaaccatgtatctagaaactaaaatctcttataatttagaatggaggtagtacatgatatcttagtacctccatatccaagatgacaagggctatgaaatcagaggaggaagtatacatctatctactccatatcatatctatactttctattaaaatgagaattttccttaccatcaattttttcgcccatacatcactttaatttctcctccatccttttgtacctacagtcctccaagtataagagcaagtacaataacaagtttatatctaagctaatattgatgtggagaagagatgggagcttagtagactctcatgtaagcaataagctatacacagaagcatatacattagtagactcaagtaacaaatattgtgagaagacacctgttgtacaacttaactcctataatttaacttatagccaaacacttagctatattattgaccgtgctctatgagttatgtttggttttactagtattagtatactctccaccgggctagcactagcgaaagaactaaaaagagcatggaagctagtcatgggcccaccagacggggtctctgtcgtgtgggtactacacaagcagtatagcagcactggaggtggcgtccctgtcatcctcttgtgaagacaccgccatgccaagccaaagcctccccgacctgcactgctgccctttcaccaatcacccaccaacccgccgccggtgcgtcccctgcaggctcctcctcctcttcttccatgcaggctcgcacgcacacgtggcacgcccgcgttgccttcctactcccgccgccgaccgcctgtctcttcgtcccagaaggccccctccgccacagccatgtgtgtataaattcgtcgccccctgccgccgcatccatctccatccctgggctggaggctgcaggagagcgcttcgttcccgctgtgccgtgctcgcttcgtcttctccattccaccgccgccgccgccgccgccgccaagaaaacaaggcatgctaaatctggcagcgtaccattattattaggcagccattactcagcactcactcactgctgttagagaggcgtttccaattccaattccatttccatttcgccgcgacgaccggccgggaggatctcgatcgtcggacatcggagaacgaagctagtccaggccgccgccgccgcgcgccggctgttcttggaaacaggccgccgccccggcgtacgtcgtcgcggcgagagtctgctcggagtttcacggtggtttccatttgatcgattcggacacgcatgattgattgatcgcccggctggttggtctgtcgttcgtcgccggcgtgcttctcgtgcaatgagcgacgtctccgtccgctttgtggtggcggtggcggtggcggcggtggccgccatctcgctcgccgccgcggtgtccgccgcgtccgccgctcacgactacggcgacgcgctgcacaagagcctgctctacttcgaggcgcagcggtcggggcgtctaccgtacaaccagcgggtgcggtggcgtggccactcggggctcaccgacgggctggagcaaggcgtggacctggtgggcggctactacgacgccggcgaccacgtgaagttcggcctgcccatggcgttcacggtgacgctcctctcctggggcatgctcgagtacggcggcggcgtggcggacgccggggagctggcgcacgcgctgcaggccatcaagtggggcaccgactacttcgtcaaggcgcacacggcgcccaccgagctgtgggcgcaggtgggcgacggcgactccgaccactactgctggcagcggcccgaggacatgaccacgtcgcggcgggcgtacaaggtggacgcggaacacccgggctccgaggtcgccgccgagaccgccgccgccatggccgccgcgtccgccgtgttccgcgccgccggcgacgcgcactacgcgcacctgctgctccaccacgcgcagcagctgttcgacttcgccgacacctaccggggacgctacgacgacagcgtcgacgtggtcaagagctactacccgtcctccagcggctaccaggacgagctgctgtgggcggcgctctggctgcaccgcgtcaccggccgccgtgactacctccgctacgcgctcgacaacgccgaggcgttcggcggcaccggctgggccgtctccgagttcagctgggacatcaagtacgccggcctccaggttctcgcatcccaggtacgttcagacatttgtgtacaaaaatgtgtgaaaaacacaatatatatatatatatatatatatatatatatatatatatggaattaataatgcacaatttaatcctttttattatctgatgaaggcgtcgtcatgctgtcctcttgttgtgttgtggttgaagcctaacaaaatttaccaccgttgattggggagagtgaaatgtttgcttcaaaaaacagattcttttttgttctttttttttgggggagaaaaaaaaatgtttggcatgcatgcattgcacaaggcagcacaacgtgtgaactaaccaagtgtagtaggtggttaacattctcttttggatggcccacgcttgatggggaaagatgttttaactggaagcctgcaatgcaaagtgagtagcagcagttccatgttccaagatagcatcaagggcaagcctgtttggtgcaaccttcccttttgcttaggctatcttacaagcataggcatatagctctgctcacccattgcttttgcttgtgtttgaatttggtgggtgcacaacatctccacatcaaacaacaacttcatcttgtggaggaatgcatattgtgtagtagtatatatgcggattttagtaatttgcgaggaaagatacgtgtgctgatttggcacatccacatttcctttgggagaaacagaaaccatatagcatcaacagcctatataatatatatacacatggacaaaataatctagctcattaagcagagaatcactgttcataaccatgtggatcacagcacaggagccctcatcaattgtttatgatgagcaagcagatcatatcttccctctacctgttcccttgtcctctgccaaccatttctgtcatttttctctcatgtgttcttggtagcatgcattattctccaacaaaagaaacagactcttttcctaaccttgggaatttatttataaggtgtagtagagtagagtagactgatgacatttttctgagggatagtggactgatgacattattattgggggtcttgtagaaatggactgcattcctaatcctgacaccacactttgaccacagctccttccaatgcttagaatacaagacagacgtctcttaccaatgcaaacatttctttatgcatccacaagcctgcctgtctgtcctctatctcatcatgcttggactgtgatgttgtgaagcaagcaaatcaaccaactctgaagattctagccatcttactgttgatgcacctggacagaagagtcagtgtcattttgaaatctgttagtgaaagcttaacacataaataaatgatctgacagagagataaagagatcaggagcatgagacagatcttgaccatgaaggcagcactagagccaattttaaggtagaacaatggaacatccatcaacacatgggtcattcaactaacagtagttacatgtttggaaaaaggttggaagttgttggatcacaaccagagacctgacaaacggaaccctgaaagaaggatcatgtggctaggatcctaaattttcaagtactagttttacctttcggttaacttattgtatacgaagcctacacagctagttttggatgacactgaaatttggaccgtaacaagacagggggatgtgtcatatagtacatcctaatcctacatggctgctcaacaggcaattctgcattgaatagcttcaagtctcactcctgaagtcaacagtagtatagtgtttggccaaatgtttgactaacaggagctgataataatggagtataacaatctgatttgacgtgtttcagtcagaataatgacagttgcttgaagcatagtgcaggttttttgttttttgtttttttggctttaataagaatatgaaaatacactagaacaaacactgtgctaatatctcttaataaatcaaaataataaagtcgaagtttcagagacatgctgttctgttcctggaaagaaacagcgttttttttttcaagtttcaacagctgctgattttgctgtgcttgcctgtgaatcttacagctgctggtggaggcgaaggagcagcggctgcggctgagcgcggaggaggtggcggtggtggagcagctgcggtccaaggcggagtactacgtgtgctcgtgcatgaaccggaaccccggcggcgcgaagcacaacgccggccgcaccccggcggggctgctcttcatccgcccctggaacaacctccagtacgcctccggcgcggccttcctcctcaccgtctactccgacgtcctctcctccctcgaccagcccctccgctgcggcggctctggcgacgacgacggcgagcccgccgccgccggcgacgccggcgaggtgctggcgttcgccaagtcccaggccgactacatcctgggcacgaacccgatgcgcaccagctacctggtcgggtacggcgcggcgtacccgcggcaggtgcaccaccgcgcggcgtcgagcgcgtcgtacagtcacgaccgggacttcatcggctgcctgcaggggttcgactcgtggtacagcgcgcggcgggagaacccaaacgacctcgtcggcgccgtcgtcggcgggcccaacggcgaggacgtcttcaacgaccagcgcggcgcgtacatgcagaccgaggcctgcacgtacaacacggcgcccatggtcggggtcttctccaagctcatgcagctggaggggcagtcgccgcgcccggcgccggcgccggcggaggatctttgatagaagacgtcgttttccttgaaagatttcaatgacaaatggtgggaaataaacatttcatttcatttaaaaagagtacagggagatgtgatattgattttaggatggatgtgtgtgtatacatgatgattctttttgttaattcctactagagactaccgtaattgtttcatgtttttgcacataacaaaggaatcgaaaagaaggaatataattttcaagtggaccatatatcaatttcaaaaatgaactcggtctatatttgtttgaacaaagtttttttttttggtgactgaattaaatgctacagtaataaaggaggcgtcatcaagaaaagaaccagcaggccaagctctaggctataggccggccccatggaagcccgcgtgtcggggcaacggcccaatattcctgggccggcccactaagagggtggagggctcgaggccatggtgtgtgccgcgtaaccgttgcgctctgcaggagttcgacggaatgcc

SEQ ID NO: 3571 - DNA, 5490 bp, Sorghum bicolor
tagtatgttaggcttggtcaattataaataaggaaaaggtattaataacaatatttatgttatcaaataaatatgatcagattaattataaaatatgtatttttttataataaattaatttgtagttatcaatgttcggccgcgctaaaaagcagccgttgctgctgcagcggctgcaggccctctcacaaaaacaccgtggcaacagctgcaaggggctgacgaactgccctgcgaaggcatcttgtctacaaaaaaacagcacaaattgcaccttgacagcacacagcacagccacataaaacatcatcacctgctgttccttccagaagtccatgcgtaacacaaatttcaccagcatctgccaaacgttccttccgttctttacgccccatctggcagtccagctttctgctcctgagaccgtagggctcgtcctatactcctatggcactgctgtttccatcctaggacagtggaaccgtaggggattttttaatcttttttaatcaatatttaataataacaattgtaaaatagatattgggagaaccgacccctttggtcgtgccagcgcgggtggcacaacggcaccatgctatcgcgcaacatgcactgacacgacaaaggtgtccaccgtggcgtgcaggtttaaccaggtcccacgtgaccggcagtgggtcccaccctaggcatcgactttgtcactccaagtgaggctatgtgctccacttatgaggtgtttggttggaggtgttaaagtttaaccgatactataaaattttcgtcttattttacatttagtgtctaatcatagactagttatgttcaaaagattcgtctcgcaaattactctctagctgtgtttttggtttcgtaaatagtctatatttaataatctatgcatgtgtctaaacatttgatgtgacgagcagtaaactttatcgagagcaaccaaacgggtcttattaacaatttgtttcttcatgtttttggaaacataagtgtccaccagtggcggatttaagattttaatcatgggagtacggataaaaataatatagttcatcaatatagacataatataattagtaaatgataataaaatagttgtaaatatagagtgttgaggctgttgtatgggctgagcagagtagtaattgtatataaaaatatactatatatacatgttattaaagggtatatatattagatgttttttaagaaattttgtagggacagttacatcgccatgctactgctgtagatcggcccgtgtccaccatttcctatggaagcaaattgtattgggcgcaaactgtttcgtatgtaaagaagatttccacgcaaactgttgaacgtgataaaacactaatgcaaatttaagcattgttgacatatagcataacccaccataacgagccacccgctctggcgtgacaaaaaggatcagttctttgcaatatctattttacaatggttattgttaaaatattaattaaaaataaaaaaaatcggaccataggaccccgtcgtcaagcctcgagaacgccgcgagcgagcgacgctaatgcgtcgccgagcccagcccctggactgtcctgaatggctgcatggcgccgccatatggcctccgcagcgtccgcccatttccgagctggccgagcaccgccttggtcttgcattgcactgaccttgccactgacggcagcgtacgcaggtcgcgggcacgtacacggctgctggcataggccgcgacgtcgacgtccgcttgcgcgcgctctgccgccgcgcggcgctcgcgagtcgaccggcgccggccggccgctggtgaatactattattcaagtgggcggcgagcgagcgttataagcttggcgcgacctgggtggccggttcccgcctcgttgatgcctccctccgtgtccttcctccagctccaccttccctttggccggcgccggcgccggcgcgggaacagcagcggcggcggcggcgacatggggtgcgcgcaggggaagccctcgcggggctcgcccgcccgcagcgacggccgcggcgtggaccgcctgaaacgcgacaacgcctacctccccggctccagcgtctcccgcctctccgacccgctcccggccaccgctgccgtggagcgcgctccggctctgcccggcaaagaacacgcccgccgagccgccgccgccgccgccgccgtcccaagggggaagaccccggacgccgacgccgacgccgacgccgcggcacagcagcaggcgtcgtcgtcgtcggcgaccccgtcgccgctcccgccacacccgccgcggcgcgacgacgagctggtggacgggtggccgacgtggctccttgccaacgtgccccgcgaggcgctgcagggcatcgtgcccaagagcgcggacgcctacgacaagatcgagaaggtcgggcagggcacgtacagcaacgtgtacaaggcgcgggagcgcgggacggggcggatcgtggcgctcaagaaggtgcggttcgacacgtccgagtcggagagcgtgcggttcatggcgagggagatccggttcctgcagcggctggaccaccccaacgtgatgaagctggagggcatcgccacctcccggatgcaccgcagcatctacctcgtcttcgacttcatgtactccgacctcgccaggctcgtcctccgctccggcaaccgcctcaccgagccgcaggtatcgtcgtcgtccttcccattcctttttttttctctcattcgcagaccacgcacgacgacgacgacgacgacgatgacggacacctggccataggccatggcggccgtcctcttcagaactcactcgtcactcgtcttggatacgtcgcctgtttctggctggcggtttgtctttccctctttggacccatccaatccatctgaccggccggccaatggccatgttggggcatcttgtgtcagtgaagatcgaacactcggacattccaccgtatggaaatagactttccgaagctacacggccacaatcaaccttgctgtttgtcattgtctgacagtgattgtgtctggcatattgttagcacacatcttggtcacatctatggtctgtggcacacgtgaaccgatcaatttagaggtgtactctagagtctagacctgctctgctggcaatttgttgtcaattctgccaatggaggcagagaaccctggttccggaacagtgtaacgcccaaggcctgaatttcatgaaatttactaccactctgtactttgtataatcaaatgtgcacacagaccagaaataatctaagctaagcatcttgaagttctttttttttaaaaaaaaaatctagcagactagtaaatttgaaacatcttctcttgatggttgccaatgcatggtcggttgcagatcaagtgctacatgcagcagctgctcgcgggtctgcagcactgccacgagcgcggcatcctgcaccgggacatcaagggctccaacctgctcatcgaccgccacggcgtgctcaagatcggcgacttcggcctcgccaactactacggcgccagccgccggcatccgctcaccagccgagtcgtcacgctctggtaccgcgcgcccgagctgctgctaggctccaccagctacggcgtcggcatcgacctgtggagcgcgggttgcctcctcgccgagatgttcttcggcaagcccctcatgcccggcagtggcgaggtgagctgagctgtgctccatctcgttctcgccgtcgtctccatcatgcaaatttcttgagaaatagtggtgggactttgatacttgcaggtggatcagctgctgaagatcttcaggctgtgcgggtcgccgccggacgactactggcggaagatgaagctgtcgccgtcgttcaagccccccaagccgtacaaggccacgacggcggagcggttccgcgacctgccgccgtcgtcgctcggcctgctcgccacgctcctcgcgctcgacccggccgcgcgcggcaccgccggacaggccctgcagaacagcgtgcgtcccctggccctgagtaaccaagcaacctcatttacttttacttcttggcctgctccggtcggttcctgttgctccctgctgacaagcgcttccgccattgctactgcagttcttcagcacgccgccgctgccgtgcgacctctcggcgctccccgtcgtgtacaaggaggaggacgaggtcgacgcgaggaagtgagaaccgtggacctgaagaaccagacaagcacgttttcggagaaggccctttcgttggctgacgggtggtctctgatcttgcgtgcaggccgaggagagcgcgctcgcagagccacaggcggaaggacggcaagcagaaagccgaggaggagaagcagtcggagatcaacagcgggtctcctcctgagaaacaggcgcaggcgcagcccatgcggagtcggccgtcggacattaccatccgtgtaagtcctggccaagatccagtaactaacacaggaaatccaggccaagaatcagctgctgccaatgcttcctccagcgctcacgacgcatcatcagaaaaagccatcgtcggcgcctcatccagcacagtcgcgaaacggttttcgcctagccctgtcgttcaggacgcgagcccggttcagatggtagttcaagatcagaagcagctgccgacagcaaacgcctcccaccactcaggcagcgacgacgacgaggaccacgtcaaccaccacctggttgcggctccggaccacggcgacggagaggaggaggaggaggaggaggaggccggtggcgagccgccgtccggcatcggcagcggcggtggcagcgtgaagcgcgtcggcccggagagcaggtcggctgccttcgtgtcggacttcgaggcggccgccgcggtgctgcgcggatcggacgaattcccttcttccaagcagtacgttcttgtggatcacctgtaggccgcgcggttgttcttctccagttgagcatgagcatcctctgaattgtggagactgatgcatcatatcattacatgtaccaataatcatctcttcagaaatgaagaataattagttttattttattattcattcatccagttcttggttgatccatctttgctggctgctgccaacagcatgcgtcgtttgtgctcaagagcaccatttttcaaagatcaagagtgatatttcgggtttcgcctttccaggagaaataaaccatccgaatccagagaccagcaaggtcgaatttcaaccactgaaatcctccacctccaaaacagcaaacacaaacaaactgtggtggaaaatgaaaagcacaccagatcaaagcaagggcatgacgacacaactttggttcatcaacttgattttgccgacgtaattaatattaaaaggaaaattttctctttttttttcaaattctggtccatcactctctttcaataagtttatcc

SEQ ID NO: 3572 - DNA, 5986 bp, Sorghum bicolor
tgtcgtctcgtctgtccaaatcgtccagcagcgacacttgaactattgaccaagaaccgcctgccgatgattttcatttcctggtctgttggtgctgctgctgctgctgctgcccggttcgtctctcgttgaaacaaaaaacgccaggccgacacgcgtagactcgttcatccaggcggcggctagggctaggcgatcggaggtgatcgttggttgcttgtttctttaagggagaagaagatgatgcctgggatgggctagatgtgtgcttgttagctgaagggggtccatctttgatagcgtcggaacggccgggatgcagcagccagcagtagtacgtcgtcagaattaagagcggggcgcgaggacatacacggccgcaacttggtccatttgcgccaccgccggtcgctgctcgctctccctttctgaaatcttgtgcccaggctgatgacgtgcatgcacttgtgtgcacgaggctcgtcgtcgcctcatcaggggggaggggaacacgtttttttttccccttgaagggatatgtcttcgctctctcacccattggattcgctttaagaagtgtgcaaatacatatctcaaagcagtttcacattgagatgtgtgtttgtacatttttcaaagtaaatctaatggataagagagtgagcgcacatgccctcaagagcaaaataaactttaccgggggaagggggtgtgtgtacagtgcctccccgtgacgagcgactaaaaatcgtctctctgcctttttcccctctctcgtccgtgaaaaaataacacaacgtccggcctgtttcagcttcactctcagctgctgcattgtgtgcgatatccacgagtgaggtgttcgcgaaaatttttatgtttgactattgtagcactttcatttatattcggtagttattgtctaactatggactaaccagactcaacaaattcgtctggcaaattacacataaaccatataattggttattatatgtagtgctttatgtatgtgtctaaaaaattgatataatgaaagatcttaaaaaaatttaggaactaaacaagacctgagttttcaagaaagagctagcagctgcacggctccatggcaatgatcaccgagcaaagcaaagctgccattgtcaccaacgccaccatgagcttctggtgaaaatctgttctgccgtagtaacgaaactttgggaagaagagtcacggattcagacattcagtctccatgtcgtgatcacgagaaagctgcggaaacacggtgctggtcatgtaagtcgtcttttgagtttcagcttgcttgtgcagtcattcaaaaggtttcagcctgtgaattttcagagttttcaagatagctaccttaaacgtttcaaaaaaagaaaaaaaaggaaaaaagatagctaccttaaaagtcaaaaaaggaaaaaaaagattatgtacacagtacactagtaggagtagaagtacttgataattttgaaacaaggaaataccatattacaaactgctgaagaacgtgtgcgtgtgtgtccaatgcaatatagacgacataatccagtggaaaagtattatgattaatatataatactaggatggaaacaacaacatcacttctcgatttagcgtgtggtcccgtctgtttgtttccttctgattctgattttgagaggcaagagagagagagaaaaataaatcagaacttggtaaaagaagagaacggctatgagacagcagtggataatggtacaatgatgcagctcatcgtgcgggaaaatatcattagcgctggcactttgggtgtgcaactgaaaagtattaataaacaatcaattaagccactactaaccaggtgttagcagtagtactagtagtaaagcagtggtacttgcttgagatgcagagctttgcttccctgccttgactgcctttctctctcctctctcttcctctgtctctctatattttgctgccctcatgtcagctgcagcagcagtctgggggaatctgagcctgctgctcacctgagagcctgtggctggggaggcaagcgctgcagaggctgcagagcggtgggagggacgaagacgacgagcctgtcgagcttgtgccgattttgccccccgaatccgtcgttacccctgctttggagggatctgaggctgctgctgcctgccaaagcccagaggtgagtgatcactgaccggatgaattcggcaatcttgtggtgctgctgctgccgtgctgctggttgggttccctttccctgcaagattttctgaggcggagggggcaaaaaaaagaaaaaaaaatcctcccttgcttttctcccctcctctccttccgctgctgcttcttttccccagcctttttcagactctgatcatgatggtggtggtgatggcggctgtgcagcggaaaggaggcttgtcgtgctagtggaggaggaggaggaggaggaggaggaggcgtgaaatttcatccataaaggaggctgtgtcccggttggtgagtggagatcgatcgcgctcaattcccgctgaaatcgcctctccggggtgccgtgggaggtggcctggagatgattactttcgtggactcggcggccatggagcgggagcgggagagtgacaggtgcctggacccgcagctgtggcacgcctgcgccggcggcatggtccagatgccgccggtgcactccaaggtgtactacttcccgcagggccacgcggagcacgcgcagggccccgtcgtcgacctccccgccggccgtgtcccggccctcgtcctctgccgcgtcgccgccgtccgcttcatggccgatccggacaccgacgaggtcttcgccaagatccgcctcgccccggtccggcccaacgagccgggatacgctgctgacgccgacgacgccattggcgccgcggcggcgggcggcggcgcgcaagaggacaagcccgcgtccttcgccaagacgctgacgcagtctgacgccaacaacggcggcggtttctccgtgccacgctactgcgccgagaccatcttcccgcggctggactactccgccgacccgcccgtccagaccgtgctcgccaaggacgtgcacggcgtcgtctggaagttccgccacatctaccgcggcacgcctcggcgccacctgctcaccaccgggtggagcaccttcgtgaaccagaagaagctcgtggccggggactcgattgtcttcatgcggacggagaacggggacctctgcgtcggcatccggcgcgccaagaagggtggcatcggagggcccgagttcctgcaccaccaccagccgcccccgccgccgggcggcggcggctacgccgggttctccatgttcctgagaggaggagaagaggacggcagcaagatgatggccacgggcgcggccacgagggggaataaggtcagggtgcgggtgcggccggaggaggtcgtcgaggccgcgaacctcgccgtgagcgggcagccgttcgaggtggtctactacccgagggcgagcacgccggagttctgcgtcaaggctggcgcggtccgcgccgccatgcgcacccagtggtgcgccgggatgcggttcaagatggccttcgagacggaggactcgtccaggatcagctggttcatgggcactgtctccgccgtgcaggtcgctgaccccatcagatggcccaattcaccctggaggcttcttcaggtaaataaaccaacctccataactgccaatgtgtactctcatctcaaggacggcatctcaaacttcctctcctagctgagcttatcatcacttcaatcaagtttaggaggagcgtacagactacagagtagtttgctgcaatgcatgctgatcacttttttttttttggcaggtggcttgggatgaaccggacttgttacagaacgtgaagagagtgagcccatggctggtcgagcttgtctcaaacatgccggccatccaccacctcacgccgttctcgccgccgccgaggaagaagctgtgtgttccactgtacccggagcttccgctggagggccaccagttcccggcgccgatgttccatggaagccctctcggccgtggtgttggcccgatgtgctatttcccggatggcactcctgcaggcatacagggagccaggcatgctcaatttggcatatctttatcagatctccaccttgacaagctgcagtcgagtctgtcaccgcacgggcttcaccaccaccagctggacggccacggcgtgcagccgaggatcgccgctggcctcatcatcggccacccggcagcagctcgagatgacatctcgtgcttgctcaccattggcaccaccccacagaacaggaaaccatcatcagacgtcaagaaggcggcggcggcggcaccgcaactgatgctctttgggaaaccgattctcactgagcagcagatatctctaggcaatgtcgcgggcttcccggcgccgaagaagagcccttctgatgacgttgccgagaggacggtgagcaactcggacgtctcaagccccgggagcaaccatggtggctcgtccaggtccagtggaggagccccgtcgtgccaggacaacaaggtgcctgatctcgggctggagaccggccactgcaaggtgttcatgcagtcggaggatgttgggcgcacgctcgacctctctgctgttggctcgtacgaggagctctaccagaggctcgccgacatgtttggcatcgacaagactgagctgatgagccatgttttctaccgcgacgacgcttctggagcgctcaaacacaccggcgacaagcctttcaggtccgtatgatttcagattgaagtgttctgttcctgtgtgttcaatcgttgttagatttttctttttggaattgattagatatgccctttgttgcatttgcaaaatacggagtaggactaaaacctttaggaatcgattacaatgcctggatagctacgacctttcaagtttttcctgataatttgcattgcggatatgcatttcatataacctcaacaagctgttcctgaccgtgctaaacctttcgagtttttcatgagcatatagcaaagaacatcgaaacggctgttcctgaccgtgctaaacctttcaatgttcaattcgtactacaacctaactagacacggttatcttgaagtatcaaactctaggtgttctttccttggaagcattcatatggtactttgactttaattgcttcaagccaggactaggacatcttacacccatgtggttggaggagaccctttgattttttttttctttcttaattcccacaccgtccccttcgtgtttgaacagatgacagctattccatagaacagatagggatggttactaatgtacgctcatacctctgaatttgcatgcagtgagttcacgaaaactgcccggaggctgaccatactaacggacgccgagcagcgataacttagcgaggtaggaggaggccggaaagctcttgtcacttgtacagcgggaggagcgcggtggcgatctccaaggaagaatcgccacttccaaagtgctggactgctgatgcaacttcaaagagagagggcagttcagtttgtttttcgtcgattgggatttgggaggcgccccggaacggggccaagtgcgtgcgtgtaatccaggaccaaagatttgtcgccggatttgttggactactagctctagactgctacaccttcttgctgttgtcagttccagtggccattgcagttggctttggtcactgaatgatcatgtgttatgttactacctcttccatgaacccccgttgctttgcaaacgcgattactgaaaagttttggtataattaagggctttttttattagtgttggttggttggttggttgtctgtctgtctgtctgagaagactgagatgctgaagtattctctgttcttgttctgcctctgtctgtt

SEQ ID NO: 3573 - DNA, 6506 bp, Sorghum bicolor
gcttcgagattgtgggcctctatggaagcttgaaccttcattggttgcaacttcctcccgttccaaaataaatagctttatatgatatttaaaatttgtcaaaaaaatatatcattctatattagattgtcttctaatgtggaagctagttatggtgcatgtaaatgctaagtaccaaattcaggcgatatgctctacacaaaggaaagaaaatgagagtatatgcgttctttgtcagcgtgcttaatctgctggcaaatgtatataaagttatttattgtagatggagagagtaagtgctaacaaaacgagaccttcgctaaaaaaggaataatagtggcaaacatatgtacatgtgatgcaaccataagtatatgttatatgtctgcagactacaatttcaatgccctacaacatttatcttgaattgacttttgtgacgctccactatgtcggagtcgattctaactcatacgagcagattatattatcatagtatagctatttgatattataaatccttgtatttattccaatagtttggtcaattttgatatgctttgactctccagaaaaagtgaaacgacttatagtttggaatggaggtagtacatgctttaatattataataaatgcatgtatcattctacaggtgattttagtatttatgtatcttattaggttcttatatttgtattcttttattggtgtggtctaataatatgatgtgcttttatcatctatttgactcttagtatttagtttctccaattggcattttgctcttctggcacataaaacaagcggtctatgggaaattgttagtctaacattgattggtttagtttttacgatgagtgcaaaataaaaatgggcatacggattaatagtttgttcattgtatatgtttgcaaaaacaaggtatgaactccaaatatttatttatttgtctcttgtcccttttacatataactcattgcacggctacattgaccaaacttataatagaatgacttctagcttatgatgcattttttaaattatttttaaatataaactataaaaaaattataatagcttgactcgcttatgatgcatattaatctacatgttatataaactatattaaacttataatagtttaacttaggataaactttaagtcaccaataaaatgaacaataagtttgccacccatcgacgagtgaactcagtaataataaataaaagcatcacctgccatttcaagcaaattaacaaggcgtgactcaccctaaaaaggaataacgtgtgacacattacttcattagtccacatgccaatattttttggtttcaaaaatatatttgaccaccttgatcatcacctcgatgtgtagcactcacaactctcatacgtgtaaaaatatagagtttggaaaggcgtagcatatatataccatgctcagttccacaatgatggtttttatggaacatgctcaacattagaaagatccgttatgagcatgattggtctatgtgtgtcatataacatggttggtctatggcacattagttatgtacaagtctcatggttggtgttttcacctttttggctataccctcacatgaatcccacaagctagaagaccagagtgatatataaaagttagatggcaacctatatcagcgaaaactaagctaattttgaaacatttctcctatattttaagtgctcgaattttaagataatttcagacaacactcttctacctctaactagtacaagtctgtccttatcttcctatagaaaataaaatgaattattaattatctttgtgtcaacacaaatcagattttattgagtattagtgaaaaatctgtaggctcgatcaatggggcctcatttgggtcaaaatccggtggctcaggtcgcccacggtaccactcacggctaccagaacctcaaggattcgtccctcaactcccagttcgtgcctttcaaaaaagaagaagaaaaagaaaaaactcccagtttggcagtttttgcgacggagacaccgaggccagcgccatccacccgctccgcttccggccgccccgccccgccccctccgcttgggcttgatctccccacaaccgcaagcgacgggcgtcatatccactccgctcctgatctctcctctattcttcagtgcagcagcatcagcagcaggccgcccggcccacgcccgcctccgatccgctagctgctccctcgccgtccggagatggcctccgccgccttcgccgtctcctcgccggcggcctccgccgtcgccgcgcgatccaaggcagggcccagcgccgtccccgatcgtcattcagttcctgctcatttgcgcttggtttcagtgggccgggggtctgaacgtctcctgtgctggttttgtttgatggctgcaggtgcttggacgtggagctaatctggggagaaatagaactggctgccgcgtcggtatcacgcggaaggtgaccgccaccgcctgctggcttttctagttgctccagttgattgtcgtagatcctgctgctggtttcgtgaattgcttgggaccttgggtcctgtagcgttagatggccatgggtatggtcgatcatgcatggtctcatggtctgtgattaggagttccatgattagcaaattcaggaattggtattgctagtggcttttgcaaattttggcgtctctatgattgacactgtagttttcttggacaatagatgcatatggtttttgttaacttttggctatggatatccactgggcatctgccttcgcatatgctagagctagacaagcacaaacttcttgctaaccattgatctatcagaattttgtagactcgccatctttgcatggaggacaattatcgctaatatgttactgtgtttctgcatgcaaaaatagcataagttaactaatgaacacagctgtcagggcataggcaaacatgacttttattagggccctcggcccttagaggaactgaggtcattcacatttcataataaacaaaatggtgcaccaagtgctgtaggattattctaggaatagtatattaccaatacctgtattctagtgtgctgataggtacactctagaatttcttatgtcgaaactaagacacatcacaatcaacaggccagctagttatgcaagcattttttttttgctgtcgttaagtatgatgtttagtgtatttgtgccaccttcatttaatgtttgttcctgtctgattctttgacgtctattggtacaatgatgtaattaatttatgcttttagttacatcgttcctttcttaaatgcagaactttggccgtgttatgatggcccttgcagtggatgtttctcgttttgaaggagtgccaatggctcctccagacccaattcttggggtttcagaggcttttaaagcggataaaaatgatctgaagctcaatcttggtgttggtgcctataggacagaagagttgcagccctatgtgctcaatgtagtcaagaaggtgagcctaatcacaagcagatttgcttaacagtcgagcttcctgttttcatgttctcttttgcatgttattataggctgaaaagcttatgttggagaaaggagataacaaagaggtacatcgacgatcacaatgtttcatttctcctgagttttatgctttatatatatatgaagtcactgaaactatggtttgcgctgcagtatcttcccattgaaggtttagccgcgtttaacaaagcaacagcagagctattgcttggagctgataaccctgttattaagcaagggctggtatgtgctatgcagctcttgctgccgttattgtaccagtatattgtattatgcaatgctgaaggcctagaattcagaatttaggttgatctgtttgtacttgtgcagccaaggcatgcacgtcatctatcatactatttcttcttaatgcaaagatgtgcagatctcatgtgtattcgatacaaagggaggtgtttcctatgcttcatttagttaacatctcttcttttgcaggttgctacaattcagtctctctcgggcactggatcactgcgtctcgctgcagcattcatacaaagatacttccctgaagctaaagtaatcatatcatcgcccacctggggtaagtatgttgatgcaactattcttcatgacttgatgtacctatccaaatcatgactctcataagtcttgggctatcattgtttttggtgaaatgtgaagtgtctcagtggcggacttctaatttcactcattctacttgttgacaggtaaccacaagaatatcttcaatgatgctagggtaccttggtcagagtaccggtattatgaccccaagactgttgggttggattttgagggaatgatagctgacattgaggtacttggatgttcgcatttattccactattgttatttttgctatgtatcttccattttatgacctttgttgtgtctaaggagtaatgctttaataaattagtcctgaattcgcctaaagaattttttgttctgaaaatgaacaattcactttcaattgattgattatgcctttatctattcatttcctcttttcacaacaggctgctcctgaaggatcttttgttctgctacatggttgtgctcacaacccaactggaatagacccaactcctgaacagtgggagaaaattgcagatgtcatccaagagaaaaaacatatgcccttctttgatgttgcatatcaggtgatttgttttcgcttgagtaccttttcttctaatcacaatatctcttccactgactggtaggttttccttttagggttttgccagtggaagccttgatgaagatgcattttctgtgaggctttttgttaaacgtggcatggaagtgtttgttgcacaatcttacagcaagaatcttggtctatattctgaaaggattggtgcaataaatgttgtgtgctcagcaccagacattgcagataggtattcttttgtttttttactgattgcttgcgtacaacagtccccctcgatccaatttcattcagtagttgcaactgcttgaacaagcactataggcaacccgtttgttttttttttctctttcattagcaatcaattttttccaatagttgcttcatatacagaattggcaggcaatatagtcttcctattgctgcaatagacttatctctttactgcattccacatcgctttctttcagggtaaagagccagctgaaacgattggcacgacccatgtactcgaacccccctattcatggtgccaggatagttgccaatgttgttggtgatccgactatgtttggtgaatggaaacaagagatggaggaaatggctgggcggatcaagaatgtaagacagaagctctacgatagtttgtctgcgaaggaccagagtggcaaagactggtctttcattctgaggcagattggcatgttctcctacactgggttgaacaaagcacaggtatcactgcttccacttgtgctccattgcagacttacacgctaaattaaagttccaatcacgggttgccctccatttgtcgaaacatttacatatcatctacagaaaaacacaaacccataatttccattctttgtctgcagagtgataacatgacagataaatggcatgtttacatgaccaaggatgggcggatctcattagctgggctgtccctagctaaatgcgattatcttgccgacgccatcatcgattccttccataacgtcaactaggttgaggtacaaatagttgagggtcaactaggctgggatttttgggtccttccagctatacagtttttcctgtgtattccatttggtgtaactttgattaaataaattttgtcaaaactcatgtgcttattttacttgtaaaatcagtacgtggctacaggatcgtaacacttgaatgaaacaatgatattaccgatattaattgccccccatattactcctgcgtgcatactgtttgctcgacggccaactggccggtatgtgctgcagaactcttatcttggagatttcgacagctcggttttttattttagttgggttgagcttgagcttacgtgtttagctatttagcatataccatcagcgaatagtatttttaggccgtgtttagatttttttttttgtattttgctactgtagtacttttgttgtatttgacaattattgtccaatcatggactaactaggcttaaaaaaaagtgtctcacaaattataaataaactatacaattagttaatttttttatctatatttaatattttatgtacattgtaaacttttgcaaatttaaaggcatctaaataaggcctcaatcatggcccagcgaacagcgtggaaggagctgcagatataggccttgtttacttccatctaaaaatccaaaaattttcaagattattcgtcacatcgaatctttatatacatacatggagta

SEQ ID NO: 3574 - DNA, 5464 bp, Sorghum bicolor
tcaagctctagccggcacatacaaaccttttgctctactgttatccttgccgaggtacttctacattttcttaggcgttatattcgaaaccgctaaggtaatttcatattttctttagcgttgttacaaacttccaaggtagcatagatgttattccacatcaccaaggaaaatgcacactttcttgagtgtagttgtaaacgccaagtagtttccattgtgcaaaccctcaagtaaactgctggactcattgcagccttgttagttaaatattgcattttatagacacaaatggtccacatgtttgtggaatagaatacggtttttccttggtgcactaatccaacaaaaggtacgtacaggcctgttcgttggtctgaaaagttaagactgaaattactattggctgatttattgtgagagaaaaacactgctggctgacagatgtttagttagttctaatgttaaaatgcaacatagtctcttggttatgctcacatgagtgtacctactctactttatattgtgcctatgaatagacataatcgctaataagtgcataagacagaaatatatatatttcacaaatcaagttggatgaagacgagcttaatatcaagattgtatagttgatgacatttttatttgaaataactaagtgcccaaaatcatgttctaagttcttagattttctaaatttaagtttttttaatgttgtcgaaacgacttagatggggatatgaccgaaactaaagttacagcactcgaccaaagattttgaagcaggtttcattcttgagctgcaaaactaaatatcacactcctagactctcagaaccattcaaattacctccttgctatgatttcaagggtaatgaagatgtttttgtctttttgaattaaaaacataaatacttcataatgtttttaaaccacaaaaaatgtctccaagctcataaatttttttgagaaaaatcctagaaatatattgggatacaacgtatccaaataaaatatttagagctcgtaaaaatatagctagaagcttctaaaattttcctctaagaaaatagtaaaattatctagaaaatttgcaaaacatattaattagtgtaaacatgtttcgaaaacttccacaataaaaatctaacataatgaggacaaataaattaaacgttaattagtgttgcatctatgatagttgcatctcatatttttttttattataaaaaggtttcaatacacgtttactcatagattcgagattggtttttagtttttcctagatatttcccccattttcaagagctaaatgtaactttagaatcttctagatatacttttatgacctctaatatttggaggattcatcttatcccaatctgtctttatgatcttttttttttggaatttttaaaagtttagaaattttttgcggtttagaaatcttattaagtatttattagattttatattaactaataaagagtgtaaaagcgtttaaaaccacttcaaaccagggggcacatagctaattccaatggttttgaatattcaaggtgcgatgccaggttttagaattggaaattcaggtttaagacttaaatacagcagtcgaacactttctgcaaaatcaaatgatgatgatcgggtgacgtttcgtgatgtcggaacttccacgattacggaaccctctagaacaactatccttgaaaaaaaaaaaagaaaatcaactgcattctgtcaaaggtgctccgattttgcagcagggtggggtcaaatcagaagagacgaaagtggtagaaagcttgagagtttgagaatcaaatcaaatcaactgaatccacttcagcataaatctcatcctccagaaacacgttgctctcgtcgcgagacatcccttgctttctccacgtctccacttcattccattcctccctcccttttctgccatccgtttcctacaaaaccagagctgccgcctgctccacagtctaacacaaaccagagctgctgctgctgccctgtttcttgtccaacagctgctgctgctgcttcacttcctctgcttacacagagcaaccagttgtcagcagcaatgtctgcacccatggtggacgccgattacatggccgagatcgagagggcgcggcgggacctccgcgccctcatctccagcaagaactgcgcgcccatcatactccgcctcgcgtacgacctcatcacaaacatgtgtggcgtggtgtggtctgatttgcttgtaacatcttcttgctgaacatccaatggcttttttttctgatgttgcagatggcatgacgccggcacttacgacgccaagaccaacaccggaggccccaacgggtccataaggctcccacaggagtacagccactcttcaaatgcagggctcaagattgccattgacctgctaggtcagtttttttctagctcctagtagtgaacatatatttggagtcagatacatcaagtggatcaagtcttgatgacaccacacttctgcttcctcctgcgcagagccaataaaacagaagcacaccaagatcacatatgcagacctgtatcaggtactacagtctacagctatgtccccatggactatttatttactcaattgatgcataccatggttaattgaattgtgtttcatcaactagctcaccggagttgtcgccgtcgaagttactggtggaccaaccattgatttcgttcctggcagaaaggttagttagtactgtacaagtggcaacctcagattctatcattactgagtatatatcatcttgtcagagcttcttattctagcttttcatgtctgtaataaccaggattcgtcggcttgtccagaagaaggacgcttgccagatgctagaaaaggttgcttcgtaacacatctttagaagcttctttatatatatatatatatatatatatatatatatatatatatatatatatatatatatatatatatatatatatatatatatatatatatatatatatatataagatacacagaattggtacacacaagagagttttcagcattacaacgtaccttcgatgtttatgggacggatgttccaaattcagctcttctgcattactgaaaaactttcaattcttcttgctcttatctgtcacaaggtgcttcgcatcttagagaagtcttctaccggatgggtttatctgacaaggacattgtggcactctccggcggtcatactctggtacacaagaacatcttttcttgttcatgcattatagcaagcatattttttttcttagagaagggttaacaaatatgaacatggtctcaattagattaacgtggtttagttcctttttatctaaatttgtgccacacaatgcaaatttcagggaagagcacatccagagaggacaggatttgatggcccatggaccaaggaacctctgaaatttgacaactcttattttgtgtaagccttaagctgactatttcaaaaacctaacacacgattattgcctttattttttctcagattattatggttggtaatgtcacacctgtgtatatcacttcacatccaatgatgcagtgagcttctgaaaggcgattctgaagggctcttgaaactccctactgacaaggttcttgtggaagatcctgaattccgtcagtacgtcgaactatatgccaaggtacacaactattcagttaccttcttccattcttgctcgaacagttcctgaaaccttataaaaaaaataccttatcagaaaaaaataatggttcttgaaacagaattcattgttttcatttgatctcgaattgtcaataaaacctaaatcaggtaggcactgacattttctgcattttatttttatcatttctcccttctgaatcatagaactataattacgtgccaaaataaaactataataatccaactacagagtgaagcttcagtgttcgaatcaaggccagcagaaatcgaggggctgattggctctctacccagccttgccaatgcttgccttataaactttagttgcatcaacaaaattttcaagcatttagtttgttagcaaacttagtcaagattcattatgttcagttcatttctggctaatatctagccaaatcatttgagaacaaactggtggacaatatatggtaatgccaaccttttgtatggcttggtgagctaaagttggtgtcaaacaaacaacttagaaatcaataggcctatagcacatgttgtggtaggtttggccctggacgtgctgcatcagcaacctagtcaatacaggattagttgttccatggtttgttcaggtctgcatccaagtaactatcaatctatctgcttaacaaacatgaataaactagcaaactttggaaagcagtccattgactaggctgctgacagcatatccagggccagagccggggcacttgccataaccataacactccttttatatagtagttgaaattaatccttgtttgtccactaatcattttgcctaccttatttgcaggatgaagaagctttctttagggactacgcggagtcacacaagaaactctcagagctaggcttcacaccgcctcgctcttctttcacatgcaaatccggaaataaacaaaagtccctgctggtgcaagctgcagctggggtcgcagttgctgctgcagttgtcgcattggcgtacctgtgcgaatccaacaagaagttcatctaacttatgctcaccattagtacagcaacagtggtggagggttgaaactggaggagtcgaaatatttcagtgctgtccacttgtatttgcaccatgtggctacttattgataataccaagcgtgttatgtgttgtgaagaggtcaaagaatgaaataaagacaaatctaaaaataagagcaaaaaaaaaaaagctctgacttggtgcccagatttacttgttgacttgcttgtgtaaaaaaaaataggaaagccatagattccagccgctgaaaaacccccgaaccctagtttcacctgttaagggatgggatttttactgtgcaggctgggtgggtggctcctctgctggaagtcctaccactaagctacaagctcgtctgcagacttgcttgtgtaagttgtctttgcatctaaaggtgatcttaactagttgttaaatgtggacagaaccataaacaaatttagtttaaattaaccagaaaagataaggtaattttggcaatctttaaacaagaaattcaatttcttagacatggagtccgagagcatccatgttctacacttgaagcatgattagggaaagcagaaaaaggaagttaaggcagagctaccagtactgtgtctgtggagataggacaaagatggagcagacataactctgcggaagatgatcgagtggtacagaaactaaagatggttctcaacgaagg

SEQ ID NO: 3575 - DNA, 9042 bp, Sorghum bicolor
tccttcatcataacatatactatatactactactaataataagaaaataagccacacgttgttgtcaggttaggtcgatccgtaacgactaaagcgtcgatgaataaacaaacaaagtcgcgggcagcatggatcaacgacgccacccccacacctaaaatgaaggcccctggatgatccatcatgtgaaggagcctttgtgaattattatagtcagtgaccaaccatgtggccgatcgatcaatgcaaactgacaatgaagtttgaacaatttgcttaatttttactagctaactagctcggaggaatcatgaagaacttttggccacgcgatggagcgagcaaacaaacagtcgcccgtgcacctctctcgttctctgtccattagaacacacgccagaaggtggtaacgtctctgttaccaggtaatttgtattttaaactctctcctacttaatgaaatacatgcttattaagcgtgctcttaaaaaaaagagaggtttggtgcttggtggtgctggtggtggatgcaaaaggattcaatcgagcgtcgatcagctgaaccggcatgattacggcgagatgcatggtggacagtgcatgccacaatggcgccaaatcggcaataatcgatcgatctccgttcagctcgagtgaattatggaagcaaattaaacaacccgtgcgtggatgatttgtgtaagttaacccgcttaattactgcctgcttcattctgctgcacacctttgttacagcgaaaaagcagaatgtctgcatgaactttgagaagggtggtcgatcggagttaggcaagaggtattgttcgacgcataacttttggagagagacagagacagtgaaggagggaggctagggagagggtgccaaaagatatggtggcatcactttgcgtgtctccatgtgccaaggaacctactattagctcgagcactcggctcaataatgcctggctctctctctctcacgcacgctcactggtcactggacagtggacacagccatgctaacaacttctcgtttgctctgtctgtctccccggacaaacagtctgcaacaactcccaatagcccaataagcacccacgatgaacaacgcacacctaacctaacacgctctggtccaatgatcctctcccaagtcccaactagcttgtcacgtccgctcgggtgtttggctggaaaggtcaatgccgctgctcactctcactgtcttttttttcttcttcttccaaatgtacactctttcaggatttcaggacagtcggatcaagaatttcaggattatttggtcccagctctaccccgaaaccatccccttcctcgtgcctgccagagaagtgcctttcacaacatcaagtaggcaacggcagctagcggtgattatattggaagaaagaaaaaaaaacacggtagggatcggatgcatcgtcgtttcagaagttgaaaccagcgaacagttccaaaaaaaaccccaagacctcctcgcgaccagcgatgacgacggcgactgaggaccacttgccagttgccactcacttgctcaccaggaaattcgccttgcgttggactcaaaggcacacccccctctcctaccttgccaacttaacagcgacaggtgaccaccagactccgtccatacgcgcaagtgcagcactgcaggtctgcagcagctaatatggtggattcagatcgccccaacctggctgacccgccccagctaggtcgctttcaaaagttgggggacgaaattgaagacgaagacactcagcagggcatggatgtaataaaacataagtcagggtggtggtggagtagtggatggggattgttttttatttaaaaaaaatcagcagctgctggagctggaccccgtgactgactgcaacgccactgctgctactgtggtgttgtgctgctgggtgctgggtggtgggattggggaggcctttttataaaccggtaggcatgatgctcttctcattactgacaggcgccagagagaggccacaaggggaaggggaaggggagctcgttgaggaggggaaagaatgcgcgtgggcggcgggcgggacgacgaggaggtgtcccggaagctcaagagcatggacgtcgacaagctggagaacggcggcggcggcggcgaggagagcccgcacccgccgcggcccgccgtcaagtaccatggctggaaggccatgcccttcatcatcggtgcgtgcgccgctggcaatttcctctctctctctcgctcgtgtcgtgtgtggctggcaatggaggtggtggtggtggcgagtgaaactgaattgcgcgcggctgcttgcccacgcatccatcctacgcgcagggaacgagacgttcgagaagctggggacgctgggcacgtcggcgaacctgctggtgtacctgacgcaggtgttccacatgcggagcgtggacgcggccacgctgctcaacgggctcaacggcaccaccagcctcgcccccatcatcggcgccttcctctccgacgcctacctcggccgctacctcgcgctcgccatcgcctccgtcgcctccctcatcgtaagcaccaccgcaatctcctccaccggcccctcgctcctatatatatatatatatatatattttttaccttattattacttcatttgcgacgtccgtcgtccttgccgccggcccgagccaggcaggccggccggcggcgagtcggatttcgggagaggggtgggcgggtggttggaattctgcgggcgcgcgggtggttgacgggttcatcagattcagcttttgcgatgacacggtgggggttggtggtggctgtctgtcctcccagctcgccacgagttggactcgctctcgagctgttcttcctttgtttctccctccctctctctccatccgctggatttggacaagatgatgggcggcacatgggacgagcgcgcacgtgcacgctcgctcactggctagtgatcgcttctcgagagaatttcttcctctctctctctctctccactccagcacgaatgcgccatgtagtacgtgctgtactacgtcggagatctggaagctgagcttgggtgcggtggtggagatgatgatggagtgccgtagttaagtaaacagcacgacgtgcgccacactaatcagctagtgtcagcggcgtcgtcatcgctctcagctgagtttccgggccatttattgatcacaagacttggataccaccaccaccaccaaagctggttgcgcgcagagatgcaggcggttcgaatgtgattttggtttcctttctgaagtgcggtttgagcccaatttcaggcgattctttttaattaacggtgctttgtttagaagatggagggagttcagtcgtcttcagttttgatgaagttgtgtttgacgtgtagagagtgtggacggagcacagctaccaaccatgcgtcttataacggggcaaattggtggttggatattggtggtgttggagagacgagataccccgtccggttttctcgaccgattagtcttcacggattcagctcgcattgtgcacatatttagatatggcgaaaagaccctgtgtcttatcttccaaatatgtatgcatatatggttgttaggaattaggattccgtatgcacatcctgcagaagcttcctttccatgctgcatctttgaaaaaaaaaagaagtgcgcttattgacttgtctgtcattcaacacggtggcagagctcattacaaatgccatcagtgtttgttggcctcggtagctagcctcgcgtgcgtgtccctgcattatcacgcactttgcacttttaattccacaaagtagcatggcaaagtgcccttaattatactccagctagcggcagcgctcatgatgagcgccgcgctaagccgtattgtagtgccctaacccatctgcttttttatcctgtcgatcatcagctgacattacgggtttattcagtaggtacaagctactctataagtacgtatccatgcgcatggccacttgcccagacccaatcagtagcctgctgcagggcatcctaatccacccatgccgcacacttgggcccgttctaaacatgcaaggtcgcaaggagcatgcatgcatgctcagacgacagtcagacctcagagctagatgcccatcgtattaaagaaaaaaaaaacagtctcagctgtgtttcgaaattaagtttgggtggtggtggatcaggatcacctttgcctcggcgtgcctgccgcgaagtggacttgcattgtgccccgtacacacgtctcaccaccagctacccagacttccacgcttcaacccaacgcaacgctggtttctctcatcgatcgatcggcatcactcacgtacccatcgaacatacactgtacagctgcactgcgccgcacaccgtgacgtgcggcacagtttggtgtgggggcggcggtgccgcggcacgtttggaagggtctgggcgcctgcacagcggtcagcggcacaagttccttgcgcttgtcacgcccggcacgcgcggccaaatgacgattccatcccattcgtcgccagcaggcagcagcagcagcagccccttatccgggcaggcaggcggatacgtctcgacgcgaccgccaactaaccgcaccatctctcacagtcacttgtgcggagtacacgggccttgtttagctgtttcgagcatttttgtttgtatttaataattattatataattataaattaaataagttgaaattttttgtcttacaaattaacttttatttttatatatatttaatgctttatacatttatctaaagtttcgtgtaatgagaaatctcaaaattttttgaaaaactaaacaatccctcacacgcgagtcatgaggtggagccatcggagatcgttgaccggtgaaactaagctagctcagccagaatttttaggttaactagtagtaatattttttcttatataataaattagtattaacatcagccctttttacaatcacccgaagctcttgcttcctccgaagtggttgtctgccatgctgacagtgcggggggtacgtcggataggccgaaaacgatggatctggtacccagtacgtgtactcctacatggggcagatcaatcatgccggttccggaccggagccggtgcaatgccggcatccacgtactgtaggtgctagtgtcggtcacggacacgttggtgtcgatcatgggctcatccaccttcatggtgggtgcgcgacggaattccgccacttgggaagtgcacggcacgggtgtgggtgcgctcctgcttcctggccaggtcgtggcccaggtgcatgcccacacggacgggagccgcgcgtttagttacctcgccggccgccggtgcggtgggggccggagatccggtgccctgcccccactgcccacacggccgcgcgcgtggggggcgtcctcagctcgcgccgccggttttgttcgcttgcgagacagacgccccttgtggggggggaacgcggcaccgggaagacacgcacacgcgtggtgccgggcgagcggagcggtggcgtcggagccggggtgggtgggcgctgggctgggctgggcaggatgtgtcggtgggggctcgggcagcggcggctccgtgggaacgcgtgacgggggaatgcttgtgtgggtctggcctctgggttctggaagtctggaccgggcggcggctaggagcagcgcggcgcggccagagcacgtgatgcgggccaccaaaatgatagtgtccggatcccatctcgtaaaaaaaatacacagtgtcgaggtccagactgcggacttcggctgcgagggaaatatacggatttccaactccactgaggacacctatgctatggcggctatgctacgagaacgaagctgctgtgcgtgttctcatgtgggttgtggccgccatgtgcgcccaaatgattcggccaggccaccttatccggagtcgggacatatctctgtctagtcgaagtgaccgccaacaactagctgtagctgcacaatgacagcccgcagccacaagcggagaggcgaggagacggagccggtccggtttgcccgttccattcgtggaccgtgacacagcagagagcagaccatggcaagcgtgcagggctcccccttcactatgacaacagcagccctcgacgtcgcgttcagatctccaccatgacatgacatgagcgaattagatcccataataacgcgaatcttctggtttgcttggccggtgacactttgtcctggtgccggcggcgttgggttgggtcattgcagtggccacggcggagcatgaggtttttgtcgtttcagcatgtggtaatgctacgaggccagagttgggcccgttggggattagcgtgtacggcagaaaggaggagagatccatagtggacatgcccgggcctgggctttacatgtagggagcatgagtgggccatgagcccatgaccaaagactcgtgactctctctctaataataacttttgctaaaaaaaattcggatataacgtaataactgcttcttcgattcgatgcgtacggaaatgattcatcgtgttcaaacttgcgctccctccaactccaatgtacgtacatactactctacaatgtaaatgttggcatgcatgctcactcgttggctccatgcatccaccaccagggcatgttcctgctgacgctgacggccggcgcggacagcctgcacccgccggagtgcaacgtgggcgagacctgcgagaaggcgacgtcgtaccagttcgcggtgctcttcatcgccttcgcgttcctggtgctggggtcggcggggatccgcccctgcagcatgcccttcggcgccgaccagttcgaccccaccacggagtccggcaagcgcggcatcaacagcttcttcaactggtactacttcaccttcacggcggccatgatggtctccgccaccgtcatcatctacgtgcagagcaacgtgagctggcccatcgggctgggcatcccgacggcgctcatgttcctggcctgcgtgctcttcttcatgggcacgcgcctctacgtgcgtgtgacgcccgaggggagccccttcaccagcgtcgtccaggtgctgtcggccgcgctcaagaagcggtcgctgaagcagcccaaggacccgaagcaggacctcttcgacccgccgcacaccagcgccatcgtcaccaagctcgcgcacacggaccagttccgatgcctcgacaaggcggccatcgtggcgtcccaggacgaggtgcgccccggcggcgccgcgcctgccgacccatggaggctctgcagcgtacagcaggtggaggaggtcaagtgcctcatccgcatcgtgcccgtctggtccacggggatcatctactacgtcgccgtggtgcagcagtccacgtacgtggtgctctcggcgctgcagtccgaccgccacctcggccgcggcggcttccagatccccgccgcgtcgttcaccgtcttcgccatgctcgcgcagacgctgtggatcccattctacgaccgtctcctgctgcccaagctccgcaagataacgggcaaggaggaggggttcacgctgctccagcgccagggcatcggcatcgcgctctccaccgtggccatggtcatctcggcaatcgtcgaggaccggcgccgtgccatcgcactgagccagccgacgctgggaaccaccatcaccggcggggcgatctcggccatgtccagcctgtggatggtgccgcagctcatgatcctggggctgtcggaggcattcaacctcatcagccagatcgagttctactacaaggagatcccggagcacatgcgcagcgtggcaggggcgctcgccttctgcaacctggcgctcggcaactacctcagcggcttcctggtgaccatcgtgcaccggaccacggggtccgggcagaactggctggcgcaagacctcaacaagggccgcctcgacctcttctactggaccatcgccggcatcggcgtctttaacctcatctacttcgtcatctgcgccaggtggtacaggttcaagggggccagcaactaaatccgccgaggtgaccgtcgtctcacgatcacgacttcacgggtgcagacatgaattagctctgagctctatgtggtcctgatggcaatttggttggtggcttgggtaattatgctatggccttgggagagcaggagaaaaagggaccttagaataaggtcatgataattattttgtgtttaccgtagtagttgtttgatatcggcgcctctcttttttttgtttattattactttatatttttgttactggtcctttcatttgaatctataggatgatcaagtggctgatgaaagaggagaaagaaacaaaagagttggtttcttgtaacttgtaagttgttaaactgaaatacaaatggatgtaagattgaatgagttttagttcagttaccagcttatgattgcaagcatttgctcctacgacatgtcttcacacttctgtgacgctgacctggataaacgaatgccttcaaagttcacttccggatggtcttcatgccgtacctggtcatcgttcagcaattcagctacaatatacagtactagcttcgtacgcagaggcaacaaagataaaattgaccctaggatgtttttaccttggctggaagaaatattattcccaccgcaaataaaacctctccggcgactcctagctggtagttgcatcctatttggggttagatgcagataaacatcgcacgtcgacaatgtaactcctgcaaacaacttttgaatattttcgataatagaccaccttcacagcatatgtacattacaacattgttaaaggagaacgatgtgagacaagaatacacagctacttctcctatctcaacagggtgacgcatttcaatgacaccccactgtttatgttgtacacacgcacacctatctagaaaagaaagaaaaaactgaagg

SEQ ID NO: 3576 - DNA, 5043 bp, Sorghum bicolor; identical to SEQ ID NO: 3526

SEQ ID NO: 3577 - DNA, 5948 bp, Sorghum bicolor
ttggaccaactcctagtgatgcattgcattgtacccgcctgaacatcacgccaaagacaaatgaagataaaacaaacaaacaaacaaacaaaactgatggatggctagttggctactgatcacagatgtgctactgtgcccttaatcggtgccctgaattcctgtgatcgctatcttttcaaggcaagcaacacaggtgtatgtgcagtttggtgaggagcacacagaacagaacagactaggcatacgcatgtgtaggaggggggctaccatccatgactccaggagcaggcaggcatcaggcacggccgcgacaggggcagggcaccaccttcctttgtgaaacgcatatgttctgtgggcacacaagcgggcacagatgcaatgacgcatcaccatggccttgtttagtttctgaacgaaaacatttcgtgacactgtagcactttcgtttgtttgtggtaataattgttcaactatggaataactaggctcaaaagattcgtctcgtcaatttcgaccaaactgtgcaattagtttttattttcgtctatatttagtattctatgcatgcgtctaaagattcgatgtgacggggaatcttgaaaaattttgcgttttttgggtggaagtaaacaaggcccatgtccagccacttttgccaaggcgagggcgctgcgctggccatgggtcacaagcacgcagtgcaggagatggcagatgcaaggtgacgagtgacctcttttctgcggcttgctctgtctgcgctcacacgcatgcctggcccaggagcaacggtgcaccgcagtgcgcgggtgaacttgagctccctggagtgataatagtgtggaacgcgggccctgcgtttgttgtcggcgccttgacacgccaggtctggattgcagtagcgtgcggtgcgcaccttgttgccgacttgccgggagggtttcaggactcgagggaggaggaggaggaggaccggacgggtcggaggaggacacgcgccggccggccggccgcccacccgccgcgctgcgaccaggtggattcgattgggatcggcatcaaaacgctcggacgcggacgggacagccgtgaattgcgccggcggcgactcttgtcgtcgtcgacccgtcgtcgccttctcgcgcggaacgccgtgttggctgcctccagccacgcggctccaccctccgtggccaccgccgcgctcgcctcgctgctccgggtcctctcgccgccgaacggcaccacgtaacgctcgccaccgatcgcatgaccgcgtaacgaggatcggatcctcccgtgaacggtacgccgtacgtgctcggcaggatcccccatttcgtcagtggtcagttggccatggggatctgtttgtcccgtgaagaggccgggtagggtagcccgtaaccacatggcggggccgcaagccgcagcagaaacacgaattctgcatttctgctgctgttgctttcgtgattccattccactccgaggatttggccgttggtgctgcacaagtgtacgttcctgctcctgtttagcaacttaacgagatttccgttccgttgcgtgccaagcatcgatcaggagttcaggacataggataggccggacggacaagtgttgcagacacacgtacgcatggttctccacgttgccgtactgtacagggagctgtgtgcagcatgtctgtcttatttaccacataaacaatgacagttttcaggcacttaatttgactgcttactaaattgactaataagaaagaagatataagaacgtatggctcccctccgaactccttactaaattgactattttttttggcgttaaagtaaattgactaataataagtaagttaagagcatctacataccagccgagcaagcaggcgctttggcctcttctcctatgttcctacctctacctcccaagatcaaccttcctctgctctttatatatagccgcacccctcatttcctgctacacccagtgacacaggcacaaaaacactggatttgcgttggctactgcgcgcccaccagcctttctgagctagctaactgttcgttgggtgtcctcccctggaccgcgcgtgaaggagtccagtccactaccccctttcttccacctctgctcgatccatttaggtttcaggccagcagcagagagggttcaggccagcgataagcaaagcacaagttgaagggccggccgtaatccgagatggagcatatcgccaggttcttcttcggagtttctggtcagtgtcatcatcatgccattgctgcctctagctgatggtcttcaattctcttgttcttgtataacacgcacctctctgagctgcggtggtttagtgggttcttcgtctaatctctgttggatctgtttgctagggaatgtcattgcgctcttcctcttcctgtcgcctgtgtaagtttttgattccatgtatctgaatccttctgtttgtcactgtccacgtgaccgcgtccatgcgtaaaaaaatgaaagcagaggagcaactatagtttttttgaagaataggagcaactatagtacttactatatgacaaaaacaagaacaaggggagaatagtggggagagagagagaggttttagcatcttttacgttcaaccctttcttgtgaaactctgaattccattttttttaaaaaaaagcaagcatcttttctccatccggaatgcttcttcttcttcacaaccatgccgcgccttttttcttgcctcatctgcctcggccgtcaggggcagcagagcacaccgcatgtttcatctgacgggtgagaaaatctggcggattctttgcagtgtcaccttctggaggatcatcaggaagcggtcgacggaggacttctccggcgtgccctacaacatgacgctgctcaactgcctcctatcagcttggtaactaactgctctcagagacacacgacctttcgatgagcagttcacatcatttctgttttcttcagtaaattaactcgcagattaaatagagggtctagaaattctttagcaggttcaagttagtatacactatacttttgtagtattgtattcttgtgacatgatacatcatgcagtgcctgtaaaccagcagtaaaaatggcgtgtagacacgtagtttttacatttcagaaatgctgcatggtttgctggcctggatgaagcaaacacttggctcttagcgtcctatagatagagtgatagaatggtcgagggctactcatggacccactcgccagcactgtgacaacgactgcaatgaaagggaaaaggttttattgcactgcaccacacggctcgtgggagcagcctgtcggcaatgccaggatggagatgacatgtgggcctcccggcccttgtacgtgttcgcacatgtagcttcacgttcaagtgtttgtattatttgtggctacaaacaaaaaaggtcttcatgctttttggttatgatgatgatagatgattttggttatgatgatggatgatttggttgcttgggcaagaaaattagaagtgtcccgtttgattttcacgcacccttttgcatgcatgtggtgcagagatcgatgtgctagctcatcaagcatgtggtgaattttgtgtgaaatttatatgcatgcaatatacaggtacggcctgccgttcgtgtccccgaacaacatcctggtgtcgacgatcaacgggacggggtcggtgatcgaggccatctacgtggtgatcttcctcatcttcgcggtggaccggcgcgccaggctccgcatgctgggcctcctcagcatcgtcgtctccatcttcgccaccgtggtgctcgtctcgctgctggcactccatggcaacgcccgcaaggtcttctgcggcctcgccgccaccatcttctccatctgcatgtacgcatcgccgctctccatcatggtaagcaagcaacgatcgatgctttgcattgctgggtataagctagctccggtcccccttgtgagcgcgcgttgtctttgctatccacgacatcagttaattataaaaagcatgtgctgtgcttgatgtgtgtgtgcagaggttggtgatcaagacgaagagcgtggagtacatgccgttcttgctctccctggccgtgttcctgtgcggcacctcctggttcatctacggcctcctcggccgcgaccccttcatcattgtacgtactaggcttctctgcctctgatcctttatcgttagcactctgacgacgaggatggatgatggatcctatccgctgcacgtgctgcgcgcctgtcgtccgatgggtacttggaaaaacgactgcagtactatactgcactgcaccgtagctgttgccattgaacgcgtctggccagtatagtaccacgggccggcgtcggttgccctttcggtgtcccgcccaaccaggcgcacatgcctgccgatgcacgggcatgggcgccagtagcgtgggcgtggccacccacaggcagaggcagcgcaggcacagcgcacgccggcgctgccgatgggccgccgtgcccctgtgcatggaccaggcagaggaacagcgccgcgctcttttcttgtcgcaatggtagcaaacaaactgcactccacttcagtacaccaacgcgacaaactatacaatgaaatatcttaggccaagtttaatttccatttttttcatcatgaaatcatgtcagtttcctgtagtccaaaatttgccgttattaacgcagccactgtcgctacaaccgcgctgtcgtctgtgcgtgcgtgcagatcccgaatgggtgcgggagcttcctgggcctggtgcagctcatcctgtacttcatctaccgaaaaaacaagggccccgccgtgccggccggcaagggagaggccgctgcagccgcggacgtggaggacgcgaagaaggtggccgctgccgtggagatggccgacgccacgacgaccaacaaggccgccgccgacaccgtcgtcggcgacggcaaggtcgtcgccagccaggtgtaggcggccggctgcacgcgcgcgcgcgtgtgctgatcaagcggtcgaagcttcgctggttgggaggatgaacagcctaaaactgaggctgcctactgaattagtttgccggtgaatcggattggtgttgatttctatgagcttttacggttgtcactctgatctcgatctctctcccggaggctcccttaacaatgtagcttctggaacagagctgtgtcacagagctctcaagttgtgtgtgtctctgcaaagtgtgaatttcttttttgctccacctctttccttctcttgctctctccgactgcttatctgccccagtttaatttctctagaaatgcagtattaaactatctgaggaattgatccaactgctagtaatgtgcgtaagcaatgcatcttttgcgtgctcggtgaaacactgaaccctgagttaaaataattttgtagtgtacttcgagcaagctctttactagctctgtaacggcattaagggcattcacaatgcagactctatcatggagtctaaagctatttattacctcgaataatgtggacttggagtctaaataagacttgaagtcttatttttttacctctttcttcaataaatatggtgccacatcagcaaaatactataaataatatgtaattaattgtcttggactctatgatagagtcttgcattgggagtggcctgagaaaacattttttgttgggcccaaaaatatgagcttccgctaatagaattgtgccgaggcccaaagagcgacggaatcgggcccgaactccatccagaaaaaagaagacgtgggacccacccaaacgcaaaaggcggcaagttaccaggttacgaggatgcaggtctagccactcacccaaactccgaactcccgtgcccgttaacccgttactc

SEQ ID NO: 3578 - DNA, 5973 bp, Sorghum bicolor
ctcatttatataaaaaataaaaataataaatttaatttgcatatgcaccggtccatgccgctttactttcggacttcggacagccggcgctgacggtaacgaaccgaacgtaacgcccctccgtgagggcgatcggtcggggggcggttctttctggcgccgccggtggccactcaggtgtgacccaacgcaagtactcctaccgacaagttgccgtgctttgacccatgaggcgagtacatgacccatccgcctagcattgggtgctttgcgttcggtcgtagtactcaatctatcccgaattataaaatatataattttttgatattaaatttaatcactcattttatttaaaaaatcatataaaatatcacttattttatcttggctcggtttattaataaaaggttttttaaaaataatttaaatttgactatgttgcataagttttatgaataagacatgtagtcaaaattgatgtcaaaaaaatcaaaaatctcataatttgaaatagagggagtattagataatgctggtttgtacaagtcggggaaacacgtaaaaaataaatattttcacctccatacctatactagaagattgtaaattatgttggactaaagctatttggagaccatcactgtgtttgtaaatcccaaagtttttcaaaagcaataattatagtataaaagtgatgtttcatagcacgtttttgctttctagaatatcattttattttctggatacaaagtaactagcatttttttctcaaaagtgtacttttatttgatggatacaaaaaaatactagctttggtgaatggaaacatcagcgccatttgcctcacggaaatctaatgacaatcggcaaattaatggtataacaaaatatccaaattattcaatctgcataaagattaactttgattcggtttactccagtcatcttttaatttgctcaaatttgtcccttaacaagatttattattttgccccaccatgtttcaagttgatttttaatttcaaatttaatgggttgatagctgacaccacaaaataaataaatccatgaattggctgaatttatcacctcacaaaataaaatacacttttgaatttacaatcaacttgtatttgaagaaacaaaataaaataaataaatcttgttaagcggcaaattggaccgactaaaataaaaggagagtaaaccaaactaatgtttgtttaggagttatccgaagcttgaagagagtactttagatttttccctaaaatataaaagaatcagactgaactttggaaacttgggtgcttatatgtatatattcagttaaattgtcgaacttgatattaggagcaataaacatcaattttgtttgcagcagtcaatgttgaacttcccggatatattagcttcaagtgacctaacaaaactacttattgatctcctagggcaccactatagcgtgttgtattaaacattttctctatcttaatacaaagatacctaaatctttttgcaggatcgagaaaaacaaatttatttatacacagtgtactgcatctttttctcctttaaatactggaacacccaatcgtcacctgaatttcctttcttttcttcagtttctggaatgttctctgaactcaaattacgatttatccaggaccagcttgttctcttgcacgaaatatcctcaggcccagggagtacaaggcttcaccttcacttattaagctttggattcacgcatgctgcatgcaccggcggcgatgtgttgcgcgtggagttttgtccgtcagcggtggccacatggacgacatgggatagctgtcacccatggcccatggggcttggggaagaatggggacccaaatcagaagaagaaaacgaggaggcgcgcatgaaaagtatcccactgcctgtttggttttttttgtttgtctacaatatcatcatctcagtctgaagtctgaataaaacaaaaaacataacagaacagaacagaacagcggcgactctccacggcaatgaagaggtcacctcccctcatcgcagcggctcctcccacccacccaagagctgctcacctcctccgtcctctcgcaccttatcttacttcgtttaatttaaatacccgcgtttcttctcggaaacagcagaggtagattagataccacacagagtcagagagagggagggcgggagcgcgactcggtggggatggctttgctgcagagccagagccgcctgcccggcattggctgcagcagcagcatcgtcttggcaagagcgagggtgcagcagtgtctggcagcggcgtcgcactcacgcgcgcccctcctgcgagctaatggcggcaggaggagcacgacgggcctccccacctcctcctcctcctcctttaaggctggcaatgcgatcagcctcagccggcggagaataagggacctgcgcgtcgtcgcggaggcggccaccgcgggggcggccaaggtggtcacgccggcgtcgtctggcggcgtcagcgtcagcgacgtgctctggccttccgccggtgagtcccagacttcgatttttttttttttttttggccatgggccatagtttattctctttgatccgatctgctgactgggttagtcacaaactattccttgcacatttatttcagaaaaaacaagtagttcttgcgtagtattggcaaagcagcgaagagttttgggctttaagaacaagtttattattacggggcagctaagctaggtcgtctattgcattagtagtcgccatgtacttcttctcgctaggaggggatgagcctattgtaaaatcctaacccccttagtgcgcccgatttgagccacgtcgttgtaaaaactttattttctcgatcaggcacatatagacccgtgtttgatcttaatacaataatgtacaaaccttttgcgagaaaaaaaagaacaagtttaaagagaaaggactcccgtttgatctgttgccctctgcaattaatgttgataccatgcaggagcgttcttggccatggcggtactgggaaaaatggaccagatggtggcgttcaagggagtatccttgacgattgcgccccttggagcagtctgctgcgtgctttttagcgctccaggctcccctgcagccaaggtgcatggtcaacacacattttaaaatatatatatatatattttgaagaaaataacatcttaatatagttccacaatgtttaagttatgacggtaataacgtgggacgaaatggccgctttgggcaccggagatgaaaaatgggtcataggtcacccttttcttttgagaaaaatgtattttcattttttctagtgtttggtatgatgattgatatagacaaattagcctcagacactttctcacatactccctcaatacctataaaggaagtcgttttggacaaggtttatgtcaaacattaggaatataaatcataaataacttttaagttattgagtttaaaaatgtaaaaaacatatgaatagatttgccttaaaaaatactttcataaaaatatacatataccactttttgacaaatatttttaataaaaataagaagtcaaagttagactttaaagaccatgtcctaaacaattttctttataggtatggagcgagtattccttattgaaatgttccattgagtcatttaaatttactgaaaaaaatattagaatggtccacaagcagccacttaggtgtgcatctgattaaccatggtcgatttaagggtaagtgaaattaaacgagaaaaagcaaagatatcattaaccgaagagtggcagtggcagacacaatgaggtggaaaagcaaagcattgagacctccatagttgcagaaacaaaatatccagttaaaaagtactagtatgtagctactattgttagcgtaacactaggaacttagcaacaagggtcaagggcttcatcatttgtcgaactcagctccaagccattccaatgtaaccacaaatttaaatgtttacggagttatctgggctttgtttagttccaaaatttttggtaaaattagtttttattttcgtctatatttaatacttcatacatacctctaaagattcgatgtgacggagaatctgaaaaattttacaaaattttttggaaagtaaacaaggcccaccaaaacagtaaaacaccattgtggcaggcttttttttcgcgatcgggtttgtgcctgtttttcattaagaggaagagcaacaaggtacacaagcctgacacgaccattgtggcaggctttcagttaccttcttccattttgagacgattcaagattgtagaaacctgtagctacttgcttacagcgaatcaaaatctcttgaaatctacctatgataatcaatactaacacagtaacaatttgtaaccgtacaaacttgtagctactctaatggcgaatcaatgaccatacaaacctgtagctactccaatggtgaatcaaaagttctcgtgcttcatctattataattataatcaatactaacacgggtggtaacaacttgcagaaatataatatgttcgtcgcccagattggttgtgcggcttttggcgtattagccctctcgttgtttgggcctggctggttagcaagaggcgcagctctttcagccagcatagcattcatgaccatcacgggtgcctcacatccaccaggtaaaattcccaagacaagaaagtatggttgtattgccccagctatcgctccttatcatttctcatttctgaattcttgcagctgcaagcttgcccctcttgtttatcgatggcccgaagtttcacaatctgcaactttggtacgcgcttttccctggagctgcaggctgcatcgtcctttgcttgattgtaagtaaaccggacctcagaaacggctttctgaaagaacataaagcttagtgcatagaaaatagaacattaacccttatgccacaatatttttgcagcaagaggtggtgctttacctgaagaagaacttcaagttttgactcaagcagcttgactctatgaattcttgtggcagcaattagattaattattcaatcatgcaccataaattacattgcctgcatttacgagaaagttgcgaaaatgaaggtttactgtctcctgtcttggttaaagaagaaagaagactttcctagtttccttgataccttgtgcttatcaaaatgcagaggatacagatgtgtacataccattgtctcatcaaatggagtctgacaaattgtacacagcggattcttgacaattgttttttcaactggtaggatcaaccctgtaatgtaattgtgcaaactgaaaaagccaggaatactttaggataacctctggctatctgaagggagataaaccatttgttctagaacagagttgcagttgcatggacagagcccatagttacagattgctgacacagactcagtacaactccgactaacaaaaaggttaaaattcagaagagtttagtaatggaatgtaagtgcaaggacatgacacacaaaaagagtctttgaaaaacttacagatagtggatatgtgctaaacttatacggaaaactgatgacagttaatagttacatgaatgacactgcactaatccaagactcacctgactaccttataaactaagcagacattttaagaatcaagaaaaaggctacccagttatctacgtcactatacatcccagccatcacccctgctgttaaaagacctcttggaagtcaaattcccaaagattcctgaaaacatagcaaggcatttgctcctaacatggtaatgtgcctgcgtgtttcgactaatggctactcctgagaatttagacatatcaattgcccaagctggttttacatactccactgtgcttgccgagcttgcattcgcaaataagaaatttaggagaacatcctc

SEQ ID NO: 3579 - DNA, 5982 bp, Sorghum bicolor
cagcacaacaaaagaggtgcgttgcgcggcctgcccaaccatctcaggccgtgtttaaatggaaatttttttgcaattttgatattgtagtatttttgtttatatttattaaacattatctaataatagattaattaggtataaaagattaatatcataatttatagataaattatataattagttattttttatttatatttaatactctatgtatatagtgtaagatttgatgtgataaaatatcttataaatttttagaattttaaaggatctaaaccggcccagtcgattgagcgagtacagcggtacactattttcacctacgactcgcggtcgcccataatgcgcagttgtaccgcttcatccttcagcaaaaattataaccaatcttttatacggtgtttggttcgaggagatactccattccagatgagatggttcatcatgaatttattctttattaagcatatgtatttgataaatgaggtggtctatcttcttctcttttgtcgtcaaagtcggtgaatgagttgctttgtccaggtctcggcttggtgtcagggggtgttttaaactttatcgtccattacatccaatgtttggttacatatatggaataataaatatagactatttacgaaaccaaaaacacagctacaaagtaatttgtgagacgaattttttaaacctaattagtctataattaaataataaattcaaattagacgaaaaggctacattacctaataaactttaccaaccccaactaaacacccccttatattgacatcagtggcgaagctagagcaaattagaggatggtgtacttgtcttgtggatgcatagacttgtgctatacgtagtgcatatatggtgaaattttagaaaaaaaaacgctgttattctaaattttaggtggtgcatttgcacccactagctacaagctagcttcacccctgattggcatgggaatagcccccatgatagcttgtacaacataggatactaaatacaacaatatactttttctatatagaatttagaagtcattttagacaatatttgatcaaatattgagagtataaattatcaataacctttagttgttgagtttgcaaatgtaaaaattatatgaatagatttgtcttgaaaaatacttttataaaagtatacatatatcattttctcttaaatatttttataaaaataagtggtcaaagttatgtttttgagaccgtgtcgttattttaaacgacttctaaatccaatacggagcgagcaacttttagaggttataatgcaccatatttcaggacggaaagactatgtacttttaatgatatgacagcgtatttaacaagagagaaaaaataagtttcatctaagcaagtgtttcatccaagtttcattgtcttagtaatgatgcatgaaactatgaactgagtttggcctaacttcatttgagtgtgaaactgtggaagcactgaatcatttgatttacctcagatgtagatgctcacatacataactacacactcacctctatgaacgcacatacatacaccttacccttacgagcactttcaaactcatgtttttttaccatcatgtgcaagaatgttaaaattatgtgtctggctcatcatcctcaatgaactgaccaaatgcacacgatttgactacaatttagaacggtggactgcaattttttctaatatgggttccatcaacaatatactttgtaaatctaagcagccgggtccacttcctcaagtcttggcgattttctgcacaaatggaccgactgcatccttccgtgacggccgaattttgaatgcacgccaccaaaagaggttggaaacgctgactcagcactggagaaaattcaatgaaaaacatattaaattaaagtgaaataacgacaaaagaaaattaaaaaactgatattcacggcggccagtagaccctttttaatagccgacctcaacgtcgagaggaaccccttgttgcagcgccagcgcgagtgcagcacagcaggcacagggaaggggacaaccacgagcgcctaagatcccgtcctccccgtcgagatctttgccgaggcggtgaccgtcgagggatcgccatggcgctgagggcgtcccccgtgtcgcatggcgccgcggcagcgccgctgccgccgttcgcgcggaggaggatggcccgtggggtggtggtggccatggcgtccaccatcaacaggtgagcacaacggatccctcgcctctcgctgtcttcctcgccgtgagatgctttccttcgcggaaatgtgttggttcttgggagccacgatctttggggtaagtgagattcgcgatctgcagtcacttggcccggtggatcgaagcaaatcactggtgaaatttccacctttgcgattgattcatgatctggacggggcagagatgccaccttgcggtctttttttttcacctcccacccccacccccatcgttcttctcgagatccatgattttggaaagatttgtgcctgggttttcgtcatctcgtttatttttcccgtttgtgcttgtgatctggaccgtttgttagtgatccgcccctggtttcgtgatctgagctgctttgcggcggtattggtaccatgcagaaagtagttggctgctgatgtctcaacttgttcaaatctgctgatggcgattgagttgtcgtgaacttaagaaacgattggtttgcattcgttttaatgttacatctgaatttatcaattaagcaactggattttgtcactttcgattggatgacaataaatgtgttattttagagggctatgcagtaagaatttgtccaaatttctgcaatcataacagagcttaagtttgccgcacgaaattaggatcaagaacagtcctgaaacatacatgattataaattgtcgaactgctgcatttggtactatatgaaacagtaagaaagtagtttcattaaaaaaagtcactacctgccatcaaacgtgagaagtggttaataaattgctgatgagtcgataaagatgtattgttaattgtaaggtgccatatatttttcacatgaatttggttaattgtgaactaccatatattgttaatcgtgaagtgccacaaacgtgagaatttggttgtactttagttgatcaaacattgcacttggtacccctgtcttattgtagtatatgttgcaattttaacattagcacttaaactcacccccttagataatacctatgtttggaaaattccagtaatgattattgtgtcagatgcttgccctgtttatggtaaattgtgaaagcctgagacaaactatctatgcaaagatcagaagtccttcctgccatatgtaaataagatgttttgctttgccccatgtggcttatgaattgctaaagagatttcttggttactgtaaatttttggcaagcaatatttggaaatttccagtccagaggttttgttgtagatagtttgttctctaaattttctccaagaaacatgtggaagtttgcagtctagaggttttgtgctatatagtttgttctcttaagtttgctgcaagaaatatgtggttcgtggtagatatttagttgctagttgcatgcattttcttttgttttatctcttatgaatggatcacctgttcaccttgccaactactatcgttactgtgcaatgttccttttccatttttctgattatacttggttgcttttaatagggtcaaaactgtcaaagaaccctatactcctccacgagaggtacatcgccaaattacccattcactaccacctcagaagcgggagatttttgattcacttcaaccttgggccaaggataacctattgaacctactgaagccagttgaaaagtcatggcagccacaggacttcctaccagagccttcttctgatggattttatgatgaagttaaagaactgagggagcgggcaaatgaaatacctgatgagtactttgtttgcttagttggtgatatggttaccgaggaagccttacctacctatcaaacaatgcttaacacccttgatggagtccgggatgaaactggtgcaagtccaaccacgtgggcggtttggacaagggcatggacagctgaagagaatagacatggtgacctccttaataagtatatgtaccttactggacgggttgacatgaaacaaattgagaagaccatacagtatctgattggttccggaatggtaagcagttaagcactactgatatctgtgtttccctttccttccatttataacttccaatgaatcatgaaatcttctatgtttacttttgataattatgtgacaacaaatgttatatacttttatacatgttgaagaattggataaatggagaaaaaataatgatgtggtgtggagtgagctattttggataactcgttgaacatagccataagtgtaatttctattttcatttctttcttatgcaggatcctggaactgagaacaacccatacttgggtttcctttacacatcatttcaagaaagagcaacatttgtatcgcatgggaatactgcaaggcatgccaaggagtatggtgatctcaagctggcccagatatgtggtacaatagcagctgatgaaaagcgccatgaaacagcctacaccaagatagtcgagaagctctttgagattgatcctgattacacagtgcttgcatttgctgacatgatgaggaagaagatcacaatgcctgctcatctcatgtacgatggcaaggatgacaacctgtttgagcacttcagtgcagtggcgcagaggctgggcgtctacactgctaaagattatgctgacatccttgagttcttggtccagaggtggaaagttgcagatctcactgggctgtctggagaagggagaagggcacaggatttcgtctgtaccttggcacctagaatcaggcgattggacgaaagagctcaagcaagggcgaagcaagcaccagttattcctttcagttggatttatgaccgcaaggtgcagctttaatcgagaacactaggcaatgtgggcacttactatatcattttcagtcctggggttctctataagaaacagtctttaggttatttagcagggtaaaattcgactacttatggatctcacttgcgcaaagtatgctatctgttttcgtgcaagttgcaaagtttggattactatgtggtcctggtggagaagacttctgtggggtgcctgctgccagttacgaatggtgactccatcgcaactgagtgaacttgtgttgtattcaaatatgttacaggacttatagtttcaaagtaataactatatggagtttgtatatggacaagcttgctttgatgcatgatgagaatctaaagttagtatttttgtgttggttttctgaattggtctcaacttctgatagtgtgtgcttcattgcctgcccaaattaatgcttaattgtcttcaccatgtttggttggctgcgcaagctgagctttgcatgattatcagccatccgtgtttggttggttgtacaagcgctgctgtagtcacaaagttctaggcgtaagttgttatcctctagttttgatgtttgctcagagccttttatcattatgcacctaaaaaatacaaacatgaatttgtcttcattaaaatcaagcgctattaaaataccaaaactcattagatggcttatgtttgatgccacgcttctcactccccacgcccttctacgcgtgacaccacggtccatcgactggggttcgattcgtggcttgtccttttatttttctcaaaaaaatgaaaaatcatccttctctcacctcacctccactcccggtccgtgactcaccacactttctgatccgcggctagggttcctggtggtgccgctcgttgcccatctctaagccatatggcggacctcgccagtcg

SEQ ID NO: 3580 - DNA, 7020 bp, Sorghum bicolor
ttatttctctgaactatgcatgaaaatttatgtatgaagtagttagtgaaggttatcaaacatttttatcaaaatggcttggctttatcttaatatatttttttaaaaaaatagctttactagtgaaattataccaaataagtttttaatatatgattagataataattattaaatacaaacggaagtgttaagctattttttaatttttttactattaaacagggccttggtatctgtgtgctagatgtagcgtagtaccctgccattttgatgccatggtagaaaatactggttgcactattgaagtctaatagatttggctggtaagtttaaatgaacatactatttgcctatccggaatgttgttcagttgagatgaactcgagagaaaactttacattggtagtagctctcattgagagaataaacaatacgttttgcctgcaaaatttatcgtgtgaagaagacaagcccacaaaatttaacatgggaatgcagaagacgtggtcaaatgtttttctccagaaaacagaactctatagacacccacccaaatttaaaatgagaaggctgaagacagcagggcatgtcattttatctctatacatccaactcactgacatgtgcttctcttctcgtgttgtgatggagttttcgacatcaaaggagtccacgaaatagtatactctcaagtctcaagccagtcttgtttttgaaagacgtataaatggctagagcaagtgaccaacttgtactctaatttacaacaaaattgctcaggcgtatactctctagcgaggcaacagtttttgaatgacataaatggctagagtgagcaacatcattgtactatgtactctaatctctctgtacaataaaattgctgaggtaccaaagtttgaactctggattcgaatgcctccacgacgcagaaaccattgtgtttgtagccgccgcctcatgttcttgttagctcagctgtgagtttggcgccgccagaagtggagcacaaaaacaaggtccgaagtcatcttgaccgctgaaccgccgtggggcgagtcgtcatgcgccgcgccgtcgtgctcgcacagtcgttgtgcactctttgagtgcgcgcgctagtgatccttccacagttccgcctcggccagcgccagcgagtgagccagataaccctaaggccttgtttaatttcaaaaaaaagctttagctaccataatatttttatttggatttaataatcactatttaatcatgaattaattagccttaaagattcatttcataaattataaataaattatgtaattagttattttgttttcgtctatatttaatattctatgtatgcgttcaaagactcgatgtgacgagaaatcttaattttttttgggaaccggacttgtttagatctaaatgtttttttggattttgatactgtagcatttttgtttttatttgacaaacattattcaatcatagagtaactagagttaaaagattcatttcgcgatttacagacaaattgtgtaactagtttttatttttatctatatttaatgcttcatacatgccgcaagatccgaggtgacgggaaaaatcttaaaagttattggtttttaggtgaactaaacaaggcctaaaccaggctttagttgtaaaaaaatttgcaaaatagacactatagcacttccgtttgtatatgatctaatcatggactaattaggctcaaaagatttatcttgtaaattataaataaactatacagttagttattatttatttatatttaatattttatgtatgtgacataagatttaatattatgatgaatcttaaaaaaatttcaaaaattttaggaagtaaataaggccaagtggacaagaagaacaggggcacagaacggaaaaaatatcacctcgggcgaacgggcggagacgtcgagacgagatcacgagacggaaaaaaaaaaccttttctcttctcccactgccaccaacaactttccttcagatccccatcccctcccctctattaaagcgcccgccgcccgccgccagccgccgctccgttctcctcccccaccaatccgcagcgagacgcgcccgagcgagcgagcgagccccgaccccgccgacacgatgaggccgtcgctgctaaagtcctcggccgagctgctccgccgcagccgcggctacgcgtccgcggccaacccggagcggaaggtggccatcctgggcgcggcgggaggcatcgggcagccgctctcgctcctcatgaagctcaacccgcttgtctcctccctctccctctacgatatcgccgggacccccggcgtcgccgccgacgtctcccacatcaactcccccgccctggtacgcctacgcctacgcgcgctcctcttgcttggctcggacggatgggactggactggatccgagctcactggtttccactcgattcctgcaggtgaaggggttcatgggggacgaccagcttggggaggcgctggagggatccgacgtcgtcatcatccccgccggggtacccaggaagcccggcatgaccagggacgacctcttcaacatcaacgccggcatcgttaaggggctctgcactgccatcgccaagcactgccccaacgtaagcgtctcgcgcccttgccactgtagatctgcagcttagggggaagtttcaggattggttgctagatttcgtactctacttttggcaattggaatggccggtgattggatttggtgcagatctagcgtttagtgctgatgctgatctgacgatgtaaagtggcacacgtacccgacaggaaatggagtggattgcccaaaacaaacagaaataccacgtgctatttgccagcctcggtgcttttttttttgacaaccagcctcggtgctttgaaattgccacctgaagtaaagggggctctcagttgctctagagctcacttcacatgcactgggttatacagtagtcatatagacctgtgaacattcccatgcttgcatatgagatgttagatgatattgagtgacatatgcattcttcttccttgtatatgtccagtaaacgttttcatcttggtttgtgtactttattctatcacactgaccatgttgattatatgtctcttaggctcttgttaacatgatcagcaaccctgtcaactccactgtcccgattgcggcggaggttttcaagaaggctggtacttatgataagaagaagctgtttggtgtgactactcttgatgttgttcgtgctaaaactttttatgctggaaaggcgggcgtgcccgttactggtaataatatgatgttttagttggcagttgttgtagacattgagattatgggtcagaattaccttttcatctttcgtaacatgagttattactgtggcctttttcagaggtgaatgttcctgttgtggggggccatgcgggtattactattctgccactcttctcacaggtattgtattcatggaccatgtctgaggttcctgctagagtgtacatgatccctccaaaatgttccaagttagaatataaatagttaatgacaaaataaccttttagcataaacttggcttgtgatgatcaagttgtgtatgaatattgttggcaaaacatgcaagttgattagcgaagagaatgtttgcctagactagtgcaatgattttcatttgtcaattgtataaggactctaaagctatctttggttagtgtttttttattgcataccctttgttttctatgcaagtgatagacatttccattgtcatgctaggtgtatcctatgatgtgcctcatatctctgaaactagcaactcaatcaaaatttctgttttatacaggccactcctgcaagcaattcattgtcccaagaagacattgaggccctcaccaagaggacacaagatggtgggacggaggttgttgaagcaaaggctggaaagggctctgcaacactgtccatggcgtaagtctataaaacttatggactgttgtcagcatgtctattggttgcactatagcatatcctgtctgcttatgatccttttggaattttatacgagtattttcttctgtgctctgcaaccagtcaatcagtagatgcttcttgccttcattggttttctacggaggacttcctctggcataaattagctgctgttgcagtggatgattcttgccttcattgataaattagctgctcatgatcgtccattacatgcttgtgcacagatagtctggtaatgttaagcttatagcttccaatctagttaaatgcacgagaccaaattttactaaatttacaactactgtttcatggttgttcctgtattcattggagtgtatgtctgttgcatcagtttcctgtcagaattgtgtatgacagctatgtaactgtaatgaacatcattagcagtttatggtattctttttacaagtataaatgaattcaacgtgcgaatgtaagagaccttcactgtttttgtagacattgttcgtataggaaaactttgttcattctacttttttagctttctgttattgcattcatgtcaaataccactcaggacattgctattatttggaatgaagcttcttgccaagtgaagggcttgtccatgagcatctgtatgagatcatgtaccttatttttccaactaatttaatgcaatatgagcgaggccctgtctgggggtgggattggatccatattctttaactatacagagcaatcaccctcatcctaaacacccccttgtctggaatttctctgtaacttcaccttagcttccataagtgctctgcttgtatgtactctcctgttttgcaaaatcatcttatcatagtgtctttgtagacaaactctgatacttcaaccttttttttacataaccacattagatttatgctgattttaggtcaaaccctgcaatttgtttgtttatagtgttactcattttctcttttttttcgcagatatgctggtgctgtttttgcagatgcatgcttgaagggtctgaatggagttccggacgttgtagagtgctcttttgtgcaatcaactgtgacagagttgccgttctttgcctccaaggtacttaatgcataactgtctacctaaattttagttatgtatttatcgtatgggcaaagtaaatacatgtggttcttgttacctgcttttatttttctgttgaaagcttgtaatcttttacagtttactgacatttaaattacgatagtataatttgtactgcagttatttctgactccattccaaattgtaagtcagtctgtacatagcttttgctacgcatctagatatatattatgtctagatacatataagagttatgtgtatctagaaaaatcagaacaacttacaatttggaaaggaatgagtatataagtgaaactcttagttctgtgtcctgaattatttgtggttggaggcattaaaagaactttctcattgttcagttttacatttataatactatttatctcgatgggtctggtgtgtcttatggattaatgggactgtagtactgaacctgcgaaccaattacctttttggtgtatttagcatccatgttgcatgttagccatcgggttccatattagcaaagtttgagttaccaggaatctctgaaaagtagcatctcacatgcttttacatgtcatggtttgtcagttggaacttcagttgtctgacactacctctggtcaacattacttacaggacaaatgaattagctttagataatttatcttgatctaaacctcaagtgatcttgactggagggtgtaaaaacaatgtgttctccaataacttgctattgccactgtctttacctatgctagttggacaggttctggtgcagcattgctcttgattttgttagttttttttctttcactatgagatggtcttggagttcaaacattactccctttcatgttacaggtacggcttggcaagaatggagtggaggaagtgcttggtcttggtgagctcaacgacttcgagaagaaggggcttgaaaacctcaagggcgagctcatgtcttccattgagaagggtgtcaagttcgcccacagcaactaggcaacttgctcggcttctaacaattgatatcccttgcattttttgtttgactgcctatttttcctgcccccttatggttggcgcaacgaggctttgtggtccaaaataaaactcagcggaacgaagaaaacatgtaccagaaacagtttacaaacaccggtgttttttgtgctgaactcccagtagttgagccgtgagggaatcgagaacaaactttccactttctcatttccgagcgccttgtctttgattgtattgtatgcatgttttggacccgtgcctcgacgtcttggtagttggcttggcagttggcacacaggaatctaatcactggagctggtagatactggtatgaaagaaaatccaaaactgctgttgtttagattttgcagctattggcgtctgatcagaactgttgagccggacacctctgaggtcccgcactggatcggttgtctggaacgttatatgttgatgattgtgaacggaatacattcagggcataggtgtgggtttctggttggagggtttggaacgagcgattggttggtgcatcgatatagcgaggcatgaaccggcagggatggaggctgagagagtgccggatgctcaagcggctctcccaacgcgctcccaaaaaattagagaaaatatctgttcttttttttttaaaaaaaagaagaagataatgttgcatccaacgtgaaaaacgaatacgaatgtttcccgtttttattggtttcctgcaaaccatcgatgtctccagcacaacacctatacgggcatccaaacccataataatacaaaacctaaaatcagactccaactgatcaacatctataggtaatagaatatcagaatatctctgttgcacg

SEQ ID NO: 3581 - DNA, 3790 bp, Sorghum bicolor
tgcaactatatgttgatttgtccacctcattttttttgtcaaatgcagtcgtttgcacttcccaatcctgttttcctacatatgcagttaccgtgttgacatttgttcattgaaaaaaatcctttataaaaaatctttcgcttgagcttatctgccgaatctaccaaccattcagcagtgtttttctctcacaacaaattagcgaacaatattttcagccatgacttatcagccaagcgaacagagcgtacagatgttggccatttgatcgacacttggggtgaccgggatatgttatcagtatggatgcatcatgcatgcatatatgtaatatgtggtctaaagttgacatttgttttcacaacgttgtttctgagcatatatctttgccttttatgtacatagtcaaaccgccagccaatatatttggtgtgctcctctcatctcttcatgtttattggttgctgcggttagaaaactacctaatatgctacctgttgcatcaactacccgcaccaaattaaaagcgtttccgtgcagcaaagacagagagacaaaacaagaaaggatcaaaaagtagggtgactaaaattacctcgatctaaataatcaaactgttaatttaaagaagaactagaatttgaatgggatttgatcaaatcgtcacgcgtgatcgtaggtgatgatggaattgatttgcactttggagaatggtaaatgcatgtatacagggccgacatatatctcgattgtcttctatgaaatgatacaataatcttgaagatcaccaaacctcgctcttgactaagtgcgagctacacggtaaaggaaaggtaataaactataaagaacttgttgacatcgtcctccaggctcatatacacgtctccaatttgtcccggtcattccctatcgacctcgtcaaatatgttacgtgttcatccatgaacttgcactttgtcagaggattttctaaagcaatacttcacacatcattttctcctaacaactctctgattttgcatatgattatgatagctgctcctgctacggtgctaccaagtctctgggtaacattaggtagatggtgacacacatgcttactgtcgcctctcttaccagttcttcccaggttaggttgattgatcagcacgataacccctagtgatatatagctacttaacttacaatacaaagtgaagtttcctccctcatggattcatggttcaccgtccatggcaagtcgactaaattcagtagggggctaataaaaaccactcctgcttcttctttttttttttaaaaaaaaaaacaagtcgactaaaacacggtttacagcgacataccaacaagttgactaaaacacggtttgcattagcaatttgcatgcatgtgtgcagagatcctgtaaataagtttaatttttgcaggttgcatgagaactgtaaaaaaaaactatttgcgggatcgtgaacagacccagttgcaatcctactctaagtgaattatttgagattgtgaagtgaaagaaatcatttcgaacgacgaattgactattcgtgtgataattctttgattaacttaatagttttatgaaaactaaataaattgataagtcgaagttggagattttcctcttcttgtaggagagcctatgggaaaagtggtgctaaatttgctcccttcgcccattccatatgcgattgcatgcaggtacggtgaaaccaaaacaaagtacttttccatgcttttgagaattagatgtgctcgttttgcagctgttgttgttgggagttgttttaacgatgctgcatggaaggagggtctagcagatattatggaatgccaagattgggtcttactagttgactgggtgcacagagacaatacatccatggcatgcacacgccaccctccaactgccacatcatgccatgcatgcaggctatctcccctgtataaatacagacccagcagcatcgccattcttcatctcctcatcaacagcttcaattctcagcgatcgccatcgacctcgacctcgacctcagctcaagctactatagcaaacctgcagagagatacgataggactgcaggcgatcatggtgtcgacatggctggcaacagtcttggcggcgctcgtcgtcgccacggcggcacacgcggcggcggaactggaggtcggtttctacaagcactcgtgcccaaaggccgaggagatcgtgcgcaacgccgtccgccgcggtatcgcccgtgacgccggcgtcggcgccggactcatccggatgcagttccatgactgcttcgtccggggctgcgacgcctccatcctcatcaactccacgccgggcaacaaggccgagaaggactccgtcgccaacaaccccagcatgcgcggcttcgacgtcgtcgacgacgccaaggccgtcctcgaggcgcactgcccgcgcaccgtctcctgcgccgacatcatcgcgttcgccgcccgcgacggcgcctacctcgccggcggcctcgactacaaggtcccctcgggccgccgtgacggccgcgtgtccaaagaggacgaggtgctcgacaacaatgtccccgccccgtttgacgacgtcgccgagctcatcaagagcttcaagcgcaagggtctcaacgccgacgacatggtcacgctctccggcgcgcacaccattggccgctctcactgctcctccttcacgcagcgcctttacaacttcagcggccagctcgggcggactgacccgtcgcttgaccccacctacgctgagcacctcaagatgcgctgcccatggccgtccagcaacggccagatggacaccacggtggtgccgctcgacccggtcacgccggcgaccttcgacaaccagtactacaagaacgtgctggcgcacaaggtcctgttcgtctccgacaacacgctgctcgacaacccctggacggccggaatggtccacttcaacgccgcagtcgagaaagcatggcaggtcaagttcgccaaggccatggtgaagatgggcaaggtccaggtgctcaccggcgacgagggagagatcagggagaagtgcttcgtcgtcaacccacactactagtcaagtttagctaattaccttgtgtactatgtttgtttatttatttatacgttccacacgtcaatacgtcataagtttgagaatgttttctcttcaagtctgtgaatgaaatcaaacacaagtttgtcaagtaaaattgtgtaatttgcacagcatgaaagaaatttagtgatgacatcctcttatagaaatgtagaagctattttttcccccgcaatcagcagtgtgtctgtacaaaaccgagagttttacgagcttctagcatctgatttcagctcaagtttgatctaattttgtactaacaaaaaagagtgttacactactaaaaaaacttaaccatcgtggccaaaaggcattaaccaaggcggtttttgcaaccgcctcaaatgaaaggtcacattaaatcaatgatttaccgagacggttcaaatgtctgccacgataaataaaataaaaaaagaaaacccgtggataggcccaacgagcccatcaacgggcccgccaagtccattcacacgctgccgctgctcgccggtgccagcatcctcgccgaaccggaatcaagtagctcgccattggatcgggccctcggccaccggatctaggagcaaaggagggaacgggaggagcgctggcagattcggccacccccaccgccgagttgatgcccatgacgccggatct

SEQ ID NO: 3582 - DNA, 6102 bp, Sorghum bicolor
tagcaagagatatatggtcaaaaaaaggctgacttatgattgagaaaaagagggagtaaaagatatttttcgtattcgatctttcaccatatctgatttgtatatctgaccactaaattcgtctagaatatcttttaagaaaatcctccattcgaatttcacatagagtcacgcatgatgaggcatgcggagcatgggatcgtattgtccatttactgttatatagtcaacaaatgttgaagagtggcacaaagatgacgttagaggaagacctttttttagggaaactatgacaatctagctaggttgactgaactttattaggagcatcatatgagaagatcttgaaaatcttagaacatcatatgagaagacgagggagtgtatgaggagaacacaattgcttataaaatggcgagtaaatcttgctaaagaatttacattacgggtggtctagagtaaaggatgaagggcaaatactacaagcaaaaactaagaaatgaagagagggtgaaaggggggaggggcaacgatgttatccttgtcttttggggcatcatatctatgagcccaaactacatagttactagactttgaaaatttggttcgtatgagaaaatcttggggttgttggagaatattatgagaactctagagttaaatcagagccatcttgctacaagttagtgtgatgaacatgaaacaactactagttggtaacacttttttggcactgaaggagtagatgagaacaatgttcttggcacttttatgcctacaagctagtcatattacaatgaaatcgacgggcatttgtgtttcgtccattatgacattgcattgtactaccttcaatcacagataattatcatatagggctaatgaagtcttgaagacttttgaatttgtaatattttcaagtatttttcgatgcaaatagtgtatcatacatgtctcctaactaaaagatacaaccattatttaagatttttccaaatcaaatctcaccatcaatgacgttttttttgtgacatgaggagttatgaattcctattttgaatttgaattgtaaaattcaaataactacacgtctgaattttcgaggagataagctagatttatacaaaaattttatcaaaatctgcatattctaatatatttttacgaaaatatatcttgttataaaaaacaatacatattaacacatcatataggtattagttctcctttatatatttctagttgactccttgaaactttgggttgtgtagtttttttaacaaatagcaaatttattaaatcagcagcacgaggttgcaattaaggtacaaatgtgtagttatttgtaggagaaagatgcactaggtagccctaatgtagagtagccggttaggcaaccagtttcgtcacatccataattctattctactactacatctatggccttgtttagttccgaaaactgaaaagttttcgcaactgtagcactttcgtttgtttgtggtaaatattgtccaatcatagactaactagagtcaaaagattcgtctcgtgatttacagtcaaactgtatgattagtttttgttttcgtctatatttaatgcttcatgcatgtaccgcaagattcgatgtgacagagaatcttgaaaactttttggatttcggggtgaactaaacatggcctatattgaattctgaaacccaagaaagcaaaattgctgcaacaaacaacaagataaaaatctcacccaccattggacccctcaagaacacgccaagagtaaacaactcgatttccatccccaccagcacggacccggcggtggccgtggcccggtggcgcaccaccagtccaccaccccgagcagcagccagccagcgggcgcaggtgaggtgcggcccggccgaagatttggcgcacgcacactcagtccagtccccctagtggctccactgcccgacgaggaattttcacgcgcacgccgcaccgcaccgcaccgcactctccccttcccctccagtctccactgcacacgagacgcgctcggctcggctcggctcggcgcaccaccagcccgtataaatcgacgccgcgagggggacgagcccctaattcaccagggccaggcgcaccgctccgcgccaccgatccattcccccccggtctccctccctccggtgagcggcggcgcgggcgcggccatggaggtgttctactacgtcgtgttcggcgcgctagccgccgtcgtggcggggctagagctcggcaagagcggcaaggaccgcgtcgccaccacctccgccttcaactccttcaagaacaactacgtcctcgtctactccctcatgatgtgtacgcccccctcgttccctctccttcccttgtttagattagatctgcgaatgttgttgtggttctgatggttgcttgttgcccttgcctccaatggcatgggatggattcgtgcagccggggactggctgcagggcccctacgtgtactacctctacagccagtacggcttcgacaagggcgacatcggccgcctcttcatcgccggctttggatcctccatgctcttcggcaccatcgtcggctcgctcgccgacaaacagtacgcccgcccgcccgcccgcctgtcttccccccgcgatttcttttccgtattccagtcccaatccaatgtggcttgccttctcactgacgaatcgcttgtggtgtgcctcctctaggggccgcaagagggcctgcatcacctactgcatcagctacatcctcagctgcatcaccaagcactcccccgagtacagggtcctcatgatcggccgcattctcggcggcatcgccacctccctactcttctccgccttcgagtcctggctcgtcgccgagcacaacaaggtaacccatcgccattgccttgccagttgccccccagatctgcctatcactgtctgtttgtctccatcgctgaattaccgctgctgtctccatcactgaattactgctgctttagaactgctctgcctttgcctttaattcaaaggtttcctttccaagcgcctctatccgtaagccacgtaggagaagatgcatagactaacgcgtatttggaatgtgttgctcttaagttatgccttttcctaatccttgtcgttaataaattaatatagtgggaggacccttagattagattcattcatcacatgcttgtcattgaagctagctaagtgtattggatcttggatgtttgactgctaatgcaataggacacttatataatgagctgactgacttacgattaaaaataatgaacattgaacggacgtagtagtatgatagtttgaagtttcgagaataaaaagatgtccatgttatgtttcactgctaataagcccagtaaaatgtggctttgtcaggatcagaaaagactgagggaaatcttgctggattcaagctgaaatccaccatgttatgttttgtttgatttctgctacttgtgtcggtggatcaggtggttgacacctgacgtggccaagaggacgagcatttaacaagcatggcccagtcctaataaaaagccatcacggatggtcttattgagaattgtccttttattcggccatgtcctggcggcattagtctcattcgcagataataaattatcaatagaatccaaaggatctagtgcagtagctgctgcctgtgatacaaaatgccatgctcttccacttgcggcaaaatctttagtaataccacatgatcttacatttgtgaattctggggatggacattttggtttgtacagacactgaatatttaccttcttttttacacgaacaaggggggaggccctacgctactgaatctgaatatttacctttctttgatcttttgcagagaggctttgacccgcagtggctgtccataacattctccaaagccatcttccttgggaatggcttaattgccattgtatctgggctattcgcgaaccttcttgctgagaacttgggttttggtcctgtggctccatttgatgcggctgcatgctttctagcgattggcatggctatcataatgtcctcatggagtgaaaactatggagatccatctgaaagtaaggacctgatggcccagttcaaggttgcagctaaggcaattgcttcaggtatgcttaacccatctcatcagactgcagagaaccagatatacatatgaaatcattctaacattgtccgctggatcttcagatgagaagattgcattgctgggagcaatacagtcattgtttgagggctcgatgtacacatttgtcttcctatggactccagcattgagtccaaatgaagaagacattcctcatggttttatatttgctacattcatgttgtcatctatgttgggtagctccattgcgtcacgtctattagcccgaaagctcaaggttgaaggttatatgcagattgtgttctcaatatcggctgtcacccttgtcctccctgttgtcaccaacgtaagattgtgctgtcagtcactactccttgggtattctctgcctttgaaacattgctaatgtctatttgctgataatgcccaaacagatcctagtgccgacatcttctgtgaaaggaggcagcatatcagttggaggttctcttcagcttcttggtttctgcacctttgaggcatgtgttggcatattctggccatcaatcatgaagatgagatctcagtacattcccgaggaagcaagaagcacaatcatgaatttcttccgcataccactcaacttatttgtttgtgtggtgctttacaatgtaaggagtcatttcctcatccaactattatggtctcttcaattgagccggcaagaattatacagaaatgtcagcacacaagtaacactttgcctgtggacattgtctttgcaggtgaatgcattccctatcactgtcatgtttgggatgtgttctatcttcctcttcatggcagcgatcttgcagagacggctgatggttgtctctgatctacacaaatcatcaactagtatgtgatatatttcttctattccagcaatcctgtgccaatgaaggcctaaattgttatctctgataaactccactgccctagttcattttcaatgctaaccatagggtaacattcgttgcagaagcacaagaaatgatcgaggaagatgagccactaaatccttaggtgtcgacagaatcatacgttcaaatcagatatgaagacggcatccatactgcaattcattaccacctgcgcaataagatggacgtcagaaccatgtagtagagtccagttgtttttgtttgtaatttcgtttctgtagtgtagatgtgaccaggctgttagtttgcacctcgggtctgcttatatccacagggcaatatatagttcagcaagtattgaactatacctatgtcccgagaagattagatgagttggcgctgttgtttcttgcaattattttgaaaaaatgttggctttaaagtttaaacaatacacggtatatatattcttgaaagtgttatattactgcatttgataacaattctggctgatgtacatgtagcatgagaaaagtgtgttgtgaactagtgtggatatctttgaattgcgtactttatggcggctgctttgatgaccaatgacaatttgtttgagcttaccagccaaatcagtatgaacagcctcacgccgcttatggccattgctccctcgcccatggttacaatgtggttagttagtcctttgtccgatgagatttgagaggaggttgctcatactcccgccgtcgcataacaagtgttgttttagctctaggcacggggattaaagaaaaaagtgcggtgcacccaaggaatcgagaaggaaagagacagagataaggtgccgcgtaacaagtggcgtttagctctaggcacggagattaccgattgaagaaagatgaaaaaggtgtggtgtaccacaggaatcaaaaaaggtgagatagagatatcatatatcggaagaggagaaatgtgcattgagaaatggtaaattggtaatgacatctattttgggacaagtatag

SEQ ID NO: 3583 - DNA, 8094 bp, Sorghum bicolor
  misc_feature (3201)..(3300): n is a, c, g, or t
agatcggtttcgtcaatcatattgtatttttgctgctttgcaggttgtatgcaacctcttgagcatgctagcccctgctagtgtgtggttgaaacacccttcagcggcaacacacttttagcaattagctgacaaagaagaagcaaatcaagaactaatttactgtcaagatggcaagcaaaggtgatgacgagggacaaaaccaatcccttcgatgagggaaatatcatctcttctcgcaatccatggatgagctttccgatcagcctctcggtgaagaagtaactattccggtcttagagcatcttaatacgtagacgtacgttgtgcgtatctgtgtattatactatatattttgtaaaaaaatctttccaaaaactcactttaaattattattcagataatcatttaattaaaaattattaattttcatatatcttcactcgttaacggcttggctatatccagcggcactccataaaagttacttttaattcatttttagctagcgtgaaatttgaaacaaaggacggtagcatttggatttaatttaaaactgttagagagtatttttgtctctcaaaaatatgttttttaataaaagtctctatttgtatcgacgaggaaggatatagtgccactatttctacaggtattgtggtaattacggcgtaaccgagggggtctcgagaaaaatgaaaacgacgggtatcttctccggttgacacttcagacagacgtggccaagattcaccgcgtcaagggtcaaggcatggcgcgtgtgcgcatcgccaccgtcgggggccgcccatgcctgcgccgacgcccgggatgcgggcggaatatattctgggcccccacgcggaaccatccggaggcagacacggatacactacgcctcgatccattgcagctgcaatcttctgctctttcctgtagccgtaggggagcgagccataaaggagactacgcggcggccggcggcggcggcggcggcgacggaagtggggagacagacgggcgcggcggagacggtgagcgagcggggctaggcgacgctccatccagttctcttcttcttgatttcattctgtgagttgaggatgctctctgctctgctcctttccacgattccatcccgtggatttctggccgggctccatttcggttgcttcttgctgagatcaaatgtgttgatataccgcgcagattcattcgtctccttaatttcacttattatccggaaacccgctgctgcggagtgcttgtccacctccaagcccctcttttccttgttatactttcatcttcgtgttctgcgaggacaactcacctatatataagagtactactacttcttgggttgtcatagtagctgtagattttgttgcttcatcgctatgtgctttcaacaatatatatagcatataaacgtatatatataacccatgtatcttggcttcgtataatttactatgactgtgctgctatctgttgccgcttcatacataagattgctttgctttcttagtaaccatcacacaccactcactcatctatgcttatgatagatagtgtgtgtcaagtatatgtatgactaggtaatgtctaattcaataggctgcctgtcgaggtgaatgtgagcttagtctatccttgatcgaaattggatcacacgtgttgtatgtggtttaaaataattctacaatcaaactaatgtgtttgttacaacttctaaagtttaaccaataattaatggcataaaagccttctgcctagcatgaccggttgtcctgttgatcatgttggttacacgttgacatatctgtgatttttttattcatgtgtttcaattgcagaggatattcacaggggttgtggagcttttcaagactcatgtgattgaccttgtccctaatgttctgatcaagagtgttgccatggttgaaaggacgatatagtttcaagattaaaatattgtttggcccaccgttgtgagaatggtctggttgcaagatcaaattgaaatgcacaagctccactggtacaggagagcccctactccatcagagttctggataccacttgctgcttggttcactgttggcctagtcggtctttggacattttttcacttcttttcattgtggcggcgaaagatcagtttaagctggatgaaaataattgccagatcgaagaggaagaattttgaaagaaaccacaaggttcctactgctgaacatgtttggaacacagaatctttgattcgtgcaaaagggatgaagtgctgtgtatgcttggaatctctctcacctgctcagccccttgggcagatgatgacttcagaaaatatggttcaccgttgcaatgtttgtggtgcagctgcgcacataatatgctcttcgaattctcagaaagactgcaaatgcgtctcaatgttcgggtccaaacatgtggtccatcagtggactgtactctggacagacgtaaccgaccaatccgaagaaggtcagtactgttgttactgtgaggagatatgcagtgaatcttttctgggaggtcctcccatatactgctgcatgtggtgccaaagactggtgcatgctgattgccagtcggccatggttactgaaacaggtgacgtttgtgaccttggtcccttcaggcgccttattctgtcaccactttttgtccgggccattagcaaacctggtggcatcttgagttctataactcatggagcaaatgagtttgcatccactgtgcgggggcgtttaaaccgaactaaaaaggagaaacatcatagcagattgccatctgacagtaatgatgattcatcaagtgataccactttgaactcaaaccagagggctggggaattaaaagctactgggggcagtgttcaaaggagtcctgagaatgatcattatagcagtgagagtgatggtagagaattcatatcagagtccagaaggttcagcagcaatgagactggtgaagttaaacttgagtacgtattgtctgaattgcctgctgattccagacctcttttagtttttatcaacaagagaagtggggctcagcgtggagatcttctcaagcacaagctacattttcttttgaatccggtgcaggtcatgatacttctcacactaaactttacgtaaaagtcaagtcacttctcatctagtcaacttgtcnnnnnnnnnnnnnnnnnnnnnnnnnnnnnnnnnnnnnnnnnnnnnnnnnnnnnnnnnnnnnnnnnnnnnnnnnnnnnnnnnnnnnnnnnnnnnnnnnnnntgttctaattttcactttagaaatatgtgtacgtctgcagatccaacttgtcttggtacccatcaattttgtagaatgtgcccattgcattacgaggtgggttcatgcatttacttaaactcatccatatggttctggatcacttcatattatgtgaggaaatcatcataatcaatcttatctcatgtttctagcgccctcacttaaaaacaaatccattctctgtgctactcagtagtaaccgcatggtcaagaggagtgcttaagcctagaactttttttggacgttaggtactttagttagtgtaatttactgcatctacagtgagatacaacagtgtaaaaaattgaaccctttgcagaagcagcaccatttgcctacatctgctgctgttgctgttggatcacatgtaaacagacttattttccattctactagaaacataggcacacagttgaacagaagctgtcaatgtgcttgaaaatttgaaggctagtgttctgttttttggttcctggttgggcctccaggctgtggtctttctgtgggtagtggtctttcactagtcgatgaggagtatggtcatgtagaccctgtcaaagggggtttgcctgtaatccttttgtgttttactcttctaatataattcagaaaaactctttcgaattttcaaaaaaaaagtgttctgtttcatatatatttcgacacccccaccttagcaaaaactttcctgatatttatgatttctgtgttccatattattcatctaggtttttgaattgagttcttcacaagggccagaaacaggattatttttgttcagaaaggtaccacatttcagaatacttgtgtgtggtggcgatggtactgttggttgggttcttgatgtgatagataagcaaaattatgaatcacctccacctattgcaattcttccagctggcactggcaatgatctttcgagagttttatcatggggaggtggcctaggtgctgttgagaagcaaggtggcctttgcacagttttacatgacatagagcatgcagcagtcactatcctggatagatggaaggtggcagtagaagataagaaatcaaagaatgtggttcttgtaaagtacatgaacaactatctaggtatgtacatagaaacttcatttattggcaccgccttgtcgaataaccttagttaaatatggtgacaggtatcggttgtgatgcaaaagtcgcccttgacattcataatctccgtgaagaaaatcctgagaaattctacagtcaggtaatgtttgtatccatcataagcaatatacagtagttggcccttgattttgatgtttagcttctttacaaatttatacttgtgaaatattcccttttcgcatttattgtttaagaaacaaaggtagtacagctgtctgttacttgaaatgtagtgttatttcgatgttatcagctgtaagttgggcttgtggatgcttgtagctcaacatttcttctgaagttttaacttttaggtctcctgtgaatgtatggattatcttgtagaactttttaaagttttgaggtgcttgtaggcatattgaactatttggtgccattgactcatgcctaagctacatgtaattgttgagtatagtagtgtgtcatgtggggccgcccctatactaggaaacggcgcgcccgagacatccgctgtgccgccgaacgcgctgctgaggctgcgccgtcgccctctgggcatgcagggcaggctgagccaactagtggctaggatagaaagggatcaaatcatttccttagattgaggagtattttcctattttgttaacctaagaggcctatttaaccttgtacgtggacaaggaataaatcaagcaatacattatcaatctaatctctctctctctctctctctctctctctctctctctctctctctctaaacaagctaggcgcagaggggtaaaacctcgccctagtcacggattgcgactatgagttacatagtcgccgtcgccctctgggcatgcagggcaggctgagccgactagtggctaggatagaaagggatcaaatcagttccttagattgaggagtattttcctattttgttagcctaagagacctatttaaccttgtacgtggacaaggaataaatcaagcaatacattatcaatctaatctctctctctctctctaaacaagctaggcgcagaggggtaaaacctcgccctagtcacggatcgcgactatgagttacgtagacggggtcctgctaccctcagaaaagaggtccttgacatagtgcttaatggtgaaccaattgaactgtacttgaattgacattattgactgaggcaatctttgatgacttcagctttttgttgagtggataactaattcgtcaacccatgctttgcttctacatgggctaataatttttaaagaacataatcattagaagtttgtggataaatttgggcctagtgctattcagaatagtttctgcctgctctctaccatccatattctaaaaaagtactcatagatacttttatctttattcaattctggactttactagtaccatctattctatatgattttccatcaccatgcatgctttccctctttgcatgttacctccatcccttagtttatgctgtgtttgacatggaaatggatatgatgttgtcttcatggtgccatggtggtacacatcatgaattcatacctggagttagttctatagtagcaacgcagaagtgggtaatttagaagcatatataggaggactttgggatattttttttaatgacaggtaggtcatttagatgtatatctatgagcttgcttttggttatttttaacgatgtcaaaagtggggtaacttagatgcaaattagggaatagtttacatcatcttttataatgacataggtaagtaatttagatgaagattttttttgaggggaaacataaatttccattacttagacaaagctgaatcgtcagcaattacagactgaatatgtgccaggatagcaaccacaattggttcatcatccgggtcacatgaactacctagattcaggggatttactttaggttattttttaatggtggatttggtaattttgatatagatttaggggattgcttttagactatttttcataatggcaaaagctgacaatattttatagaaaacaaaatatgtctgatgactattattgtcactgatgattagagttactgaattgatggctgaatgttttttgtttctcgtgaggagaattcatatggtttatctatttttttgtagcatgtcttgtgatgactaatgtggaggctttatgagtctttaattcgtaatattaagatggatcttatgtttctttcttgggtttcatcagttcttaaataaggtgctatatgcgagggaaggggccaagagcatcattgacagggcgtttgtggacttaccatggcaagttcggttagaagttgatggcactgagattgagataccagaggttgtgtcaaagtgaattgtgattattacatatagcctgctttcctacatgaggttgtactaaactactagtggctatggatctttcaggactcagaaggtgtgctggtcgcaaacatcccgagctacatgggaggggttgacctgtggcaaaatgagggtgagaatcctgaaaattttgatccacagtcgatccatgacaagatgctcgaagtggttagcatcacaggagcatggcatctgggaacactccaggtaagtgatgatagttcagaaacctttgaaggacgaagtaagtggtggagactcaaagaaagaattactaaactgcatctaggttggactttctcgggcacggaggatcgcccaaggtcagtcaatcaagatacaaacgtttgctcctttccctgtccaagtggatggcgaaccttgggtccagcagccctgcacgcttaagatatcccatcacggacaggtttatagtctgatcttgctcttgcatgtgctttggcatcatgcgaatcacatataagttggattgctgattgattggcagagtgttgttggtttccttactcttgttttcttttcgttgtactcatcaggcttttatgttgaggagggcaattgaagagccacttggtcatgctgccgctatgatcaccgacgtgcttgagcatgccgaatccagccgtgtaatcactgcttcgcagaagaaagccctcctccaagaaatggctctacggctgtcatgaagcaacgccgatcattcagacgttgcagaaggatagtttccagtgctgtgccctgcttgcactgtggagaggttcctattggcagtgatatccccacaggagctcgatcatgtttgtcgcagcagatacagcccggggggacgtgtccacgtgtacagagagtttttggttatgttcgcattttggaaatagcaaggcaatgttgtgtacaggtatgtggtgttgtgttattgtgtagaagctcgggtatgcatgccccttgccttgttctgtgcaaatctagttacgcctgccatttccattttgtgttcggttggctggatggttttttggggctgtgttgtgtcgctgccactttgggtggtgccccacatgtaaatgagacgggcttgaatgcttggttgtaatggaagttgtgcaaataagtggtacgtgttccattatctttcatcagctgcttgcctcatatatgcaggcccgttgtgcctaggaatctagga

SEQ ID NO: 3584 - DNA, 11037 bp, Sorghum bicolor
tcgatcccctcacgaatgtcaaccctcctagccatgacaaccgctagcactcattattgttatgtactccctccatcccaaattgcaagtcgtttgacttttttatctcaagtttgaccactcgtcttattcaaaaaaatttgtgcaaatttaagtcattcttgaagaacttttattaataaaccaatacacaacaaaaaaaaaactattttgtacaaaactttgaataagacgagtggtcaaacttgatattaaaaaagtcaaacgacttacaatttgggatggattgagtacattttttatataaacgtggacgcttacatacacctataaccgcgcgcacaaataccatacctccatgagtatgtttgaaagactgaggtggtaggtattgaaggcatccaatattgacaaagacacatcataagcgtctcaatgttgacaggtgcatcgccttacgctagaaaataacaacactaaataccatatataataaaatcaagaaaatacgaacaccatgttgagtcgagagatttcaaacatgtttcgaagagacgaaactagtagaccagctcgttcctctacagttttgtatgtactccacttttgtaaccaatgagaagttaactctgtccagtagttttagtatatgcatgccttggacttccaatgccatttactcaagttctgattcgaatgggaggatgtaaaaaaacttccacatactccctccgaaagcttctaagccaaacttttaaaattttgatcggatttctaaaaaaaaaattctaagatttatagtaccaaattaataccattagatttattataaaatatattttcataagatactcattttatgtcacagatattgatgtttttttttgtaaagttagtcaaagttaaaaaaaagtttgactgacacatatcctaagagttgaagcttttagtgatagatagagtataataagaatcccatttcaaaaccagcgccttttaaaaacctcaaataaatgcacacctcgtactttgagaaatcaaccaattttaagatgaactagattgtactaacatttgtatatatagacatgtctgctaataaaatctagtgccgtttatttgttattatcaatattagtatttttttatatatttgctcaaagttttgacttgctcggtcccttaagaaaaagaagaaaaaagaaaaaaaaacacctactgaaaatgaggttgtgaaattgtgatgaggttttacggttagtcagttattacctacccgttttgctcgtggggtttgttttgtttgtacgagccaaaaggcatgcgagcaaattatcaaaataatatactacaagttgttttgttggaaaaaaaaaaaagagtcccaaggacaaggagaaggaaaaagaagcgcgtggtgcttgccgcgtgtgggacttgtattgcaggtgggtagtagcagcagcaccagttcccgtttccgtttccgtttctccagacttatcaacgttaccgccgccgcccatatgcacgcacatccgttccgttccgttagaagtgcccttatcctagaaaagggataataactgttatgcaagtatatatatcaaaaagtaataactgttatgcataaataaataaataaataaataaataaataaataaataaataaataaataaataaaaaagaggtgcgtgtgatatgttatccaccgcacctcctcgttctaattatccactgatccgcgggacccaccgagcaggcgcgagattctcccgaaaatgccctccggcgcgaacggttatatatagcgggcacgggcaacgcccagccccggcagcggcagagcacggcaggcaggcaggcaggcagtccccgcaccagcacagcgatccaacccaaacccagagcagcaaccctgtgccggccggcaatcgcagtctctgtctgggtcctcgtctcccccccaaccctcccgtcccgtctcgctcccaaatccttccacgtaccccggcggccggcagtagggaggcctaggagagaagggagaacaagatggtcggactcctcccggagaccaatgccgcggcggagaccgacgtcctcctcgacgcctgggacttcaagggccgccccgccccgcgcgccaccaccggccgctggggcgccgccgccatgatcctaggtacctacctacctataccttccttccttccttccttccttccttcattccttcattgcttcgttgatccgaccgccgccgccgccgccgccgccgccgccggccggccatccattgttccatctcaatcggcggcaggcagatctggcctgcctgcgtcgatcgagatccctcgcctcgctcgctctctgacgatcgagtctgaactgtgaacgatgaataataatgcatgggctgtcctgtactgacttgtgaatctcaatctctgtggtgtcgctgcagtggcggagctgaacgagcggctgacgacgctgggcatcgccgtgaacctggtgacgtacctgacggggaccatgcacctgggcaacgccgagtccgccaacgtcgtcaccaacttcatgggcacctccttcatgctctgcctcctcggcggcttcgtcgccgactccttcctcggacgctacctcaccatcgccatcttcaccgccatccaggcatcggtcagtaatagtatactcatcacattctttcatattctgttttcccttttctttttgtcatctgcttggattattggataataatccactcactcattcattcagtcattcattcatgtccattaatgtcaccggcgtgctctgctctgtacatgtcggtcagtcagttttgctggatgataatgggtccagtcaatctgctctgtcacccatcgacaaaatatctgctttgggcttttcatcatcttgattattattgttcctttccctagctagtaagagcaggccaggactagttgtcagtaaaaaccaaataaaaattggaactttccatccacaagattctccttctctgaaaagcacacgcgcacggcgcacccaatgaaacaaacaaacaaacaaaggagaggctggctatgccaattcagtcatcatcgccgtcgtcagtcatatacatgcatggagtgatggtggtgctagctggacagcaaccgctatgcaattcccttttccattattatcagtcgagctagattcgatccttgcatcatctcatctcaaatcatctgtgtctgtcaatctacctcacctcacctgatgaaatgaaaccgtaaataaaactaaacagatttctaatctattattagttattactgaacactgcacacacacaccggaaaaggagccagtaattttttaaatttaatctactaataatcacgaaaaggtttaaaaggttggatttttgacaaatatcctacatatatatatacatctgctagctgattgatgatgatacacacacgtacaagtatagtaagtaatttgtttgttgtcgtattacgcacgtgcagggcgtgacgatcctgacgatctcgacggcggcgccgggtctacgtccggcggcgtgctccgccaacgccggcgacggggagtgcgcgcgcgcgtcgggcgcgcagctgggcgtgatgtacctggccctgtacctgacggcgctgggcacgggggggctcaagtccagcgtctccggcttcggctccgaccagttcgacgagtcggaccggggcgagaagcaccagatgatgcgcttcttcaactggttcttcttcttcatctcgctggggtctctgctggccgtcaccgtgctggtctacgtccaggacaacctgggccggcgctgggggtacggcgcctgcgcctgcgccatcgccgccgggctcgtcatcttcctcgccggcacgcgcaggtaccggttcaagaagctggtggggagcccgctcacgcagatcgccgcggtggtggtggcggcgtggcggaagagacggctcccgctacccgctgaccctgccatgctctatgacatcgacgtcggcaaggccgccgccgtggaggaaggctccggcaagaagagcaagcgcaaggagcgcctcccccacaccgaccagttccggtaagttctagctggattttgttgcctacctaccttttacttactacttactttccaaaacatgaacatctactgttgtttacttttgtccatcgtcatcaccatgctctaggaatggtaattatttgccagcacacacaaaaaaaaacttatactaccacctgagtaatactacagcggtatgccggtatgtataatggattaattagctaagtgatggcatcagtcaattaaaacaagagtccaagtaagatggactggcagcagaccaatagggttagttgccttactattggttgacctcatttgtcattctcacttggattacaaccagagagacttgagtgatacagccattgccagacaaacaacagagaggatatatgtacatgtactgtctgtctgcaactgcaataacaatatatacaatttgccagctaggctagggtacaaaatccaaaccagtccaatgcatgtagatgcaaacggatggattgcacaatcgaatgcactgttctttgtcccctccatctccctatatcgttttctcccaacttgcatcggccacactcacgtgttgtactatgggtgaattcatggcaaattcattcatgcacaccagagctgccaatcgccttctccctactactaaagtccacaaattcattaacagccgacgacgccgtccttggccggtggccaagccagctaaaaccttccttgattccggtggcatggcagacgagtcagtcactgacaagtggtcctacacacctctctgaatgtcaaccatcgccgacagccgggcccaacctccttgtcctgtcacccgttcactagacgctgcatacgcgtagcacctctctttcgcttgacgacttagcctttcgcttagctttagcgaacctcttatgttaagtgatgtccccacacatcatatgatgtttagggaaagaggataagagctccgggtgagcgacaaatgtctgggtttggcagcacccagaccaataattgcgttattctaatgctcccctagggtgacggagaagggtcacggactgtgctcggctgaggctccctccctttgccttcccctgttgctgtctgttcccccggccgtccctggtggctgctgctagctatcccttattgtcctcctctgcccggtgctctgtactgcaaccgctgcatccaaacactagcaaatatctgtctgcacaaaaaattcagagcaggatatatatagtagatattgtataaatatataaatatatatgtgtgtgtgtagatatggtccaactgaacacctgctgaaattcagagacgcagaatatactagtactattagtagtacaaaactgggggaagatgtgaggaaaaacatgggggaggtcggcatgcgaagccaaacgagattgctcgatctcgctcgttgtctagctgcagtcctcagtttttggtgtcatttgcgaggtttttgggagtcttgtgaggaggaagaaaacagcccctcacccacctagtagtagctagcttgtagcttcactttctcaagacttggactgacctctcagtttcccggacttttcctgggagtcggcattgaaaatgtgatatagcaaggcggcgtaacttcgacggtttgaatttgagatattgaatagtggtattgagtaagtaagtagctccaatgggatgtagacaggactggaagagtgtgtatatgggatcttgatatggggaggtcataacaatctgcatctagaaggtgtcatgcatggagtatgtttaagattagtgaattattgggcattagctcgatctgcattcctctctagcctagagaagaagaaccgtgaagaagaacggtttcttgttggcgatgtgatgatgacatgagtaggggaatgaccaagttacagcaaaagctaacctaatttactctagcatagacagaagaaaacgccagagtcatcggcatcacccttttccccccttttttctcactcaggccttgtttagttcgcaaaattttttgttttttggtactgtagtatttcgtttttatttgacaaacattgtccaaacacggagtaactaggctcaaaagattcatctcacaaattacaggtaaactgtgtagttagtttttatttttgtctatatttaatgctctatgcatgcgaccaaagattcgatgtgacgaagaatcttgaaaatttttgcgaactaaacaaggcctcactcacttggaaatcaatttgcagtagaacatgctgtcctgtgacagggaaatcaagttgcagtagaaacattattgtcctagctaattcactcctgtcctgtcgtcgatatgtgtagctagctagccaacaatagcctccaaaatctcttaagacttctgctgtagaatcacatcagggaagaagaagagaaaaaaaatgacacggacattgcttgaaaacgaaaccaaaatgggattcagctagtagggtgacgccgtgacgggtgacggcgtagcgaaggtcgttccagatgaaatttctttgaagagacttgattgatcctggattggaataagaagagggttggcgacagtgaccactgacagactcacagagagacagacttgatcgtacacgtgtgatgtgtgcgcccaaactgaacatattccttcatataatgtgttatgatatgaactcacagagtcacagtcatagtacagtggggcactacataacataatgcactggaagaatagaaggctataggtaatctgaatccccaaaagacagccttacagatacgcatttccctcaattattagatcactgtttgctagtctgaccgggacgtgtgcacgcactgcacacaccgaaaggcaccccccctcgatcgaaaaaaaaggcagaggaaaggcgggtgcatgattgttagtttcagggtgccaaatgaaatggagatcggcagcatgattcagcggtggacgcgaaaggctcaaagccacaccacaacgaaggtagggatggcgatcttgcatgagagataggacagaggagcagcacagcagcagcatggtgtgttgtgtgtggggaaccttcctactcgcctagctgctatggaccaacggacggacggacgacgagtggccgccatggatggcgacggccaaagctatctatctatctaaccgatcgaagcaaccttttgcattgcatccattctcacatgctgctgtgctgctgtctaggtaggttggccgtcgtctttggcatggctcccttggcactgcatctcttttctgtgtgtgtctgtgtgtgtggtgtggtgatggtgtggccatacatgtctgcagctggaaaagctgtggagaaagatcactggagggatcgagatcgagcagaccaatagaccatctcatggacgcatggaccatggccatacgctggagataaaagcagcttgcactgcaggcatgtcatgtgatgtgatggtgcctgccggctgccgttgccatctccaatccgtgctctcttacgctggcctgatcaaagattagtggctgctatgctaaccctagcttgcttacttgctggcatagaaaccgacccttcctccttttttacggcccttttttttctgtacttttagacagaagacgttgtgagttagtggtgtccgggacctgaacacgtgatctcgtcggggtttgggcaaatgggcggcatggcggtcggcatcgatcggcacggacgacatggctgggactcctcacagttttctgaagggttcgaggctcatgtccgtcctcctgctggcaaattccctgccgttagtttcgtcgcaatgcttttgcacatgactgcatgagcatatgacaaagacaggggacgggtatggtattccttttgctgagtgatcacatggcaaagcatcagattaacgccagacacgggggagggatagatagatgtgcccactaccactaaccctctcctttgtttgttatcttatcgataaggcatcacagctgatcctgagtcctgaccacaatgctttgtttaagtctcttcagagtttcagacttcagagtcgtcgtcaatgacgatgatgctatgtgctaaccggtctatctggggaaggaaggatgctttgcttacacctgcatcattccatcatttgcatattagcatgaacaggtgtttggttcttgtccctgattgggcctcaacagtccaccatgtgggggaagattgggaaagattattgccacacctgacgcactgaatctcttgtgtttatttaaattaaacccccggcgtgggtctcattccatagcatgactctggcaggcaggcaggcaggcagcaggcttctgcagatgacctgtttaaatgataagctctgacgactcattaggtgtcgacaattctctccggagtgattagtattgagatggcgattgcatcttctatctataataagaaatacagatgcccctgcatgcttgacggatcgtaagcatgcatgtaggccggccatctgcttaaactagcactagctctgaacaattgttgtttaggtgtctgattgggttcgtgtctccatctcgtgcagaatctcgcgcctgtgaccactgctttactctgcgcatgcctcttgtttggtgttttcctcaaagcccgaaaccactttgcattctgcatgcctctctgtttcagcttaaagtagtccactgatagcgacctgaatgtctgaatttctgaaaagaacattttttttttccccagagaacatttcaagaatgaactttttaataagcaatcttatatagtaatatatatgtctcactgcttgatcggaaaaaaaatgatattataattaactttactgtttgtctttttctgaagaaagcaaaagatttactctgtctgaactctgaacagaaagaagctcctgcttgtttatcctttcagcttttgattgaatgctgttgcttgaatttttattttttatttttcaaaatctaacagcaatagcttacggtttagtttcccgcgtgtttaatttggtacctgcagcttcctggaccacgctgccatcaacgaggagccggcggcgcagccgagcaagtggcggctgtcgacgctgacggacgtggaggaggtgaagacggtggtgcggatgctgcccatctgggcgaccaccatcatgttctggacggtgtacgcgcagatgaccaccttctcggtgtcgcaggccaccaccatggaccgccacatcggctcctccttccagatcccggcgggctccctcaccgtcttcttcgtcggctccatcctgctcaccgtgcccgtctacgaccggatcgtggtgcccgtggcgcgccgcgtgagcggcaacccgcacggcctgaccccgctgcagcggatcggcgtcggcctcgcgctctcggtcatcgccatggcgggcgccgcgctcacggagatcaagcggctccacgtggcgcgcgacgccgccgtgccggccggcggcgtggtgcccatgtccgtgttctggctcatcccgcagttcttcctggtgggcgccggcgaggcgttcacgtacatcggccagctcgacttcttcctccgcgagtgccccaaggggatgaagaccatgagcacggggctgttcctcagcacgctgtcgctggggttcttcgtcagctccgcgctcgtcgccgccgtgcacaaggtcaccggcgaccgccacccatggatcgccgacgacctcaacaagggcaggctcgacaacttctactggctgctcgccgtcatctgcctcgccaacctcttggtctacctcgtcgccgccaggtggtacaagtacaaggccggacgacccggcgccgacggcagcgtcaacggcgtcgagatggccgacgagcccatgctccactgatggatgatcgacgaggcacgcgacgacgtacgtaccacctataccaaaagcatgcatatccgtccgatcgtcgatcaaatccaacggctctgattgattgctcagcgtgttgtaccatcgtatcatgtgttactcagtcagtatacgagtgtgtgtatcttctctatcaaagcgtatagcacgcgccgatatgatttagcggcgcgtgcctacgcgtgtagtataaaaattaataacttggttcttagagtggaggggggagggaggggcggaaatgtaaaaccgcacaaggatggtggggccagggtgtccgtgacatagtgttactgcattttgtatatcgtcgtggtgggaagaaaaatcctccactgcaatctttaaatcatgcaagagaggaggagaaaatagaggatgtcatgtgtgctgcttttggttgattgacctacaaaagttttgaaaaccttttcccggcgttttcatgtggactttgagaaatttgaaaaactctacctagtacttttcctggcgttttcatgtggactttgagaaatttgaaaggttggaataatgaaaaactcaaactagtaggacaggatgtcgtatatattatatacttgatatttatgttgtctcaaaataaattaacttctacaaccacaataaatatgtaaaaactatcttgaatttgatcaactctatagtaaagaataacaacactcatgacatcaaataagtaaattaaatatatttcaagataaatccagtgttcaaatttcatgtcataaatattggtggtattcttataaatccagttaatttaaaatttaaaataaaaaaatataacttgatataactttagaagttaatttactgggaccgaaggagattataatggtgtgcaaagctctcgtaggttaaggttaagaagacctgccttttgttaagaaaactaag

SEQ ID NO: 3585 - DNA, 9756 bp, Sorghum bicolor
ggattttttttttcaaaaaataaaaaagaaataacgtaaccagagtaccagacactggaataaagcgagtggttgcatagagtaatcttgcatgggtgccaaccacattctgccacccgttacacatgaaagacaggtaggcaaagctagtgtgccaaaggaacgcatcgcatatacagtacacggttaggtgcactcgctaagaacgcgcacgcatcatttgattccaacagtaaattaagattgctgctgttttcgtttcgaaaaaagagatttgccactttgatttgaaatggaaaggcctcatcagcatcccgacctatcatggcagatgatctaaataaagccaacattatcatatactactatatttagtactgctctctcttggggaagactacttttttttttttaaataatcaattcggggaagctacttgtgcttcaacgtgagccatacgaatcatattacatcataatttaacgattttagcatataatattattacatccagaacagaatagcgagatgaagattgatcattagaagtatttttttctctctctctcacacacacaaatactcaatgtacatagttgcgaaaccgtttgaccagtttatcgaacaatttacaaggagaatttcgaaacattaattgagcattttggactcaatggacatagctgcaaaatcatttttgtagtagtgatctatgctggagctcttcttaggttagctaaaaattttgagaaaattcatgcaaggctcagagcatctctaagagtcttttttgaacccgctctctaaatcatcatttggagagagtcattcacacaaactgttttctatatcttttcacttcataatagttattctatatcttgtatacgttctagatagtcatttttattttctatctttgatttagcgataaatttgaaataaaaaataactatatttagattatccaaaatctctattcccaattattataacatagttattctcatacggctcattagatggatcacaaccccatctacgaacgcgtatcaaaccactttacgaggcttagtgggtgaatatcgagaaaaccgaaagcacacgagcaatttataaaagataagccacacgaaaacacagccatccacaagattaaaaggaatatagtgatgtgtcacatcatgaatatagagaactcctttggtctggagacaaacggcaacgagatatttggatttgaagttcttaattcttcttctcaaacaaagcaaattcctcacgataataacgtggttgaaattgtcgtcctatagggtaaaaggaaaggctcctaggccatttgatttggaggtgaaagcggtatttgtgtttggttgattcattaacctccaacagataatggtaccatactaaataaggccttactatttcatgtaaacacaacatctacactgacacgtcatctaaatttaaaaccttttgtagattaagtttgaaattttttatagaataccctaatgttcaagtttgaaatctagaatgtctaatgccttgtttagatccaaatttattttggagattgaaatcaagtttgaaatttatatttgacaattattatctaattataaattaattaaacttaaaaaattacagataaattataaaattaattattttttatccatatttaatactttattttatctatattttcaaaacgcggtccccgaattgtacgggccgtcctgcaggaggcatccaacggcagctacagtattacctcaaagatatcggagcgacggcagcggccaacgcggcatccactgcagacaccgagagacggacgcggctgccgctggcgtctggcgagagcggcagcaaagagcgcaggcaggcatcggcaccagtcaaagccaccgtcttgattacccttccgttagtaaaacctctgtctcgcccaccaataaagtccacagcgatttccatttctttccccaattccgtccaccagctcgcaccaccagcggccagagcagcagaccaagcaagcacgagggagagaggagagaaaaaaaaaattcggagctgctgagctttgtccccggaggcggcgaggcgtatagccatggagcgggcgggggaggcgccggccgccaccgccgtcgtgcggagggctccctcgacggcgccgtcggcgcgtgtttcgatctgggagtcggtgcgcgcgtgcggggtgtggtcgaaggaggtggacaaggccgagctgcggaggcaggtcgtcatgccgctctacctgcgccgcgccgtcgcggccgccgtcaaggcaaaggacgaggccgccggcgtggcggcggcagccgcggatgaccaggcgggggaggacgcggacggccccgcggtggcgcccgtggtggtgttcgtcaactcgcggagcggcgggcggcacgggcccgagctcaaggtgcggctgcacgagctcatcaccgaggagcaggtgtgtgacgccatggagaatctctccacgctcgtgcaactctgcttgccccaattttgctcctccttttttctccacccaaatcgcagtttcgctttcgcgtttttcgatgtcgctttgtcggtcgcttggtgtttgagcttgcaagtgatcgctcgtgacactccagtggaatttcacagcgattttgacctcggagacgtgttttaggccttgtttagttccaaaatttttgtcaaaatgtgaatagtaccaatttcgtttgtatttgacaaatattgtccgatcatggcctaactaggctcaaaagatccgtctcgtcaatttcaaccaaactgtgtaattagtttttattttcgtctatatttaatacttcatgcatacctattcgatgtgacggacaatctgaaaaattttgcaaaattttttagaactaaacaaggcctacttgaattcccttgggtaggtggacatacatcccgtcggagtagtacgcacattggtacttttggaaagagaatataagcgtcacgcgatctgtgtgacggctctctaaagcagtaaagccttgtgtggatcaattcaaacgttacaagttaggttacctcgcggccactgcctttttgtggaattcacatgatagattgatattggttcaacggaaggaaacgaataattgttggatggctcatgaaaaaaaaacagttatttgttggatggtgtcatggtgaatgctaaatgcataataaatgctgggagtaccgttggctgttgggaaggctgtagctatttgcatctcactttgtcacatggcctcggatagtatataggagcagatgacctagctagatggagatcatgtggcatcatctttctgtggtctttctggggggaaacaaaggcacgcacaatcctttcagggtgatagcttccagagggcagtgatgggacgtccttctacttcttagcttgacagtctcttgataggaaaccaaagcggccagcgacactgattttgacactgtttaaatctatctaattttcttatgcatcaaatctggtggaacttgatgttaacttcttgggttgctgatgtgactatggagtataatggggctataactgatgaaaaactataggtagaaaacttatatacaattctatggaatctgataagcttgtgcattgctcttgtgaggttggacagctcatgtagcatgttattgtggttgatacgttttcttaaactatcagttggtcaaaactgaacagtacatactgacaaccattttgccaggtctttgatctttctgttgtgaagccttcagattttgttcactatggtttgagttgtttggagaagttagctgaccaaggcgataaccgtgcgaaggccgttcgtgagagaatgagaattgtggtatgtgcttgattccttttgttataatagtgcatttctttatattaacagcacacatccagttttcttttcctatcaaataatttgtaaaaggctatcgctttcttcactaattcaggcatccatgtctcttctcctcatcaataaatgatttgtgatgttgcttacacattaaccttcaactactttgtgtaacatccatgtgctagtttttcctggcaggttgctgggggtgacggcacagttggctgggtgcttggatgtctctcggatctttataagacgaaaagggaaccagttccacctacaggaatcattccacttggtacaggaaatgatcttgctagatcgtttggatgggtaatgacctatatatgtgttcttttacttttgtatgtaaatcctctgttttcaatcaaaacaactaatcagctcgtgcacagggtggctcttttccctttggctggcgctcagctgtaaagcgttatctcagcaaagcttccactgctcccatttgccgtcttgacaggtgtgatctttgtttgtctttttggcactttttttttgttatgcacattcaagtttgacttagttgattatatagaggaaaaacgattaatattgtgtagtagctggtcgtctactccaccttaataaaacttctgatctactatatgcttatctgctataaatttgccaatagtggagcaaattattgctcaatatatgcttacctggcgcaggcagcgagcccaggtgtccgattttggatacctgtggctgctgtcgctcctaggagggtgcaaaccaaacacaccctcagtacatgagatgactacttactctagataggcagaataatatatcatgatattaatgggtaagtttgtacgtctatatgataccatcataatatagtatctactgtatatattatgttcctatgcatgtgtttcatccatttatgtgctgataacctctactattgtccatgcagctggcaaactgtaattcagatgccagaaggagaaataaaagagttgccatatgcacttaagaaagtggaacctggagatccgttggagatcagccaggtttgacttatcacttcatgtcttcatctagatttgtatgctacttaaatataagttgcctacattcactactctttccatctaagctctgctcttatttgagtttatttatactttacaaatgctaagattgcaaatgataacagaaatctgaaaagtattgctagagcaagatagtaacataaaaacaatgtggttgcttgttaaaaaggcgctggagatagtatttgtagagtatgctatagtacatttagtgatttctgattttggatttattaaaatgctaatcttatatggtgcaggagaatggcacagagttatccgaaaaggcttctttctataaaggagtattctacaactaccttagcattggtatttagttggttacctttctctttgttaagggttttcttttttatcagttgaaaggtttcatttgctgagataataatgctcaaatacgaatccttctgaagtttgaagctagtgcagtagatagacttaaattagatcgtttaaccttttgaactataaacagaattagaccagatgttctattttcttaggtttcatcaagaatttgaattttgattaatgtttttagttgttatagtttattttcattgataaatttgctatttactttgagcagggatggatgctcaggttgcatatggcttccatcatcttcgtgatgaaaaaccgtatcttgcacaaggaccagttgcaaataaggtgctaataggaaccctccaatggtgtaattttaatgttgtctcgcttaaatactctgctatatgtttcatcattattaggtatgaagtgtgattattggctagctcattttgttggaactacatagcaaattcttttactgagtgagcagcatatacccttccactgagaccgctggttagcaatatctttgtaggttgcctgtctcatcagaacctcgtaattatgatgataaaaataccatgtaatgtcacaaagaaaaaaagaaattcttaatctccttatattgctatatatctgttggctgagctgatggtactgcaaattcttctagaatatgacatatttttcttgaacaagcatgagagctgtgtaccattttattaagggtttagggtttgcacctcaaacacacaccctgagtgaaactgaaaaggatttgccacgcacaaagttataggtgaccagctcacccaaaagataggactggcagctgtaaatatactccctccatacccaaaagtaagttctataaagttctgtcaaacttacaaaagtttgacttatgaaaactctagaagttgatttattcggggatggaggtagtataacattataacctacgaatcaggaagaagaaaatatgcttcaaaggcttatttatatgcatgtttttttccatttcatttcctttagcatattcctgtggtatctcctaacttccttggttctaaaaggctttgttgctgcatgtcatttggtattacagattcatgtcttgccttcttgggtatttacgtgacttataaaatggttctgctttcttgccctatgcagttgatttatgctggatatagctgcactcaggggtggttttgtacaccttgtacagcaagtcctcagctaaggtaaacgatatgcttttacatgaactttgaactattccttctctaagctgctctaaattgtcctgctacctatccaaagctcacataattctttgttgaatgttgatgcagggggcttaagaacattttgcgactttccattaaaaaggccaattgttcagagtgggagcaagttcaaatgccttcaaggttagttattgatatcttttaacattgtaaagtacaaacaggttacagcaaagagccttaagaaccttgaaaaattcctgtgaatctgtgatactttgccacttcatatgcgaattcctgtgtagtcatatttacatgatgtttgaggtttttagaaagagtacaagaatactttacattttgtatgtttggttccaacttcgaagtttgcaccggttatcactcaaatgaactgttgcaatcatcccttgattagctagttactactagggaccaaagtatctattgctactagcctcttcacagcgtcgtctaaactggcaagttgtcccctgcaaatagcaccattagacttattacaatattattttaatcatcataatccctttgatcataaatagaggcttcttagatatttggtataagatcaataccctttatttttgaaaaaaaatcataaaaatcaatacaagagcaaaaacttagtacctacaatactgcaactatgccattacaaatcagttttctgttgttacattggatattcagtttggtataattgtactggaacaaagttgttatttttataattttaatcagagtatatcaaataatgctggagaggaattgccctggagagtatatcaaacatatttgattagtagtaattattggagcatgatgcttttatcctgggtcaaatcggagtaccgaggtagtacatggcaatgtgatttgctactgtacatgaactgatatggcagacacctatacggctcacaattctttttagctgcaaatgtcctatgtaaaggtatgaagttgtatgtggagcttcttcatgtcagtttacaactacactggcatagtcacagcaattattcagagtgcacatattatgtcagaagattgtagtttactaatcaatatttgaatgccttggatactcatcctactgttgtgaaaactggatggtatatctgctcataacagatgctgaatgctagatgagcatgcctatagagaattatcatctaaactatttactgctgagcaggatgccctggaactgcactcacatgcgtttctctgataatgcagcgttaggtccctagttgtcttaaatttatacaactatggcagtggaaggcatccatggggtgatcttaaacctgagtatcttgaaaaggttagtacttacattgccatgtgaatcacatatgatttgtcaattttactttctgttcctaaatatagttcatcttttgaaaactcaaataaatgcctttgatattgcaaaatggtttaaaagatgggtcagcttagcatttctagaactattactgtttcttttgtccacaatggagtgtgatgttagcattttctaccgatttgcagagaggctttgttgaagctcattcagatgatggcttacttgaaatatttggtctgaaggaaggttggcatgcttcatttgttatggccgagcttatcaaagcaaagcacattgcccaggtactttatttttatggtcttactttttgcatcatatgtcggcaaaagatttgactgttgggataatcaagagtgataagcaactgtgttgttgtgatcttttttttatgagataccttgatagtcacaattatttggtttattaaggttttagaaatttgtggggcttagttttgtcgatgttattgagcagtttagtcaaatgtcctgagttgttcctaacgcgtcttttcctacggatgctttttaatggactgtatgatccaaatccgtttcctgctatcaggctgcggctatcaaatttgaaatgaggggtggcgagtgggatcgagcatatattcaaatggatggagagccatggaaacaaccactcttacaggagcactcaaccattgtggaaataaacaaagttccctatcattctctcatgataaatggggagtaatgagatttccctatgtcaatcaggtaaagttccaaagtcctgtgtttctttatgtaccatttccttgttggcatatcatttcctgatatcacctctggtcactcgcaaattgtaccagggttgcattcatagatcgttagaattgtgtacagttcaggagcagcgcgcactagattcttagaacttggtcgactgcagcgaggatgcatcatgcatgttcggtggcctttatggtgccatggccggagcatgatatgacaccatgcattgttgtattgtatcatatgcgttgttgtatcccaagttctttttttaaggaaacaagcttgatctgtttgtattgtaacgttgtgtgtcaaatgcaaaagaataatctggtgaaaaacactgtattaactgtcaagttggacagtttgccgtttgcactgtcctatagaatgtttatttgcgtacgcaacgtggttgagtctcaaaatttcctttcccgtgacaactatattatcgtagaagaagtagcagcctgggaacgggaacatgacccaagttctgttcccatgtttcacgttttgggaacgtctacgtttcgaaaatatgaatgttcctgtttccaccttataaaataacatcaaaagtttccgttcccgttctggagatggggacgggaacaactgccttttctggttcaggtctactgttggtgtggtgtaagagcttgtcagcttacaaacttgtataggccttgtttattagttcccacctatttttttttcacttcatcttatcgaatgtttggacacatgtatgaatcattaaatatagataaaataaaattaattgcacagtttgtatgtattttgtgagataaatcttttaagttatatatgtgttatattatcactaaaaacttttcagggtgtgaactaaacaggctcatagattgggaaaaacaaat

SEQ ID NO: 3586 - DNA, 3653 bp, Sorghum bicolor
ggtatatattctaatttcaagacattaagtttcagatgtcaaaaaggaaaaaggaagaatatcaaattctttgcagatctcaatagactgagcaaaaaaacatctataatcaacaaatccacttctctgaaacttacccggcaggagatgacgctgaccaccatccaccaacagaagaaacactagttcgaagaacactagcatcttgaggaacaccgatgcctccagcttgagcgtggattccagcagatccggcgaccggaccacatgtcccagcagcatggacggatggagcggatggaggacgggttctaggggcgcttttgcctcgccgtccatcagtcttttttaatcgattcattagtgagattgggagatctctgcagtcacagttgatgggggaggagatagaatcgaagggagctatggatgcacctgaatatgaacctcgatgggagataggcagcagattgttggagattaacggggaggcttggaggggatggggcatgaaagaggcgtgcttcctggaaattttggcggcgacggcggcttcacctcctcgagcgcgcgcgggagattgctgtgcgcgggagaagacgcgcgcgtaggagggaagtgcgcgggagaagagcgcgcgcgggggagaagaccgctcggtggcgcgcgagcggaagaggatggcggcggcgtacgggatccatagactcgacgctgccctcacccaacgcgagtcttgcgggagtcttccggcctcgaaccgaacgacgactcgacgtcttatatagacgtcgtttcttcatttttttactctctttcttcatttattagccagccacatcagcaaagtgcctatgtggcagtataattaatagagatagactccatggtagagtctgcattgtgagtgccctaattcaactcaacacatgtggctaggggcatcgggatactgagtgaggaagttgaagacggtgtcctcactatttttgacaagtaagagtgtcctcactggtgtagatgatgaggaagtgccgactgccaggcgcggagtcgtcgaccgccacacgctgagccgccgcccgcctgcgattcggatgaggaaactctcggaactataaaatggagtcaaaggccgaaggcagggcttgcggtcgtggttggttcgttggagtttggaggaggataaggctggaaatatattaataaaagtataacatacagtagcaccttacacactgtcaagaatacgtcgatcatgatgtttaggccttgtttagttcactaaattttttagatttgactattgtagcatttttgaatttgtaattattagtaattattgtccaattatatactgtattaactaagtttaaaagatttgtctcgcaaattatagataaactgtacaattagtacttttttatctatattaaatgtttcatacatacatctaaaatatttaatgtgatgaaaaatcttgattttttttgaaactaaataaggccttattgtctctttgaggtgtttggcatgacttcttgctactctaaaggagccagagccgtttgaagaagctataatttgtgtcttcactaaaacggtttcggcttctttattttttatttaaaaataacttttttagaaaaatatttagtaaaactcttctagagaagtcagagccggagtcggagataagccgtgtcaaatagaccctttaagatagaacccataggaaatttctcaggcgtcagaagcgaactcgcctcgccagctgaccaaaaaataaaatttattgccggcatgggatgtcacccacaatttcttggatcctcgtccaagtaacaagggctctgtagattgttaattccaacaatctgttaaaaaaaacgtgggagacgctagaagtcaatcgattcaagacaaactaaagaattgtcatcatagcagaggatgctctgcctttgtgtatatatagactccctggcacttccctccccaatcaccaagaattaagccaacgaaaaaacaaagcctactacaagtacaacattagtgagaccctgcagctccatcaatggccggaggagacgacctgaagctgctgggtatgtgggcgagcccgtacgtgctgcgggtgaaactcgctctcagcctcaagggcctgagctacgagtacgtcgaggaggatctcagggacaagagcgagctcctcctcaaatccaaccccgtccacagcaaggttcccgtgctcatccacaacggaaaacccgtctgtgagtcgcaggtcatcctgcagtacatcgacgaagctttcgccggcaccggcccgtccctcctccctgctgacccctacgaacgcgccatcgctcgcttctgggccgcctacatcgatgacaaggtacgcatctatcgcccatcaaatcttccaatcgattgccacagcttatcattcagcaatgtttttctctcacaacatattcagctaacactactttctgcgatgacttatcaaccaaacgtcgtgtgtatgtgtgggtgcagatgacgcccgcttggaacaagtcgacgatgggcaagacggaggaggagaaggctgagggaaaaaagcagtcgctcgtcgcgctggagaccttggagggggcgctgagggactgcggcaaagggaagcccttcttcggcggcgacagcgtcgggttcgtggacgtcgtgctcggcggcatgctcgggtgggtgcgcgcggcagatgagatgcacggcgtcaagcccttcgaccctgaacggactccgcagctggcggcgtggtcggagcgctttggcgcgctggaagccgtggagccggtgatgccagacgtgagcaggctggttgagttcggcaagatgttgatggcacgtctagcggctgcggccgccggtgatgcaagcaactgaaagcgcaggcttattagattattactatcagtctgggattagctgcttgccacgtggttcagactttcaggctttcagctagtgacgaaaaagaaataaacggaacgtgctctgcacgatgtacgttgcctacttgccgttggtcagtttgtcagtgattatttgtaaaattttattttgaagtcacctggggggcacaggacccatccccattcccgaccctgaccctgcctcaccccgcgccgccaccggtggtggcgcccgcggccgccgcctccatctcccccgtcttcctccctccctccacttcccccgcacccgcctactcctcttcatccacagccctagccctctcctcggcccccaacccgccactaccgacgacgacgctgcttgccagtccgacgccgtggccccacccttgccccatgtcggctggatccaccacggctctgccaagatccgctgccttctcccttccccatgctcacgcgcactggcgcagcggcgcctgtgtcggggatgccaccattgccgcccctctgctcctcccacgcctccactccgcgttcgggggcgtgcgcgagtgcggcaaggctgcctacatcgccaagctcttgcccccattcggggacaggcctcggcggcggcgccaacgcggcggccctatctaggaacgcgctacccaccgtcccctccccggccgtgagtccgggaccctg

SEQ ID NO: 3587 - DNA, 6332 bp, Sorghum bicolor
atttacgaaactaaaaacacagctagagagtaatttgcaggacgaatcttttgagcctaattagttcatgattggacactaattgtcaaataacataaaagtgttacagtacctgttaactttaacaactcaaccaaacacccactaagttttacatcagtattggcattgttagaaatgaaaataaccgaacaaattatcgattccaaccatcattgtttcaatctgataactttcatggcagtcaccttggagagaaataggtctagggggtgttttgttgggatgttaaagtttaacatgtactgtagcagttttgtcttatttgataattagtattcaatcatgaactaattagggttaaaagatccgtctctcaaattactcttcagctgtctttttaattttgtaaatagtttatatttaatactccatgtatatgtccaaacattcgatatgacgagtagtaaactttaacaagacaaacgcctacttgtatattatgactactcctccgtactcatgcatgagaagctcgtgaggaacgcaatagaaatcgtttagcttttttttcttctcaagacgttgtcataagggcctgtttagattgggaacgaaaattttttgaatgtcacatcggatatgtcggaaggatgtcgggaggggtttttacagactaataaaaaaacaaattacatagctcgtcaggaaactgcaagacaaatttattaagcataattaatctatcattagcatatgtgggttactgtagcacttaaggctaatcatggagtaactaggcttaaaagattcgtctcgcgattctcaactaaactgtgttattagtttatttttttatctacatttaatgttccatgcatgtgtctaaagattcgatgggatggatgaaaaatttttgggtggagaactaaacagggcctaagtgaaaacaaatatggtgtggtcatatcatttccgatgacttgtagagtgcgcatgggtaacatgctacatgcctgatctcaggccctctaggacggcctccagcatcagctgcctgccgtctttatttatttttcgctcgtttttttttgccgggcgaaaatgtatcactcaccgttttttttttttgggggggttgggggggggggagagacttgaggcacggatggatgttggcgcaatgaaagggttggtctgcaactacttgaggtagtactggctccaatagacagagttgcatcgcgaaaaaaaaaggtaaccatgactccataataaaaacgcacaagatagttcaaaaattacatttagaagagggccaagaagacttaagtcatggttttatcaagtaccttaatttggctttgatagaaattgtatagccatgtgactggagtgagaagaaatggaagataagagagatgataataagtttaagccaaggtattgatcaatgatatctgtacatagttcatgcccatagacgcaacaggtgtatgtacagaaatgatacaatgaaacaaaaaaactataaatgaaaaatattttcaagaaaaacctgaatattgtaatggaaagaaactagtcatctgtgctatttgtgtggggatagtcttacaagtttcaccaacatccactatgtgtttgtactagacatgcaaaagtgaaatgacatatatttcgacccttaatttctcttattatatcatcaattgctaaagaaaaccaatattactttaaaggcattcgaacacagatctattgatccaagttataagtctcaaactcaaatacttttactaaacattggtcaagctttacaaaaacataactttctctgatgaaagtatatatgttttaccgtgggatcggagtagttcaaacacggcaacgtgatacacgttttgtttctaataacagtcgacgacttcaatatatcttcctgagccaccagctgtgtctcccgctctataaatagctggcctgcccgctcagccatcactcactcacactcatcacacagccaatacccacagctgctagccactcccactccaaggaacaagtagcagtttgcagttagctccgccggtagaaccgaagatgatcggaaagataatcggagacatcacgggcagcaacaagcatgcgcagctcaagggcaacgtggtgctcgtgcgcaagaccgtgctcggcttggacgtcaccagcatcgccggctccctcctcgacggcgttggcgagttcctcggacgcggcgtcacctgccagcttatcagctccaccgtcgtcgaccccagtgagcacagacagcaccctccctcccctgccggacttccttaattctctccctctcagttctcttgcatgcatcagtaacaactaacaacagagtgaaaaaaaatgtcgttttcaaaaacaatataatatgacgaaaacgaagatcaatccactttaaatctacttattagtatagtaaaccggatctaggcaaaaaaaagatcggataatgctttttattaacatattaggagcgcacattttacacgttggtcgtctgtgggactctgaatccatggtactgtggcgcgcgcgtgcagacaatggcaaccgcgggaaggtgggcgcggaggcgagcctggagaagtggctgctgaacccgccgccgcttctgtccggcgagaacaagttccacgtcaccttcgactgggaggtggagaagcagggcattccaggcgccatcatcgtcaagaacaaccacgcctccgagttcttcctcaagaccatcaccctcgacgacgtccccggccacggcaccgtcgtcttcgtcgccaactcatggatctacccgcagtccaagtaccgctacaaccgcgtcttcttctccaacgacgtgagtagcgcgccgcccattattccaatgttcgtcagcaaaccaaggatctgagcagagtctcttgacatgaattctctcctctctgcacgaacagacgtacctgcccagccagatgccggcggcgctcaagccttaccgcgacgacgagctccggaacctgaggggcgacgaccagcaaggcccgtacaaggagcatgaccgcgtctaccgctacgacgtctacaacgacctcggcctgcctgacagcggcaacccgcggcccgtcctcggcggcaacaaggagctcccctacccgcgccgctgccgcaccgggcggaaacccaccagaaccggtgcgtgtcctccgatccctttccttcgttttcttccccgtttttaagttaattttaacctacggacgccggccggcagcaattttaacttaattttgatgatgacacgacgacgacagaccccaacagcgagagaaggctgacggtggtcgagggcgacgtctacgtgccgcgcgacgagcgtttcggccacatcaagaagtcggacttctacggctacgcgatcaaggcgctcgtgaacgccgtcatcccggcgatccgcacctacgtcgacctgtcgcccggcgagttcaactccttcaaggacatcatcaagctctacgagggcggcatccagctgcccaaaataccagtccttgaagacctgcggaagcagttcccgctcgagctcgtcaaggacgtcctccccgtcggcggcgactacctcctcaagctccccatgccgcaaatcatcaaaggtcgatcatcgctgcgtgcaaatgatgcggagcttgcctttacttcagtagtcgttattatatatatatgattaccaatgtcatctcgattattctggctatatatgcagaggacaagacaggttggatgaccgatgaggagtttggacgggagattctcgccggcgtcaaccccatgatcgtcaggcgtctcacggtgagggaacaacaatgcatcctcgctcagtagacttggaacatggaaaagttgcaactcaagaataatatatagctagtatatatgacttaaataattctacccgggcggccgtgttttcaggagttccctcccagaagcacccttgaccccagcaagtacggtgaccacacgagcaccatcacggaggcgcacctcgagaacaagctggagggcctcaccgtgcagcaggcgctggaaggcaaccggctctacatcctggaccaccacgacaacttcatgccgttcctgatcaggatcaacaacctggagggcaacttcatctacgccaccaggaccgtgctgttcctgcgcggcgacggcacgctggtgccggtggccatcgagctgagcctgccggagctccgggacggcctgaccaccgccaagagcaccgtgtacacgcccacgtcgaccaccggcgcggaggcctgggtgtggcacctcgccaaggccttcgctaacgtcaccgactactgctggcaccagctggtcagccactggctcaacacgcacgccgtcatggagccgttcatcatcgcgaccaaccggcagctcagcgtgacgcaccccgtccacaagctcctgctgccgcactaccgcgacaccatgaacatcaactccaacgcacgccagatgctcgtcaacgccggcggcctcttcgagacaaccgtcttcccgcgccagtacgcgttcgagatgtccgccgtcatctacaagaactggaacttcaccgagcaggctctccctgacgacctaatcaagaggttaatctggcgtgtgtagttaactagcattgcgcacagtgacgctaacaacactaacgcacaaatgtgcaataatatgcaggggcatggcggttgccgatgcatcgagcccgtacaaggtgaagctgctggtggaggactacccatacgcgtcggacgggctggcaatctggcacgcgatcgagcagtgggtgacggagtacctgggcatctactaccccaacgacggcgtgctgcaggcggacgtggagctgcaggcatggtggaaggaggtgcgcgaggtcgggcacgccgacctcaaggacgagccatggtggcccaagatggagacggtggcggagctcgtcaaggcctgcaccaccatcatctggatcgcgtcggcgctccacgccgccgtcaacttcgggcagtacccgtacgccgggtacattcccaaccgtccgtcggtcagccggaagccgatgccggcgccgggcagcgaggagtacgcggagctggggaagaacccggagaaggtgttcgtgcgcaccatcacgagccagttccagacactcgtcggcatctcgctgctggagatcctgtccagccactcctccgacgaggtgtacctcggccagcgcgacacgccggagtggacgtcggacgccaaggcgcaggaggcgttccggcggttcggggcgcggctgaccgagatcgagagccgcgtgatgaccatgaacgccgacccaagtctcaagaaccgcaacgggccggccaagttcccctacacgctgctctaccccaacacctccgacaagaatggcgatgccgccggcatcaccgccaagggcattccaaacagcatctccatctgagttctgagttctgagcgcgaggtccatacggaagccgcagcagttgctctcttcagtcccccaataataaagttattatcatttgtgttccatctatttttctcttaaataacggagtatgtcatcatcagacatgtaaaagaaggttatgtaggagtatttcacaatgtgaaagggggaaatgaactgtattgtctcttgttttttattaaataaaaaatcgggttgtattttgtgtaagcaagatggttgagtcattccactcttctctttcatatattgttggctgacaagttaccagtttaccacacaacttcacaggacattttgaaaagggcatataattaaaaaaaaactctgcatctacggatctataatatagcacatgcccacatggtccacacgacatgacacttaccgcttcttgctatgttgcgtaagctgttcttttgaaaaaaattgctagatgtgtggagaccttcttctattattataaatctaaagataagagaacgtgtggccacgacgctgtccgagggtggccacgttagtgaaatgaatgaaggccgttggatttggtgatcgacggtgctattgtttcctcccatgtcatatatatatataccggctctaaccctagctctctcaccctcctcccattgcatcctctctgcggtggctagtgctgacctcgtgcgcgggcttccgagcaagggcgccgtagttctctctgcggtggctagttctctccctccacctcttctccttttccatccccctctcgacacta

SEQ ID NO: 3588 - DNA, 4995 bp, Sorghum bicolor
gtattttaaatatttttcttactatcaacacataaaggagcaacaagcatcacatcaaaacatatgcaccagcatgtatgcataataatattgctaagccttatgataatttttaatttaatgaaaaatattattttttctatattttcatgagcacaaaaatacaaaattaaataattttatctatatttcaaaaggagtaaattttagggtgttacacgaacaaggcgctgcgaggaaaaagggaaaaaaacacgatgatgaaaaggaaaaataaaaaacacgtagctgattgttgcgcgggggaaaaaaagagaaaacttactcgcagtttttttttcttttcgcaactagaataaaacttccccgcaattcaaagctcctcctccttatcccctgccctgattcctcctcctcgcccgggtaaaaccaacgccacgcatattttcccttcccctcgcccgcccgtccgcagtccacagggaaaagcgcgcggcgcggtgcggcgcgcgtgggacggacggccccgcgcgcggtcaaacgcagcagaatccctgccgctgggttcccccttgccacgcctcactcacgcggccgtcgtgcgcccgcgcccgcgccccggccccagcagccgcccccgcgcgtttgaaacccggcgacccccgtccagcccctgcagccagcaccagcggggccgccgcagcgaatcccagatgcgcgcggcgggcgcatgagtaaactggaaactgcatacaaaaccaggggagaagtccgatctcgcgggtcgcggccactccccgccgcgcgatggccgatccaacggcctcccctctctcgcaacggaacaagggaaggatcaaagagcgtgacaccccgggatagccgcccgcccgcccgctagcctccaacccaacaaccgccactggtaacgccacattgggcccaggcgtcagcggctgcctgcgatgcgactgtgaccaagcgggccacgctcgcgattaacgaacagggccccgccgcggcgccagccacgaacaaacgaggccctctgaaccagcccagcctgagacactgacgactgggcccgttttgtaccacacctaccccacggtacagtgggggaagtgcctgactggtgaagaagagttctggcacgccagccagccagccagccagccacgagaagggggaggacgggagaggcacctccaccaccaacaaaaggcaagcggggggagagcgaggagtggaagccaaaagggacgcgcggcgggcaggcgtacgggccccaccggaggcagcggccgctataaaagagggctcggcgcggccccgtaaccctcgcctcggtcacgacgcgcagccagtcgcacggtccgcatctcgcccgcccccctctcccgtcctccgcttggccgccgcccgcatccgtccgcctctcctcgtgaacgagaccgacgagcgagcgagcgagccagcccgcgaccgtacccgagagccgccgccgtcgtcgccgtcccaccccgactcctcctgaccgccggcgtggggtgcccgggctcctccaccggcgacgacaccttccccgccgtgcgcgccaccaccgcctgctccgtttgcgggggtagccggggctccggcctcggcggctttcaaagcccccttcctcacaacaggatccaaaatcccgtcctagagttcttctacctccctttccagaactttctcttttggcatccctcacgatcgatctcgatcccccccgcttcgatttcgatttcatctcttcttgttattgattggtttttctagcttctttcatatatcattttgaattttgattccttccttcttccccagtagctaatccgatccaatccaatcccccgttccatttcgttcttccctgttcatcatccgcacccagctaacgcctcccagaacagcaattttatagcacaggaaaaaaaaaccaaccaaatcctacccaccgcccaaaaaaaaaagaaagcctaactttattttccccatctgtggaattctccggttttttctgacgagatgcctgcgctcgccgtcgacgccacaacacccgtggcgcacgccatcgcatcatgcgacgcggcggctcgcttccctgccccgcccgtggtgggccccgccgctgccgcagccgctgaccccgtcccgtggtcggccgacctctccgcggcgctctacaacgtggacggctggggcgcgccctacttcttcgtcaacgacgacggcgacgtcgccgtgcgcccgcacggccccgcgacgctcccgggccaggagatcgacctggccaaggtcgtggccaaggccgcgggaccgcgcgagggcggtgggctcggcctgccgctgcccttgctcgtgcgcttccccgacgtcctgcgccaccgcgtcgagaccctcaacgccgccttcggctacgccgtccgctccaccggctacggctccaggtaccagggcgtgtacccggtcaagtgcaaccaggacaggtacgtcgtcgaggacattgtcgagttcggcgcgccctttgggttcggcctcgaggctggctccaagcccgagttgctgctcgccatgagctgcctcgccgcgcgcggcaacccggacgctctgctcatctgcaacggctacaaggacgacggctacgtctcgctcgcgctcatggcacgctccatgggcctcaacaccgtcatcgtgctcgagcaggaggaggagctcgacattgtcgtcgaagccagccgccgcctcggcgtgcgccccgtcgtcggcatgcgcgccaagctgcgcaccaagcacgccggccacttcggctccacgtccggggagaagggcaagttcggcctcaacgccgcgcagatactgtccgtggtcaccaagctcaaggccattgctatgctcgactgcctccagctgctgcacttccacattggctcccagatcccgaccaccgccctgctctccgacggcgtcggcgaggccgcgcagatctactgcgagctcgccaggctcggcgccgacatgcgcgtcatcgacgtcggcggcggcctcggcattgactacgacggaacccactcggcgcagaccgacatgtcggtggcgtacagcctggaggagtacgcgacggccgtggtggccgccgtcggccgcgtctgtgaccgcaaggtggtgcagcaccccatcatctgcagcgagagcggccgcgcgctggtgtcccaccactcggtcctggtgttcgaggccttctcggctacggcgccaggtcgcctggacgcggccacggcctacctcctcgacgagctcaccgacgactgccgcggcgactaccgcaacgtcatggccgccgccgtgcgcggtgactacgacacctgcgccctgtacgccgaccagctgaagcggcgctccgccgagcagttcaaggagggagttcttggcctggagcaccttgccgcggtggacgccttctgcgagctcgtcgcccgcggcatgggcgcgcccgagccgccgcgcacctaccacatcaacctgtccgtgttcacctccctgccggacatgtgggccatcgggcagcagttccccatcatcccgatccagcgcctgcaggagcgccccgccgtcgacggtgtcctctcggacctcacctgcgacagcgacggcaaggtcagcgagttcatcggcgggaggcacagcctgccgctgcacgagctccccacccacgccacccgcggctactacctgggcatgttcctcggtggcgcctaccaggaggccctcggcgggctgcacaacctcttcggcgggcccagcgtggtgcgcgtgtcgcagtgcgacggcccccactgcttcgccgtgacgcgcgctgccgcgggcccgtcctgcgccgacgtgctccgcgcgatgcagcacgagcccgaggtgatgtacgaggtgctgaagcagaggaccgacggcgccacggccgccgccctcgccagagccttcggcgcaatgccgtacctggtgttcgacccggaggccgcggtgttgtccagcggcgagagtagcggcatgagcagcgactcggaagggtcagccgccggcgccgccgaggaggaagacgatgaggagtgggagttcatgcgcggcctcaccgtctgatgcatggctgcagcagcagcgcccctgttcccgtgtccgtcctggtgaaacaagtccagtcgccagcaagttgtcaagtcgccggccggcgttggtaatctaacccccaccgcccggtgttgtatcgtgtcatggtcgtagtcgtcgggtgtctcgtcgtcgccggagttcatggcgccacctttttattccgaatgcgtcagtgtccactgttcgcctttttttttatttctctctttttcttccatgggaataacatgaaggaactaatagcaagtttctctgcaactgttatctagtttcgtttttcaagaattcattcagcttttgtcaatgggatatccatccatggttgccttgcttgtttctttctgtgattgttcttctccttttgctttgaaaatgctatcggcgatccactggaaacctcgagcggtgctcccatttgtccctgagcttttcccgagagaaaaaaagggtgctttccaagattctgggcttctggcggccatgagcagcaagacacagataaactcgaaggcaagatgagcacggcgccgacgtcttcgtccccgtcgtcgtcgggacacagtatcatccgagacgtgtacggtgcagccggggaaagtaacggcaaagtcggcggccttgtcgccgtcggctcggccgcccggctctcgccttcctctttcgtgcgctctcgtagctttctccggcgtcgcgtcgagggcaaggcagggcaggtgtcatggccgcgagcgccggaatctctggataaaccccgagatattcggacgtcacgcggtgggcggcggcggattccaacgc

SEQ ID NO: 3589 - DNA, 6511 bp, Sorghum bicolor
  misc_feature (3226)..(3325): n is a, c, g, or t
tgggtgagttgaaccataatatccattggtgcaccgcaggtcaaaaatttatttaaatggtgcagctgctccatttgacaacaaatggatcaatggatcggttgcggttcgatcaaggttgaaccacccccatgttgaacggcaggtgagaaagcgatcttgccggctgccagccaacctcttttacgtgggccttgtttaacaattttattttttttgacaaatattatttaattatagactaactaagtttaaaagatttatctcataatttataggcaaattatgtaattagtttttattttttaactatatttaatgctttatgcatatgccgcaagattcgatgtgacggtgaatcttgattgtattctttatatcaaaaaagacccctcttttattcacattttcatcaattccagacacaaaaatgttttaaaatatattaagatcttgtttggatgtaatctgcatcacacgtatgttaggatgagttagggtaaaaattaaattgaattacacttaaatttgccccaacacatataaattgagatgaatctgataacatttcgataagacttaaaaacggatgagtgtgtcgtaagctcataatgcatgcgatgatgcaacttatatattaggataatgtaggttatgtcgtgcaacttgtgtaggtggttgtggttggtgaatggatattattagaccactcacatttttaatgctgcttattattaggcgttgttgtcaattactatcacttatcaaatcactcccttatctaccacctccaaattactataaacttatagaaaatacatacaatatttgtaatgtctaaataaatttattaaaaaaataaattcaaaaatctttttaacgacactattttttataccataaatgttaatatttttaacatatattttatcaaagttatttcttaaaaagtgcaaacatcaataattatatagaagtcatcctcgcttcctaagaaatcaacttttttaaacttttatcaattatatatataaagaatattaatttttgtaatacaagtagctaatatcattagatagattgttgaatatactattataataaacttatttggagatataaatattatatatattttctataaatttaattaaatttaagaaaatttaattagcacgtatcgcataatgttatgtggaacgggaggagcatctcgtaaggaaggcagagttctcgatttctgccattcaaccttgtaatattcccacggaatgaataaaaaaatatgtacataactactgcttattgatcgctatatcttcatggtgcgtgctgctgcaagtttttgatctatctcccactgtggtggtcctcaactaattaaccccacactgttatggacactggcacacctattttgacggttggaacttggtgaaatacgatccatgagcaacaagaaatgagctgctcatattcctctaaagacaaaggaaccatcatgtgtgagagagggaaaaaagcagaggccttgtttagttcaacctgaaaaccaaaaagttttcaagattctccgtcacatcgaatcttgtgtcacatgcatgaaacattaaatatagactaaaacaaaaactaattacacagtttagctgtaaatcacgagacgaatcttttgatcctagttagtttatgattggataatatttgtcacaaacaaacgaaagtgctacagtaccaaaaacttttcacttttcggaactaaacaaggccagagtttaatgtgctactattagtattcccacaacaaaaaataaaaaaaattctggtaatacactagctgcatggtactgcaagattttgatcaagcacacccccattgtggcagaccggcagccagtcaggcacacctattttgaatttttgatttttcatacaaaaaaatatctccagttcggggcagtgggtcccacgcggcgcctcgtttaaaaccctcccactccatgatgatgatcccccgctccttcagtcatctcctcctccccaagacacccaccaaccccgtccagccgccggctgtctcggccgccgccgccgccgccctctcccggtccctgaggcgcgccaggtcggccatggcgttcaacaagatccaggtcgccaaccccgtcgtcgagatggacggtaagcggggatccctgtcctgtactgtactgttcccccacaacagatctgctgcgctccgtcgtttgccttgcgccgcgtcctctcctccgatcgctccagccgtggccttgatctcgtagatcaccttggatcagatacgctaggctagtgcctggggtttgggttggttcaccccgcgattaatccagcttgcttgcttacattcgttgctgaattttgcgtgcaggcgatgaaatgaccagggtgttctggaaatctatcaaggacaaggtaatcggagcatgtctggctctgtcttagatgctgcttcccgtgctgttgttctttgagataacatctttgcttttccccctaacactggttgctgggatgttaatttcctgcagcttatcttccctttcgtggacctggacatcaaatactttgacctcgggcttccatatcgtgatgaaaccgatgacaaagtcacagtcgaggctgcggaggccacactcaagtaagaattgcacgttactgtcacttccttaagaaagtgaaaatggaaagcaaagcacagaaaagattgttgcggctcaatattatttatatccaatccagatgctcaagtttgtgtttggatgcgtagtctaacaagcttgtagtttgtggtggattatacatattcgattcaaccatttaaccttttttgcataaattatttaattactggaaaggacttccttgagaaagtgacgtatgtttaagggtctttcttctactcagtctgttgcttatccgttgtcgattcagtagtttggcgttgccagtggcggaaccagcgagtttgattatgggggggccgaacaaatatggttatactttttagtgtgataaaatatacataattatatgtttgaagaacttttcaaaagaaaaaaacactatttcttaccaaaatcatcatatttgaaaacaataggtgaaattgacatttcttgtactataaatattattatttaccgatgtttaaaggaatggctgggcttgggggggggggtgtttnnnnnnnnnnnnnnnnnnnnnnnnnnnnnnnnnnnnnnnnnnnnnnnnnnnnnnnnnnnnnnnnnnnnnnnnnnnnnnnnnnnnnnnnnnnnnnnnnnnntttctattgcttatgctcatccattattgcgtaggtacaatgtggctatcaagtgtgccaccattacaccaggtatatttgtgagttattgttcttcggacaaggttttaagacattctagatttaccgatatcacatcacatcaaaatccatggcagacgaagcaagggtgaaggagtttggcttgaaggccatgtggaagagcccgaatggcacaatcaggaacattctgaatggtaagatgctgctgcggcctgtaactataaccttctccagacctcgggactgacaattttattcctgtgctcactgtgtgtaggcactgtgttcagagaaccaatcatctgcaaaaacatcccaaggcttgttccaggtaccgaaggaagaccacaatcatggccatagctactcatttatgtaatcttgtcttgtagactaaactgttggcaaattcaggctggacaaagcccatttgcattgggaggcatgcattcggtgatcaataccgggcaactgatgcagttatcaagggacctggcaagctcaaattagtttttggtatgtatcagtcactcagcatttgagtaccaatggaatgcttatcctattaaacttcctagttgcaattcatatggtgcagtttctaagcttctgttcatctgttgagcgaaccctgtgaagaattgacctcttcccttttgtcctttgttttgttattgacagagggaaaagaagagcaagttgaactggaggtgttcaacttcactggtgctggaggagttgccttatccatgtacaacactgacgaggtacagttagtgcttgctactattccattaattgacatatataatgtgcccctcttgtgatttatcatcttagtatttgtgtaactatgcagtccatccatgcctttgctgaggcttctatggccactgcttatgagaagaaatggccattgtaccttagcaccaagaacacaattctgaagaaatatgatggcaggtaagggtcttgctaaactgttttttaattattttcaggtcttgatggtgccttttccttggcgaagcatgtttatctgtgtacttgatttgttcacaggttcaaggacattttccaggaggtgtacgaagctggttggaaaaccaaatttgaagctgccggcatatggtataattccctattcctatttccatctttggatttaacaaggtccgagccccaaggccgttcttctcatttggtcttgatgcttttaggtatgagcatcgtctcattgatgacatggtagcatatgcacttaagagtgaaggagggtatgtctgggcttgcaagaattatgatggagatgtgcagagcgatttcttagctcaaggttacaatttgcctgctgccagtttttacagcctggactcaagttttatgtaacttgcttgctcttagttaatacgtgttgtattaattatatgagtctttcattaactgcaggttttggctcattgggtttgatgacatcggtactggtaggtcactaaatttgctttcagtacttgtcatgataattgatgtctgatcaatcaccaggcacattgtttctgagttgtcagataacaagaaaattagtgatgcttctagatttttcaagtgtttagattacaggtttcagatgagcactgcaacttttgtaaatcagaatgattctaatctggttcatgtaaccttgtcccaggtgtgccctgatggaaagacgatcgaagctgaagctgcccatggtactgttacccgtcattaccgtgttcatcagaaaggaggtgaaaccagtacaaacagtattgcctcaatctttgcttggacaagaggacttgcacacaggtttgtatgaccattgagtacagttctagtacttctttgagatgcatcagttcagattcattcgttatctgggcctacaaattttgcaacctccaattggtgcagtaatcaaccttcccctttcttgtgtggtttagggcaaagcttgatgacaatgctagactacttgacttcacccagaagcttgaggctgcctgcattggggctgttgagtctgggaagatgaccaaggatcttgcccttcttgttcacggatctgcaaagtatgtgactgcaattttcgtattgctgctccatacaagtgcatcttcagcctgcatacccttcttgattttctactgactgatgtctgttgcagtgtcacgaggagccattacctgaacaccgaggagttcatcgacgctgttgctgatgagctcagatcaaggctggcggccaactcaaacctatgaaatccttgctgaagttctgatgcttccttgcacgacgattcgagtcatttttcttatgtcgccattttctatccttgtgccaccaccctgaaaggctgaactaggcgaatatctgcaggctgcagcagtatgccagatcattaccaatgagagattgtgctagattccgcgattatggaactcatataccttattatctgatacattttacgttttttaaaaaaatatctgatacatttcaataaagtccattcagaatgcttttctggttgtctcttcatcggtgcccgattttgtgctaaacattgtaattcggtgtgatacttttctgacaagttcctgcggactgcagttgctttacacatgtgacaagcagtgcctgtagattgtagttgctcaatgtgacatgtcacgtttccttttgcatgcacgagtgcctactgcctgtagtagactgtagattcttgacggtgatagaagaggccggcggccacccataaggcagcgactgcccagatggcgacggtagactctggactccggaggtcggctgagctcgacacccacaacgactgaggcctcgtttatatcaaaaactttttagatttaggttgtattttgtaattattgtccaaccataagttaattacagacaaactatgtaattagttgttttctatatttaatactacatgcatataccgtaatattcgatataatgaaaaattttaaaatttttttggattttaggtgtaactaaacaaggctaccttctcattttgtttttgacgattgtaccttttcgttttgttattgaaatgagccgtggtacctattttacgcctctctctagagatga

SEQ ID NO: 3590 - DNA, 3422 bp, Sorghum bicolor
tttacaaaatttgaatttcaaattttacaaattcgaacatagttttcgatgccaacataatttcaaatgaagaaaattatcaactacaaagttttataacttttcgagatctacaacttttattttggtattttttcatacaaggtcatttgaaaaactcaaaaaatcaatttaaaattatttttacaggcggtgttttaacaaaccgccactagaaagtggtagttctattaggagaaccgccagtgaaaatggttattcattagcggttcttgcgttgggcctgctgatttctttttatagatgttttttaattgaaaccgcctgtaaaaaaaccaccgccagcatagagcttttttttactagtgagtataagtatatattgataattaatttgtagggaatagaaaatagaaaaaaattaaaagaaagtaatgcagctcaaggtaaaaattaaacctgcaccgtcttagtttaggaatgaaaaggtaaatcaagaaattataggaaacataaaagtcagatgattatgagaatcgaagaactagcacactcattgttgagcaagggacgtaataatacattggaccacaggctttttttttccaaatgaacgtacgtggcgccccgttaatgggctccagtggcgtggataagaattaagaagcttccaccagttggtttatttggtgaaactcgggcctgtttggtacagctcacaacagctgtatgttttcttgtgagctgttttttcttgttaaacacttatttccaaaatagctttatggttgaagctctgttttctctcctctcatagagatatgagttgggatgaagctgaaaaagtagcttattgcagcttcctcctttatttctctctttcaactatgcaggcgcgttccggagcccgtgtgggctgtgcgaccgagctggacctccaaaattcatgagccccaaaatttactaagtgtcctaagtatatataataattttaggtttattttaattagtaaattaatcacatacactcaataaacgtggtctgctacttccttcaagagaaagcacattgagtctatgatcctaagttagaaaagtttatagccggtaattcttcttcacacaagtttgtaaccttttgtgagtttatggctttatcccttgaacttatttctcgcccttggtgttgttcgtcgctcaagagtcgagacctagtagcaatcctagacgaccggacccagattaggacgccagacggagatcattgtctggtataaattccatgcacaatccctattatatttagttaatcttttatacattgcctttgtagtatatttatatttgatattatcttttttagattttgacaatatatatgctaggtctccacttattgttttgaactgagcctcatatttgtccaagacgcccctgcaactatgcgcatgaagtagttgatgaagctattttaccaaatattttttccaaaacagcttagcttcatctagaaagttgtttataaagctatttttaaaaaatagctttactagtgaagttgagttgtgtcaaacaagactttagggagagcaaaagttatgaatgtagaaaagctaaaatggtttaacttgaaacgaaggaagcaattaataagctactcgtatgatatcgttttcaaatatccaacttcaacatacaaaaaggtaatttataacttataagcaacaaagtttaaagtgatttacaaagtaaaacaaccctaaaacgcgcatcaatttttgcagatagctagagtagaaggaatatgtgaggtaggtatatacacgcatgccataatatatccatctgcttccgtgacttgagttaatacgtactatcgttatcctcttcacatgcatgtttagtcatgctaatcccccaccacccactgtgtaattaatggcgtgttgaatcgcctataaaacgccctccaagccaaccatccgatcctatcctcacacacagccaactggtagccaagtggagtgtagtatagcaaccagctgaccagagcagcatcagcagccatgtcggaggagaagcaccaccacttcttccaccaccacaagaaggacggcgaggagcagcccaccggcgagtacgggtactccgagacggtggccgccgaggtggtgaccaccggcgaggacgagtacgagaagtacaagaaggaggagaaggagcacaagcacaagcagcacctcggcgaggccggcgccatcgccgccggcgccttcgcacttgtacgtcgtcgtcgtccacgcagatctaacttctattcgtttgttattcgtgctgaccttccatgacgaactcgatctttgtagtacgagaagcacgaggcgaagaaggaccccgagcacgcgcacaggcacaagatcacggaggaggtcgcggcggcggcggcggtgggcgccggcggctacgccttccacgagcaccacgagaagaagaaggaccacaaggacgccgacgaggccagcggcgagaagaagcaccaccacctcttcggctgaccgtaccgtaccgtaccgtaccggccggcgatgatggagctccggcctccggcgcaccacgtaccacctgttgaattctgtactgcatgcgtgttaatttgacggttcacagtaaataagtcccttttccggaccttgctaataagctgtgttgcttgtgtttgtgtgagtgagactgagaagaggtggtggggtggggccggccgtgtgcgtcgaggtgttcctgtacttgcttcaatttctctggcgtgtgtaattgtgttgaataagtgggagcgacatgatgcgccctagtcaggctcatgtgtatccgtagttgaatgcttgtactatatttgagtatgacatgtgaatgcagcacgattttattaactcgtccaattttataagttattactagcaaatatccacaggtcatgagtgagtcccacacatgacaagaagagacccccggacgagacaaggagagacacaaggatattatgggaagtaaaaagatgaacgaaagaagtctttcacacactttaatattagtagcaatatgctcgtgcgttgcaacgggaggaaaaaactactaaatagttatgcaaaactataacgtgattggtacatatgtattttatattttttttttgcttttttagtttatttcatgatgagagtcatatttataatataagttaatgctgacaataaataacaaataatctattaaacctgtattgaattaaaatacaccttaatatatttctttcttccattgcaaaacacataattatttagatataaatacatcctaactttgcaattttttatactacccatgtgtgtttctatgactcaatatcgacctttgtagcttttttg

SEQ ID NO: 3591 - DNA, 5882 bp, Sorghum bicolor
tggtgtagcttcatttgttgtttgatttggatgtaagactccatttcattcttcaatacttgtcgtatttgtttcttgaaatataaattatccaaacatttatcctgtcaggaatttaactagatcatttggatctattgcttcagctcaaggtttttaatttcggtatcgcaaaaatttcggccaccaccgaaattaccgaatttcgcgaaactcggccaaaattttgtcgaaattttttttagagattagcacatgaaatatgtttttctttttaaaaaatagatctaaacaagtatcagtatgatttataattacacatctattgaatagaagaatatgcaatataaacaatagaaaatatgagtctaaagctatatagcacatgtattagtatataatgaaatttcggatttttctttcggccaccaccgaaattaccaaaattcgtgaaacttcgatgaaatttcgctgaaattttgaaccctgcttcagcttctttaactgagtcaagtcatacttgcaggtggccacttttattattcaaaagattatgcttgatgacgcagggctagtgtatgtatgtgcttctttggaacgtttctgtgctgtagccagtgtgctaggtcagatggttgaagaactagttgaacagccttccccaaggttgctgaagcacataatccgctgctacctcaggctgacagatgaccgaaggtttatgctgtgtgctgtatgcaaatttcaattttgtgaagttatgctcatgatgtccctgttcttttgcatgcttatgcagggcttgcaatgcgctacgcagtagcctgcccaccgcgttgagagatgggacattcaacgacttaatcgaggtgatctcactatttcagtgtcagaagaatgagttatctctgcttccccaaagaagctacatgacagcatacgctgcaaattctgacccttaactgactctgaatccttgatgcaactctaggtcgatctcacggcaaggctatggcttcatcagctgctgcataacatcatgatgatgtcaaacggtgggggcggccctcaccctgtcctgggtcgtgccatggggatgtgaatatcatctgtcaagacccaagagcgtgccttgtagttgtaggtagtaagtgaccataggggaagcgatcccttttggaagggaacacttttgtgccgtttggatagcaaagagaatacctttgtaacaatggagcctagttggtgtttagcgctgtacaaagcccagtttaatttagcgtctcgaagatggaaaagggccaaacttggccggcttgcagttgcaggcatctcttatgaagtgttgcatcttcttgtcttgtgagaagtctaggtatcggtcgttagaaatttgaaacaacaatacaggtaagtttgcgttgtgaagactgcatgtttatgacaggattcaatcagagtcaggataagccgctggcttgatgccgctgccgtgtatttgtgtgtttgagagggaggtgttgctcttgctcattacaggtgtgatggcaaacggaaattccgactgaaacgatatattttcatttttcttctacatttattttctaatcaaaatgtgtctgtttagcggtgcactgcgccttctactgataaacaaatacatttcttttttggtgtgtgtgggttgatgcgcttagacctgtatcaaacactgcaggtcatgcatgcatctgcgctaggctgcattctgcgttcttttgacctgtgtgatcggagacaaggtggcccttgacacctccacaaggccgtttcagcagccacaggaagctcccgagcagccgctctcactctcagcccaccccagcggccaaatcacctctcacaagtcacaacacgccctgatcaaatccaaattagattactaatacgacccccatcaaaagcacacaagttcagcaacaactggtttgcttataaaaatgtgttagcggctagtaatcaaccaaccagatgggttgctaatcgcggttcgcaacgagccgggtgcctctgcctgcctgcctgcctgcctgccgctccaaagtccaaccagcgcgtcgtcgtcccttccgtcacctcaagagctcactttctcgccctctataaacctgcctcccgccgcgccgcccttctccatccccagatcaaaacccccccggcccggcgcccttcgtccccgcctcttgatcggccatggcgcccgctgctgctgcgtcccgggtacgcgcgtccctctccggtccgtgcgacccccatggccccccgcttccgcttcgtgctctcctgactcggtctctctctgttgacctgccctgcaggtggctgtctcgtcgccggtcttcggctccgatggcggcgccaggagctccgggatcaaggtgcgtgcctcggcgccgtccgtgctggaatctcgccccgtttgctgcctttttatgagggaatcttctgcgattgggtcggcgctgggttggtagataactagaatagttaacaacgagtagtactagattggtaacaacgagtggtcagttaaaatgtcagatagcgctgctagataggtgctatttttcacaaattaagccatcgcttataacttataagtcatgcatgtccacgcacatcttcagtaattcaggccacctgctgctgaactcggtagtgttcttgtcagtcatttatgctgatgatattgaactcacagcactctcaaatgacgataaattggtgtcctaagattggcctttcattgtgctctagggtaacaacaatgttagcttcggcaacaaatcctgggtcggcggcacattggcctgggagagcagctcggtgcggcccaggcacgtgaacaaggtgctctgcatgtcggtccagcaggcgagcaagagtaaagtctctgttgcgccactcgatcttgagagcgccaaggagccacctctcaacacatacaagcccaaggagcccttcacggccaccattgtctcggtggagaggctagtcggccccaaagctccaggggagacttgccacatcgtcattgaccatggtggcaatgtgccgtactgggagggccagagttatggtgtcattcctcctgtaagtattcccctgctccctgtcatttcctttgtctaagaacacacattagttttcttcgagaataccatctgatgtactgttagaccatgctagaggaaaagaaatattatggtctacgaatcacaacatggcatctttgcagcattattgatttcgattattcttgaaatgccatttattcatttccttttattacccatcatcttttctcttcacatcaatactctctgaaccttgagtgcattttcatctgttagggagaaaaccccaaaaagcctggagccccacaaaatgtcaggctttattcaattgcatcaactaggtatggagattactttgatggaagaaccggaagcttgtgtgtccgccgtgcagtttattatgatcctgaaactggcaaggaggagccctcaaagaatggtgtctgcagtaatttcctgtgcaactcaaaacctggggacaagattcaattaacaggtaacttcatgatggatgaaaaggcactcctatttgtttatagtgttttatgacagcctcctactcctaaccgcaatggtacttctttagatctttttcttaatgtagccctgaaattcacctggtagatgatccatttctcatttattagaatcagcacactagagatgaaaattaagacatagcaggtaaaaaaaaccctgcttccaacacattaagaaacaggaggtcgttatcagtgtcacagatttgaggcattctgatttaaccatgtgcagaacatgttactgaaacactagctactgcaacaaatggtgacatttttgttttgtttttttttcctaccaagaagcaaagattatctgtaaatatgactataaccctgcactctatttgtctgtcctgttttgtcccaagtttagtttacttatatgatatgtgatatgtcacaaagacttctgattgcccatatggtctgcaacagctacggattttcttttattttttttaaaaaagctttcttccttaagtatctctcagatatgccactgcttgtatgaacatttatatttgcctgctagtatggttgttctttcaagtttatggaagatgatggatattgtaggctagaagcatctcatatgatttcatgacctcaggtccctctggcaaaataatgcttctaccggaggaggatccaaacgcaacccatatcatgattgctactggcaccggtgttgcccccttccgtgggtacctgcgtcgcatgttcatggaagatgttccaaactacagatttggtggcttggcctggctcttccttggtgttgccaattcagacagccttctgtatgacgaagaattcaccagctatcttaagcagtatccagacaatttcaggttagaataacctcatccatcataacgcctcatttcatttactgatgctattcttgccaacaactgtgcttcactgttgacttgggtgcttgtcagtttgtgtcactgcacaacattattgtgatttgagagtgcagtgcagcatcactgaagtacttatatccagcatatttggataatggcaatatagtataaccgagtctttctgaaacatgtaggtacgacaaagccctcagtagggagcagaagaacaggagtggtggcaaaatgtacgtccaggacaagatcgaggagtacagcgatgagattttcaagcttctggatggcggagcgcacatctacttctgcggtttgaagggaatgatgcctggaattcaggacacccttaagaaggtggcagagcagagaggcgagagctgggaccagaagctctcccagctcaagaagaacaagcaatggcacgttgaggtctactagggctcgaattggttgtaattgcgacccttaatgctgcgggtcatcgtcaggaggaaacaaacacatgattgaaattgaatcgtcgaatgattcttggggcggtgtaaaatcacaaaaagttctcttggcgagaatcagaaaatcgcctttgtaattcataaagcttccgcgtcacggttatccgtggaacgggagcatgtaactttcagccgtttacatttgcagtgcagtgcttttgacagtatttccaattagaggtctctgtccagttggtacgcatacgaatcctgatgacttgaaatgtttaacacatggctcctggtgtagcccagcgtctctctgtatatgatctaaattcacctgcagtctgtcactttcattgaaacgcttgcgtttctaatcttatcagcagggggaacaaataaagaaaaaagccttttgcattgctgccgtccaatgcttgtcccttgtgcccattcactggccactctgtcccaaggggcgagcggcgatcatggccagctgctgtctactcctaccaactattggatacggctacgcggccgatacgctttcgatacgtatcagagaagtatcgaaaataaaaatataaaacaaaactgatactcgaggcgatacgtatcagcctagccacaagtcgcgctgatacaacccaacccagcccactcaagcatccatatcccttcgaccatgccgcatccgcgtcaccccatcagacacagcatacaaggatatcattaaagtaataataaaatatattttttataatgaccttgtttagagacatgataccattttttataaatttagttgaacttaagaaaaaaattacttgtttaagtataaaattgcattcttttttactgtagtac

SEQ ID NO: 3592 - DNA, 6849 bp, Sorghum bicolor
tcaaggtgtttattcatagttaggaaggatggtgagcaagttgatttttcattctggaagtgcgtcaaaggtctcatccgacaaaagtaccccatgtatgcggacagtttcattctcaggcatttccgcaggagacaagattactgaagtagttgctcgtatggttgtttcagtgtaacatttctatgatattgattttgtccaggcctttaatatcatatagtatgcgatttttgcagttgttcaaatccacgtggagtgttcctttaagaatcttactccacgcaacattaatatatatatatatatatatatatatatatatataaatggaggtggaaattaataggtttatgatcgaatcggttttctatgaaatgaactgatggagccatggagggaccagggtaacttgagtttaagccaagtaggcaactttggggcttttacccgaaattttggcaccagctccaccggtggtcgtgttgccaaaagcccaaaacaatcaaaccttggtatggcgcataatcattgtgtcatcaattccttaagtccccatttataagttacaggaatcatatagaaattagatcaattttagacgaaaaacacaggaattaggggatttctccaaaaatggccgtaagttttttttttttggctcaccctacgactttcgaaccaccctttggtcttttctgaacgcgaaacagcagcagcttgcatagttgttctcgcccaaatacgaccagcaggacgctttcaatcaaaataaaaatttacgaacacgagtgtgttttgctacgcttggctgcggcctgcgggctcgtggccgagacgcgccccccgggccgggaaggttggcgttgtccaagaggcgcccgcacagctgtctggtacatcacgatggatgggcacgtcgcccttgcacgcgcatcaaaggacaaaaggccgcccggccgcggcgtgtggcctccaaacgtgtggttggccgctggtgccaccaacaccaagccacgctgccgtctcggccgttgctgctggctagattgctagtaccggtcgacccggcgaggatcctggtccgtaccaccacgccggcccggcccgacccgaccagaagaacgcagcagagagaagccagtgcacgccacgccttgcgctcgcgccggacccgtgcgcgggcgtctcgcctcgccgacgagcaacaccgaccctttaggcggctcatggggcgcccttgcattgcctgtgtatctagaccttgcaagcatgtgtttaatttaaattagcgcgggttcgtgtctgtggcggccttggtgtgattagtcagctacgctttaactaatccacgggctcttgctcgtggccccctcccgccacatgtttgccgcgtacgtacgtgagtttgctgtccgcctcttggggatgtttgggtgggagtgggatggaatggaatggaacgacgcctcctctgcttcaggcttaagcaaaacacaggcaagcagctgctgaaaaccggggcagctcttttctgcctcttcctctgcgttttccattggtccgaaacagctgctcgtccagaacctttggtttggtggttatggagcctacctggatgtgagtgtgacagtatgtactctccagatatatttttaaaggccactccagaaaatttagttttctagaggcatataatacttgaaaatgttgtgctgttgttaacgtgagtagcttatgtcaacgagagagagggcagtactgtgtatgattgaatgagtacctgacaaaagaaaatcagcttcagagcaaagaggatacagaaaaaaaaaaaagaatataacacatgctatgcgagctgagagcccattccggtggctgcctgccatttcgtcgagctgcatctgcctgcccttttgaactccccaagagccaataaccagcgcggcgcgccccctcccgccccacgataaacaaccacacgctcgccacccatggccaccaccacagcacaggcacagcagcagcagtgccaccgccaccaccaaccatggcctcctcagcgtccctgcagcgcttcctcccgccctcttcgcacgcggcgacggcgtcgtcgtcccggcgccgcaccggccgcgcccgagcggccgtctccatgccaccatcgtctccgccggcgacaggggaggtccctgcggagcggctggagcccagggtcgaggagcgggagggaggctactgggttctcaaggagaagtaccggacggggctgaacccgcaggagaaggtgaagctggagaaggagcccatggggctgttcatggaggacggcatcaaggatctcgccaagatccccatggaggagatcgacgccgccaagctcaccaaggacgacgtcgacgtccggctcaagtggctcggcctcttccaccgccgcaagcaccagtgtacgtcctctctgcctgcgcccctgcaatgatagtgcactacttgctgctagatttcagacgagtctgttcttgatgcacttcacgtactgtatttgtgatagatactactccgtagatgattgcacagcgttgtctccgagatacaatgtctgtcgatcattgcttacggcttagagctcgcttattactgctctgtagacagtcacaacgttccatgcttccatttgatcattttcgcgcgctcatgttacttttgggctcattttggaatctgcatcttgtttgtttccctttctgagctgattaatgcatattatattagagtaattacgtcaacgtgtttgcaaagtggttattcgcatacgtatgaatatgctgcgtgggagccttgtagtcggatgcagaaaatttctgtgtcctaaaatcacaaccggtactaatctccgtattgatacaagttcagcagatctcctggcgactgttaaaaaaccccttagacataaaatgaaaaaaaaagtctcagcttggacttttagtatcttgttggcatcaagaggttggtactgaatagaagcatcctaataaaatacacctgaagagccaaaaggtcaagcatcccagttgtgcaaactgcaaagaaaatgccacgctcagcgcttgggaattgttttcctttcttacccctagtggactactagttcaaaaaccgggtgctgttttttttttttttgagggaacagcaggggaggcccctacttaaactttttgcttgtacaaattagaaggcttacgaaacctaaaagggaaagaaagaaagaaagaaaagcattaagggatatcctccaaccacagttgtagagacagttttacactttgcttggctctgatgcaaaccaggccgaggtcattttaaaatttactaattatctacttaggggtgtttgattcacttagcagctcctaaatttagtctcatttaatcctatttaatcaatttttacccaaacactatgattaaataggactaaatggcctttagtcctctttagtcactttgaagtgaagggactaatcatttatgagtgactaaagattaggaggacaaaccaaacaaggccttttagtgtaaagctagcaccatcaaagacagactctatttctagtatcgtagtgcaaattatccagcgcgttgtaatgagaacttctgtgaatatatgactgctaaaagaattcctagattcctgattcgtcatatacttttttctttatgaactggtgaaacttatgttatcctcgcggtcaaacgtgacacacaaaagttttttttaaagtacagtagctttttatggacaacgaatatacctgcgtcctgcgtcacaactaacgatctttcatactttctgttatcccgaaccagcggtttcagtttcgttctttcttggaccatccgttcattggtcctacagaggatagagacgtcttggattgggttcagttcactctgagcctgagaccgtgaggtcttgtttagttatacttaaaatctaaaaaaaaggattattcatcacatcgaatcttacgacatatacaaatagtattaaatgtaaattaaaaaataattaattgcataatttatctgtaatttatggaataaatcttttgagtctagttaatccatagttggacaataattaccaaatacaaatgaaaaatactacagtacccagaaacttttcagctagccttatttttcagctacaccccaaaatcaaaatctttttaagattctccgttatatcatattttacggtcatgtagcattaaatatagatgaaaacaaaaattaattacacaatgtacctgtaaaatcgtgagatgaatcttttaagtctacttactccatgtttagataatatttgtcaaataaaaataaaaatactacattgtcaaaatccaaaaactttttgatctaaacaagaagaagggctgagacgaaatggtgatttgctaactaacgagtccatgatgcggcggcggctgctgctgctgcagacgggcggttcatgatgcggctgaagctgcccaacggcgtgacgacgagcgagcagacgcggtacctggcgagcgtcatcgaggcgtacggcgcggacgggtgcgcggacgtgacgacccggcagaactggcagatccgcggggtgacgctcccggacgttccggccatcctggacggcctccgcgccgtcggcctcaccagcctgcagagcggcatggacaacgtgcgcaaccccgtcggcaacccgctcgccggcgtcgacccccacgagatcgtcgacacgcgcccctacaccaacctgctctcctcctacatcaccaacaactcccaggggaacaccaccatcaccaacctgtgagtagtagtgtctcttctgtttctcttgttgcgttgtgccgctgaccactgtgtcaccgatctgacacgctgttgccggtaactgcaggccgaggaaatggaacgtctgcgtgatcggctcgcacgacctgtacgagcacccgcacatcaacgacctcgcgtacatgccggccgtcaaggacggcaagttcggcttcaaccttctggtgggtgggttcatcagccccaagaggtgggctgaggccttgccgctcgacgcctgggtcgccggcgacgacgtcgtccccgtgtgcaaggccattctcgaggcgtacagggacctcggcttcaggggcaaccggcagaagacgcgcatgatgtggctcatcgacgaactcgtaagtaatgctgggctggcaagtgttggctggtcaatactccgtagcaaagaagaacaatggtggttgacacgatgcgtacgtacgtgcaggggatggaggtgttccgatcggaggtggagaagaggatgcccaacggggtgctggagcgcgccgcggcggaggacctcgtcgacaagacgtgggagcggcgggactacctcggcgtgcacccgcagaagcaggaaggcctgtcgtacgtgggccttcacgtgcccgtggggcggctgcaggccgcggacatgttcgagctggcgcgcctcgccgacgagtacggcacgggcgagctccggctcacggtggagcagaacatcgtgctccccaacgtgagcaacgagagggtcgacgcgctgctcgcggagccgctgctgcggcagcggttctcgccggagccgtcgctgctgctcaaggggctggtggcgtgcacgggcaaccagttctgcgggcaggccatcatcgagaccaaggcgcgggcgctgcaggtgacgcgggaggtggagaagcgcgtgtccgtgccgcggcccgtgcggatgcactggaccggctgccccaacagctgcggccaggtgcaggtggcggacatcggcttcatgggctgcctcaccaaggacagcgacggcaagatcgtcgaggccgcggacatcttcgtgggcggccgcgtcggcagcgactcgcacctggcggacgtgtacaagaagtccgtgccgtgcaaggacctggtgcccatcgtggccgacctcctggtggagcggttcggggccgtgcccagggagagggaggaggatgaggagtaggagcaccgagcgccggctctggtttgtcctggtgatcatcgaccgaccttcctcttgccccccagagatgaggtgctgtttgttgtaaagtagacgcgctgccttcttccatatggcacacgatttgttttggtattgtcgtagcaaaaaagaatatgtccccttattcacgttacagagaatgccgataaataaagtaacacgctgccctgtcaatggtcctgctactacttacccaatggtgaatggtgattggtcgtggcactctggttattctccatctccatggcactttgaaggtgttcattgcatcttgagagagttagagggtgtttgggactgctctgcttcacgtttttcagttttgctctacgttttttagccaaacagtttcagctctacgtattcaattcaagaaaaaaaagctgaagaggtactccacgaattccagtttttttttagagctgctccatagtagagtttgtggagcagtgccaaataccccctaagcaagagtatttcaatgcacaagagggtaactctcactcgagaacatgatggtaagtgacctcactgaagtgttttcgagtaaaggatatcaaataaattgatttggtagaggttgcaaatgaaacgggctgaaaaaaacgcatggctttgtcccctgtgacagagcgttcatcatatgatccagtgtggccctcaaattattcctcaaattaatgtatgtatgcccctcatcctcgcgttgttaacagatgaagtgcttattctcgaat

SEQ ID NO: 3593 - DNA, 6666 bp, Sorghum bicolor
aatagaaacaaagatagatacctctacacctaaaaagattgtactcctctgttcacaaaagaatgcaattctcatattttgaggagtcaagcaatttgaagtttgaccaaaattgtaccgttaaattgattattaaatatattttcggtaataaatttagttgaagacataaatattaatactattcactataaacttggttagagttaaactagtttgattcgcacgcatcccatagttgcattcttttatggacgagggagtaacatgatcatctacctggtgataccaaatctcgatatctgctcctttgtccatacatgatatgaaccatcctcactcgaagcttaagcattcacatcctacctcgttcttatactaaaatcggatctatatgtctccatctaatacaaagttctcaaagctcatgtatctacatccattatcgcggttaagtctgacaaatcattgccctggtgcaatacacgagcatatatctattagacatatgtatcaataatttcttaatgaaaccaaaacaccaagcaatactagatggatgtaataaatatctttgaagttactgcactggttcaccaatttgaccaatttttatccaagtcatgtatttacgaccaatgacttgtgtcgtatacgcattggaatctggaatgacatttgaattagatcgaattctagtttgctcatgaattttcattggaatatatcttagtggcagaagcactttgcctaagaaagaatgcaattttaagtttattttaggtttttgtgttcgaactttgacaaaaaacaaagataaaaatactgatatccacatcaaattaatataatataaaaatatatctcataataaatctgataaatctattgatattgatttgattttataaatttttaatattttttatttatggttgatcaaacccaagatactttaacatcatactgtactagtgcattcttttaaccaaacatgtgaatcaactaccagcacgtatgcccagtatatgtgtaggtaggattgagtatttcgttgttttttttgactcgcattaacaaaaattcatagtagtggcccaaggaattttgcacatgatgaatacccaaagctaagccgacatggcactggattcctgtgggagttagggcttgtttaagccaaaaactttttcaaaattttttgtcacatcgaattttgcggtatatatatatataaaatattaatatagataaaaattaactaattatataatttatttgtaatttctgagatagaattttaagtctaattaatctataattaaataataattgttaaataaaaataaaagtttgtcacctcatgtatcgaggccgatatggtggctggttagttgctgaatgcaccatgcgtccagttcatgccctgatgccatgcagagaacagttaaagcactgtgtgccacttccagctggggtagaagatcccaggccccaggatcttcagtcccattggtaggtcgagtagggtgtaggtccgtatgtacaggtaaaaaagctgctgcggatgagatgcgatggctttatgattaaaatccaaaaacttttaaaatcaaattgctgcccctttgtggactatcatccccagacatcgaaaagtttccaaatttctttttactccactataatcggaactctataaatataaatcaaatcaaccacttctagcaataaagctgcatcgcctggaattcaatatttcccacaccaaccgcttcacgtccgagtccacatctaactgacaggtggcctctaacagccaggtcccacatgtcagaattgggggctgcacgccttcccggtacactgtggtcttcttctcgcacctaccgcgtcgaggaaataaccgaatataatatacgcggaactccaaaggtaatattcgtactaatcctatattgccgtggtatttgtacgtataaagcgtatacgtatacgtattttattgggatcaactctcaaagagcggagccggctggacgccaacttgtttcccatccttgtccttggtcgtcgccaatatatagccgccctcatcccggcggatcccttcgtctcaatcccacaccaccacctcctccctcttcttcctcctttgggtccttcccagccgccgccggccatggcctccctcaccgacctcgtcaacctcagcctctcggacaccaccgagaagatcatcgccgagtacatatggtacgccgcgcgtttccctgttgtttatctgcacgcaacgctctctctctttgcctcgctagtcagaaagaatcgatcttgcttgatgcccggccgccttctcatggcgtctccccatccggaacatgatttggagaggggttttgggagaccgcctcatgccgtgccgcatctcttgttttattttggtgatcagtcaagcggggaggctttatttgttgattcttcttcaagtaaaaatctgttattttggctcgtttattcgcccatgaatatctggcttcagtttcggatatgctcggagagagctggagagatgcgcagtacccttctgacttttgtttgtcctgctgcgggaggatcttcccagcggcagtctctggctctctgctcatcgggtccctcaccggccaccgcaccgcttatatggtgttatgattgtatcactggccaccgccagatgaatctcttgtctagaagatctaatcgcatgtcttacgcgttaattgattcccctggtgccagtattattagtacttttttttaaaaaaaaacaacagtatttgttagtactcaaaagatgcaagtttttgttgttgttactacaaacacgtcttggattgctctgctccgaggaatatggcgagcagttgttcagtctgttaggcgatttgaccccatcttaacgcatgccttttttttttgggttgcaggatcggtggatctggcatggatctcaggagcaaagccagggtaagataaaaagattccctgcactaggaggggacggtatcccgggatactgtttgtggtggctcgtcactactcacttatcctatcacttatctctgaagtcaccatccgctgagctgttctttggcttatatacaagagctctgctcaccactaccactgcaattgaatttttttttctcttctgtttacttcccagaaaattttgcaaaatttttcacattccctgtcacatcgaatctttagacgcatgcatggagtattaaatatagacgaaaataaaaactaattgcatagtttggtcgaaattaacgagacgaatcttttgaacctagttagtacatgattggacaatatttgtcaaatacaaacgaaaatgctacggtgtccatttcctaaaatttttcagaactaaacaaggccctgatctcgttgtggttggtgctggtgcagaccctctccggcccggtgaccgatcccagcaagctgcccaagtggaactacgacggctccagcaccggccaggcccccggcgaggacagtgaggtcatcctgtagtaagtgtcatggcatgccaagctttggatgcattcttttgtttgtttgtttgttttactagcaaacatggaacgatccttatctcttgggcatgtgccaccctgtagcccgcaggctatcttcaaggacccattccggaggggcaacaacatccttgtaagttttcacttttatcatccaagtggcaattggtccaactcagatcagttcatctttgtgaggaaaaaaagtgtgtattgtttcatcaagtaaataaactaaaagttgtatgtactgtttaaataaattagtttttttaaaaaatatgcctgatgtataggttggactatcttgatgcagcactaaaggttcctgatgcaatttctctactctgaatctttgtccagttatgcagaattgcctgatccaatttttctactctgaatcttgtccagttatgcagtattgcaaattgtatataacatgatgacttggtgttatgagctttgatattcttttttttgtagttaggtttgagtatccagtgtaccaaaccatggtttaggaatccaattggtcgattcattttcttgtctaataataatagggaccactcttaggcgttcaatgaattcgtttgacttgcaggtcatgtgcgattgctacaccccagctggcgagccaattcccaccaacaagaggcacaacgccgccaagatcttcagcaaccctgaggtcgctgctgaggagccctggtatgcaaatctccccttgtatatttgtgatggaagccaaaacgatctgtctttgtatgattgattgatcatgattgtccttgcaaaatggtaggtacggtattgagcaggagtacaccctccttcagaaggacaccaactggccccttgggtggcctcttggtggcttccctggccctcaggtacaagacacgatggcttcgctaatttgcttgcttgcttaagacatgcttcatcgattcggtcctacatttgttgaagtgtcacctaaatgatgttcaatgtccatgtttagggtccttactactgtggaatcggtgcggacaagtcattcgggcgtgacatagttgatgcccactacaaggcttgcatttatgcaggcatcaacatcagtggcatcaacggagaggtcatgccagggcaggtgagatactactactacacttggcaacttcttttgtaaccctgaagctaccatgtttctgaccatggcaaacattgtggttggttccagtgggaattccaagttggaccgtccgtcggcatttcttcaggtgatcaggtctgggttgctcgctacattcttgaggtatgacatcacatcttctcagctctatatgtatactatgattgatcaaatatagcgccatcttaaccaagcatgatttgcaccacttatgttatgtggtaataacaatcggtgctcctttccttcacagaggatcaccgagatcgccggtgtggtgttgacattcgacccaaagcccatccctggtgactggaacggtgccggcgcacacaccaactacagcaccaagtccatgaggaacgagggcgggtacgaggtgatcaaggccgccattgagaagctgaagttgcggcacaaggagcacatcgcggcctacggcgagggcaacgagcgccgcctcaccggcaggcacgagaccgccgacatcaacaccttcagctgggtacgtcccccattccttcctactgttactgtgctgctgctgcatcgtggagaatcggcgaacccgtgtgccaactgttgtctgttgtctgtgcggtgcagggagtggcaaaccgtggcgcgtcagtgcgcgtgggccgggagacggagcagaacggcaagggctacttcgaggaccgccggccggcgtccaacatggacccatacgtggtgacctccatgatcgccgacaccaccatcctctggaagccctgaagcggaagctttcctccatccagctcgccgtctcgtgtcggtttgttccgcggcagtgtcccggccgttgcattgcagggtcccgtccagcgatttgcgcaacaattgttccttcccgttccgtttgcttatactactctactactgcaatttagctagaatttgggtcaggtcgtggtgtgccaaaacaaaacacataaaaactttgacgcttcccacttccattccatgccgtccgtccgcttgggtgatctcctcctaccttcttcttcttcttgtgtaatcctccaataatggccgtaccacacttgtggtacctttcagtacttgctgcatcctcatgcattgcattgtataagtggtcgctttcctacgcgctccaatgtttgtggctttcctgatgcgataagggagggaatggttagtgggtggcagcattattgtcatcgtcgcccatcggccgattggatggcctcttttaggtcagattctgaacggacgatttgtcttttcccggaaaattcagcaacaccggtcgttttacagtaattttcgctccaccagcttatcactgttgatcgtcggctccttgcccatcgcccatcggcgcatgggatgaataaattagtctgttttggtcagattctgaacggacgatttgtcttttcccccgggaaaattgaaaattcagcaccaccgaggtgtttgattttcggtggatgaacctatcactcttgtctcttgatcggttgaggtgtcactcgacacagcttaatgcttggctgttagcaagcgaatccatcaaacataacgaggccctcaaccaagggactgtttggttctggatcctccagaaatggcttcggctcagctcctgtagcagccggagctaaagccctacggtgggccctgccaaagagtaggagctcgaaattttcgtctcggatcgtggggccacatccgtacatgttgctacaggagccaccaagcactgcatggccccctccctctctcgggtcgatttgccggatcgaatacttctccatgttgattcgtctgatcggattatctggtcgaacagcaggtactagcagagtgcatgccgagagagcgagagagagagagaggatgggcattgct

SEQ ID NO: 3594 - DNA, 5933 bp, Sorghum bicolor
gtcacctgagctagatgtcaaaaaacagagcaacgagaaatggcacttgacttggctatgaactccaacatagccaatggtggccgaccggttgattcatgattcgccgttcgacgtaagcccccacagccccaccatggatttagcgaatgctccagatctgcataaactagtcgataaaccgaaaggaagcaggaaagaagcaacgggagctagctagctagctagcgtgtacactcccaggcgccgagcggtggggctcatacacggtgtccactgtccaggagctctccccaggatttcacccgggaaggtcatctctcaggcgagcatcattcagggatggttgcagctgccgcactcgatcgaacgcatgccatccgtctccactttcttgtcgtgccgtgcgctgtgcacctaaaggtgaagcaggggtcggtgacttagggctgttgagttgggcattgtttagttcaccctgaaaaccaaaaagttttcaagattctccgtcacatcgaatcttgtggcacatgcacgaaacattaaatatagacgaaagcaaaaagtaattacacagtttagctgtaactcacgagacgaatcgtttgatactagttagtccatgattggataatatttgtcacaaaaacgaaagtgctacggtaccgaaaacttttcacttttcggaactaaacaagacctcggtgaaaaattttacaaagtgctattgtagtatttttgtttgtatttaataattattgtccaatcatatactacttaggcagctaggttcaaaagattcgttttgcaaattcgagagaactatataattagttttttatctatatttaatgcttcatgcatgtgttcacaaaattcgatatggcaaaaaatctaaaaaactttgcaaaatatttcagaaaaagccttgtttagttccattttttttggcaaaacgagcactgtagcactttcgtttgtatttgacaaatattgttcaatcatggactaactagactcaagattcgtctttcaaattatagacaaactatgtaattaattaatatttttatctatgtttaatgctctatgcacatgattcgatgtgacgagaaatgtaaaaaattttgcaaaagtttttgggaactaaacaaggccaaaggctcttggtgtcaagaaacacttcgatttgcattcgcatcaaaagtagtctgtcgtagtgacccttcagcacagcacggtcacggcatttaccgaagggttgcacatctgtgacgtgtccaatttaagactatttttttttgtttcaggtagtccagctagctctatgcgatcgcgacttcaaattagcgttcgctatcagctcgggaaagctaaactatcgcgcagggatgtaccacagccagtcgaccatgcaagtgacgccgccgtttcgagtatggaaaagaaacacccgaaaatccaggccttgtttagtttccgaaaaaatttcgtaatactatagcactttcgtttgtttgtgataattattatctaactatgactaactaggcataaaagatttgtctcgtaaattttgaccaaactgtgcaattagttttttttaatttatatttaatactctatgtatgcgtttaaagatttgatatgacgtagaatctttaaaaaatttagatttttggtggaagtaaaaaggctccagtacaacaccagccgaacgcaccatgtttcctgtttccagcggccccgccccgccccaccccccaccacagcccctgcgcgtgtggtgacgccaacactccctctcgtgatttttgtattcatgtgccgcccactgtgtgcatgcacattgcaggtccaccgtgctatatacatcagggggaggtcccatgcagtagtgaaacacaacaaaaaaaagtgtgctcctactactcgtttcgccgtgctctgtcgtccgtctcgtccctatataaaccccgcaaccacctcctcagcttccaagaccagatgccactctgatcttccaattaacctcgagctctggttatactactaacaatcagtaacaaccgtccccgcaactcgtgccggttcgagtacacccgcgacgacaatggcggcctctgttgatcgtcacctggctccccacccatggccaggcaatgcgcctcccaagagcttcgacatgttccgctccggcggcccaggcggcggaggcaagcgccgcgccggctccgactccgactccgaggacgaagacaccatccccccggactggcggtcgctgtacctcccgcgcctcgaggtggagccgcccgtccacgacccgcgcgacgaggccacctcggacgcgtgggtgcgtcgccacccggcgctggtccggctcacgggcaagcaccctttcaactcggagcctccggtgccccggctgatggcgcacgggttcatcaccccggcgccgctccactacgtgcgcaaccacgggcccgttcccagggcggactggtcgacctggaccgtggaggtgacggggctcgtgaggcgccccgctaggctcaccatggagcagctggtgacggagttcgaggccgtggagctccccgtgacgctggtgtgcgcgggcaaccggcgcaaggagcagaacatggtgcgccagaccgtcggcttcaactggggccccggggccatctccacgtccgtgtggcgcggcgcgcggctccgcgacgtgctccgccggtgcggcgtcatgggcgccgcggacggcgccgccaacgtgtgcttcgagggcgccgaggacctcccgggaggcggcggctccaagtacggcaccagcctgcggcgcggggtggccatggaccccgcgcgcgacgtcatcctcgcctacatgcagaacggggagccgctggcgcctgaccacggcttccccgtgcgcgtcatcgtgccgggcttcatcggcggccgcatggtcaagtggctcaagcggatcgtcgtcgcgtccagcgagtccgagagctactaccactaccgggacaaccgggtgctgccgtcccatgtcgacgccgagctcgccaatgccgaaggtatggtatctgcctgcctcgttcatccatcgatcggtcactttgtttgttctggtcaccgacgtgcgcaacgctaataaacttgttttttttttggtgggggatggtttttgtgcagcgtggtggtacaagccggagtacatgataaacgagctgaacatcaactcggtgatcaccacgccgggacacgacgaggtgctgcccatcaacgccctgacgacgcagcggccgtatacgatcaagggatatgcatactccggtgagtcagcatttcatcatcccatcctgcatcacccgtgccgccgcctcatgggaatctttaggaggaggaatctgaatttagtttgagctcgggctctctccatgtaaaagcccagtcaagaaacaacgttttgggcttctgttgggcctttttttttttaaaaaactcgtttccttacctttccgcgtggtgatgactctgttggcaggtggcggccggaaagttacacgggttgaggtgaccctggacggcggcgagacgtggcaggtgtgctcgctcgaccacccggagcgcccaaccaagtacggcaagtactggtgctggtgcttctggtccgtcgacgtcgaggtgctcgacgtgctcggggccaaggaaatcgccgtccgcgcctgggacgaggccatgaacacccagccggagaagctcatctggaacctcatggtgagttaccgcggcgcttcattgtggcgtcgttttccgatgcttgccctccactccacagctgcgttagcttaaatgcacgcacacctgcagggcatgatgaacaactgctggttccgggtgaagatcaacgcgtgccggccgcacaagggcgagatcggcatggtgttcgagcacccggcacagccgggcaaccagccgggcggctggatggcgcggcagaagcacctcgagacgtcggagagcgcgcagggcacgctgaagaagagcacgtccacacccttcatgaacacggccaccacgcagtacaccatgtccgaggtgcgccgccacacgtccccggactccgcctggatcatcgtgcacggccacatctacgactgcacgggattcctcaaggaccaccccggcggcgccgacagcatcctcatcaacgccggcactgactgcaccgaggagttcgacgccatccactcggacaaggcccgcggcctccttgatttgtaccgcgtcggcgagctcgtcgtcaccggcagcgactactccccacagaacagccacgccgacctcagggccatcgacgaggcccctgctgcagccgcgccggcggcgcagtcggtgtcgaccgtcgcgctctccaacccgcgggagaaggtcaggtgccggctcgttgacaagaagagcctgtcctacaacgtgcgcctcttccggttcgcgctgccgtcgccggaccagaagctcggccttcccgtcggcaggcatgtgtacgtgtgcgcgtcgatagacggcaagctctgcatgcgcgcgtacacgcccacgagccccgtcgacgaggtcggccacatcgagctcctgatcaagatatacttcaaggacgaggaccccaaataccccaacggcgggctcatgtcgcagtacctggactccctgccgctcggcgcgaccattgacatcaagggccctattgggcacatcgagtacgccggccgcggcggcttcgtggtgaacggcgagcgccggttcgcgcgcaggctcgccatgatcgccggcgggacgggcatcacgccggtgtaccaggtgatccaggctgtgctgagggaccagcccgacgacgacacggagatgcacctcgtgtatgcgaaccggacggaggacgacatgctcctgcgggaggagatcgaccgctgggccgccgcgcacccggcgcggctcaaggtgtggtacgtggtgagcaaggtggcgcgaccggaggacgggtgggcgtacggcgtggggagagtggacgagcaggtcttgagggagcacctgcctcttggagacagcgagacgcttgcgctcgtgtgcgggccgccggcgatgatcgagtgcacggtgcgcccgggcctggagaagatggggtacgacctcgacaaggcttgccttgtcttctgatcgagctgaagcctggcagctaacaacaacggatgtcgtgcaagatgaaactgtacatagaaatactgcgtcttgaaccctagtagcgtgtcagatctagctataacactctaccgagttcttgtaataatagcgagttaaagtagtttgtaactggccatgtcctaaagcgcaataaaaactcgaaggccattgcaattgcttggtgagattcgctctcctacaggctcaccaacatggacggcggtgtgcgaccaccactgggatgtgtgatgtatggtgacgaaaaatacttcaacaagtcacattagaaaaaacaaaccttcttcaaaaaactttgttatagatttattcaagtttatgcttgttaaatcttaataaatctataactaagttatacatgatctaatgagcatgaaattttactatagtttaaacatataataattagcacaacataaaaaattcaccacaattggactatacaacatatacctatgaattattcgaattaattatagaaaaacataaatctaaagctataacaaaaaactttgtactaaagcatatcatattatatgttaactgtgtagatctacttagctgaagtccaacaaaatcatatttactattttatgaattttatgtgatttactataattttacaaatattcaacggaaataaataaaaatgaaaaagacaaaactgccttcaaaac

SEQ ID NO: 3595 - DNA, 3750 bp, Sorghum bicolor
gtctattcgtgacatggcacgcctatcccttgcaaacttttcactactaccagtacaacagtggggacacgtgtacctatcggctgctttatgcccaaagtgccattaaagtatgcttgaaatccgatgaaccaaaaccgtggaccatcaccgccggtatcccgttcccaattccacagatttccactccccactcccagagtcccagtacttataccaccgaaaaaacaagcaaaatcccacctcccaaacctcaaaacctggagctcataggcaagaaactgggaagggagattcgatttgggagggcagattcgatttctgctattctttggaggagcccactggttcagccggtttcttgaaatctcaggccccaaggccaacttttcccccgttccggttggacaactgccgtgattgggaggtagcgatctctggcgtgtccgtttgtttgttcttgctgtgttcttgcgcagaaagataggatcttgcgaggtgaacctctgctggttgcctgaccggatctcgtgtttcttttgtttcttgcaggcattgccggcgactggagattcaatcatcgatccttttctaggtaatggagctttttggatttgttcctgccactttctggttgagatttgctatttgcttgttattattaagcaaggaggtcggtgatggccttacttttttaaaaaacttttcttgcgaaataaaatgaatgaggatctcgaccaggatagtttagatggcctggaggtgtttgtaatcattgatgacagagaaatgttccagattaggagttacaaagggggtttggagtgtttttttggtataaacggaatgttcattcttactccctttcctgcctggttgctgacatccgggatgctttgttcggcattcatgaattttttcatcactatattattcccaaagaagggaggaaatgtcccatgtaggttgactttgctgtggaagtgtaggtactgtacattcatcctagacgccgcatcgatacatcactgatgttttgacaaaatgattgcccagcatgtttatttttcctttctattccccatttgtcatgttatctagacgcttttcagaaaaaaaaaatacaggaactccatgagagagatagttccatgaggtccaacctcatgctagttttcctgcatagggtttcatgcatctcatagtaatccaaaggaatttcacagggtttactcctttgttcctaagggacatataggaaagtttcatataggattagaatcctccgaaattcgtgtgctttttctttgttccaaagggagcaataaggtatagttcttgccattcagctggtaaagcggtgccactattttacttatgtgttcagcaacactcatttttgtaatatagtggattgacccttttgacctaaatgcaatgtttggtccattgcaaaaagcattggttgactatgggaaaaatgtcttgggtattactccctccatccacaaaaggatacaactatatgatttgtacaagtttaactttgaccaagtttatagtgaatattgaatagtttcaacatttctgtttctaactaggtgtactacaaaaatatattttgtagttaatctaatggtatgtttcttgtataaaaaatgttagtacctttttatataactttggtgaaactttaaattgtttgactcaaaaagtgagaattacattcttttgtggacggaaagaatagttgggagggacggaaggaggagcatctcattgcaaagttaatttctgagtgcaccttccatgcctatgaaatatgagctcaggcgctgcctctcaagctatatatataattaattttgtaacattgatgctatattttgtaatgcctgttctgctggctctgcaaaaatggttgatttggtcctaattttcactatgtgactttgcaggtagattgtatataaagaccacagttcagatcactgccaagcatgtctctactttcaaagttacgcttgatcaccgtggatgttactggtacactgattgcttacaaaggacaccttggggattactactgtatggcagctaagtctgctgggatgccatgccctgactataaccgtatgcatgagggcttcaagcttgcatacactgagatggccagacagtacccttgctttggatttgcggctaagatgccgaacattgaatggtggaggacatgtgttaagaattcatttgttaaggtaagaccaatttacaaatctgaagcttgtctggattagtggtttgtcttcttaatgttcagagggcctagtgattcagttgctatataatctatcacaaactgcaggctggctatgattatgatgaggagacatttgagaaaatcttcaggcgcatttattctgcttttggctcctctgcaccatactcggcatttcctgatgcacagcccttcatgcggtgggcgcgggaaaagggactcattgttggtgttgtcagcaatgcagagtatcgctacaaagatgtaatcttaccagctttagggttgaatcaggtgcaacatccactggatcacaattcacacattacattacagtgcttctataataatctataataatctgctttctttgtggtatgcatgccacatagcctactaaatactaacacacgtcttggtttgcaactagggctccgaatgggacttcggggtgttctcaggcatggtaggtgttgagaagccagacccaagaatttacaagatagcgttggagatggcaggaaacgtagctccagaagaagcgctccacataggtgacagcatgcggaaggactacaccccagctaggagcatcgggatgcatgcgctgctcctggaccggttcaagactgccgacgccgagagctggaggcagtcaggcgcgacggtgctccctgatctggttgccactcaagagtggctcaccaagaatcagaatgaggaacaggagaaaacagtggcatcacgagtgctgaacagaatgtctgaaaagctaaagatgggggcttgatcgtgcaataattatatgagtgttcctttatagtattatcggactgaagttccaaaagaaacttgtgctgatggatggggggtaggtgattgttcttgactaggttactgtaattagcttgagctacccttctgcttgcggcatctggggctgaacattatccgagtgtcacgaatcatgttgcgaagaagatttcaagttgtcttccattcatctgcgtggagcaataaaggaagtggaaatgaactctgaacatgcgtcacaagttttctagtcatgctttacattctccacttgtggagcaaagaggaaatttcgcatatgcatctcgagcgttgtagattatgctttctaatcttataacatgtatgtagaagggcgtttttgaccgtgcaggctgtacttccatttccaaacccaaatagatgacgacagacgtatactatgaaatcgtagtagacaaacaaacatcagacagtgatcgatttgtacagaagttggtactgtttccctttgaggatattacaatcaatctacatcaatcgttacctaggcacccttgactgataacagatcttcggtagtcgaagcatgaacatcacatagtaaactattagcggaaaccgtttagagcgctcataccacgaagcaagccattagagatctataggtataggtattc

SEQ ID NO: 3596 - DNA, 17017 bp, Sorghum bicolor
ttgtagctccttccccgtatataagaatggttctagctcttcttccatataatatgaagtgtttgatatgacactcctctccaaaactactagcagaattagattagatccgtgcaaaaagtcatgagagctcctttggatggggattgagataggataagagaaatggattagaataaaaaaggggtataagatagtggaactgctagcacccggacgtccgatccaggcactagcattcgaatgttgggcctttgtacaaatcacacctatgctcattcctcacggagaaaaaaaagaagaaagtagagatggggaatgcgacctcgcctgcccccacagagaagaaaggaaactgcccttcctctactccccacgcacagaacctgcccccacgtgcccccgaaaccttgctagtcctatcacctctgcccgccgctgactcacgctcacagcacagccccccagctcgcccccttgccgttgcaacattaagatgaagcagctggaacaccacaaacatgttattgcaacaacactaaacaaactgctacaacaacatggagcaatagctgaaacataagagattgtccagtgaaacatgggggttgatgaaattacaacatcaaaaaagacagttaccgaaacaccaagaaacatattgttgcaataacaccaaacaaactactgcaacaacaatggaacaacttctgtaacatgagattagagcaactgaaacatactacaacatatcaaaaagtggtactactgcaacatcaattgaaacctactgcaatatccagagagaaccatttgcaacacagcgaagtctgaaccccagagttcgccgaaatcctagtcaccgccacatcccttagatcccgaggggggaaggaggagaacaaggaggaggagaagggctacatccaaaggaggaggcaggagagcttagatcagatccagaggaggataaaaagccctcagatctagattccttgacgacctaccccgtcgaagccgccaccatcgtcctcgtctcccgtggtgtgtgtggagccaggtcatagggatagtgggggatgcgtagagggtgcggtggcgcgagggaaggagggggaagggagcacaggtagcgcgaggcacactgcgagctcatggacacgcgggcgcggtgcctttttgtcccggctatggcggaaccagcgagtaggagagcgatgtagagaagaaagtgagtgcggagagcgacacgagaagaacgagttagcggagcgctcagagaagaaagcagagtggggggagggagcgacatagatgggagcgggtggagaaagcgaagcgctgcacgtgtgtgcacttggtcgagttagggatacgtctgacgcggacagatgacttagtagtagcattacaaataagctaaatttggtagtatctatttccctcttaatttcccattatccaaaccagaaactctattacgtgacccgtccgacatcgcgtgatggcatggctcccttccacgtgtccccctctcgctcccgcgttcatgctcgactgcgtccgcgcccacaccggagataaagaagatggctacactagggttctagcgacctccatctccaactccggtgggcatagaaggtccgaccgggggaggcaggccgacccgatgataaaaaagaggtcgagtggtttagagaccctagcggcgatggtagcgacaagattagagaggggcggggacgccataaccggaagaggagggaaagaagagctgcagcgcccttgttttcctatgccaatcccaatccccatttcccatttcccaaactgcccgccggagcctctcttcgcaactcgggagttggtttgctttggtgcctccgtacacactctcccccgacgggcgtatctggacgggagctcggaatacgcatacgcagcagcgtatacgcatacgccatatataatgtccgactccgcttccacctccgcctgatcttccacctcttagcaggaggtgaggaaaggggacggaagcacgcagacccggtcggatccaccggcccgcggaacggatcgaggccaccggcatcctcggctcgcgtcgcgtcgcggcggcgagctggaaatccccggatcggtgcagctgccccctgcccccgcccgataacgcggcgggagggtggtggcctgtcgatctcgcggcgggagctggataactacctgccgatttggggatttgggtgtttggtgcgtgtgtggtggcgtggagtggccggcgtggggtggcggagctagggtttgggtttgggcgttcgggatgacgcgccgggtgcggcggcggacgtgcagggaacgggagggtagaggggtgaggggcgcgtcgcgtgttgtttcggcggggccggaaggcgaggaggatgcggcggcggtggaggttgactggagggcgctgccggacgacacggtgctgcagctcttcgcgcggctgaactaccgcgaccgcgccaacatggcgtcagcgtgccgggcttggcgagcgctgggctcgtcaccctgcctgtggagcacgctcgacctccgcgcgcaccgctacgaccgggaggtggcgtcgtcgcttgcctcgcggtgcgggagcctgcgtcggctacgcctgcggggccacgaggcggcagaggccgtcccgggcctccgcgcgcgtggtctccgcgaggtggtggccgatggctgccgcggcctcacagatgctacgctcgctgtcctcgccgcgcggcacgaggacctccagagcctccagatcgggcccgatcctctcgagcacatctccagcgatgccctccgccacgtcgctctttgttgctcgcaactccgccgccttcgcctctcgggtctccgtgaagctgacgcagatgccgtcggagcgctcgcccgctgctgccccctcctcgaggacgtggctttcctcgattgcggcaccgtggatgaggccgcccttgctggtatccactctctccggttcctctctgtagcaggatgccggagcctgaaatgggctactgcatccacctcctggacccagcttccctcccttattgcccttgacgtctcccgcactgatgttccgccaagtgctgtttcacgcctcatttcccatgccaaaaccctcaagcttatatgcacgctgaactgcatttctgttgaggaggaacagcttcacaatcctgctgtatttagtaactctaagggcaaggtcgtgctaacaatcaacagcgacttcaaaacttttgagaccatgtttccagttgtggatgtgaaagcgcacgaggttttcaatcaatgtagctggagtcacaaagacaagatagctggtgatacaatgacatggctcgagtggatcctgtcacagtcacttctccgaattgcagagtccaacccacaaggcatggatagtttctggctacagaagggcactgcactgctgcttagactattgaagagtttgcaggaggatgtgcaggagcgggcagctactgcacttgctacgtttgtagttatggatgacgagagtgcaaatgtggatcctgcaaggtcggaggcggtgatgcagaatgggggcatccgaatgttgctggaccttgcaaggtgctctagggagagcgcacaatctgaagcagcaaaagtaataaattgtttctatctgcccttagtttttagtgttcttgcttgcatttaccatcttctcacattagttaatgtcgccattcaggctattgccaacttgtcagtgaataccaaggttgccaaggcagttgcagaggaaggcggcattacaatactcactaatttagccaagtcgatgaataggcttgttgctgaagaggctgctggtggcctttggaatctctctgtaggcgaggaccataaggttgttattctttggatgctgattccttgtataacttcttatattggggtaatttttgtaataatcattggttgcacttcttcaggcggctattgcagtatctggtggtatcaaggccctggtcgatctaatatttcgttggcctgctggaactgatggagttcttgtatgaagcctttaattttcaatttctcatatttccaatttaattaagcatctggaccaattagtctatatatgttgctatttgtttttctttaggaacgtgctgctggcgcgcttgcaaacctggctgctgatgacaagtgtagcttggaagttgcaaaggctggtggtgtccatgctttggttacacttgctcgatcatgtaaacttgatggtgtcctagaacaggtaaacagcacattggcaccttcatgcttttttttcctgtaagcaaccagtattcatttattattggtgttccggtactactagttatatgagctccatgaaaccaacataatgtgataaatgccaagcacgacaaggagcatgcaagctctcatcttgagttcgtccttcatagctacatacctatgcatctggacatgttacatgtaccatctgcatcatattgcttaggtatcaaactttgctgtaccatataagaaataaactgcccgtgcgatagatgtctcattaaacgcaaagcagtagcaaaaacttgtgagttatcatttccaacgtttcataagtgtatgccttgacacttgtcaatggcttgttgcttgtctatagaaattttggtatgccataggtctcaaattggtctatataatgtatttatcaggatttgtgaaggtttaccatacattttcttacttagtatactgtctacaagcttgtgtatttcccttcattgcatatccatatttatgactcgtgttctcatcaggagaatgaaactcttgtaacctgcagtacttaagttgtagtttgctgctgtattatcgatacttcactaacccaaccatactgtatcagacacttcgatacaccggtgctttctctatattaccatagtgttattcttcaaaatcgtatattgccgtatggccgtacccttattgtgttactgatacataggcttgctgactaggatttgggttagtctaatgtttctagcttcaatgtttggtttagacctttttaatttgctttcaagccactccaatgatgtttttgaagctcccagcataactctttgtctttttaatgttcaccatctctatttttaagttttcacctaaatgctaaatagccggtcacctattactgccatttattcgggctaaatggctgtataaaaaggatatggctggccactttgtggcatttaaacttgaacagtgatatttttgctgttttgttagtttctaaggctacttatatttgcaggctgcaagaggtctggctaacttagctgcacatggggacaacaacgacaacaatgctgctgtaggtcaggaagcaggggctctggaggcactagtgcaactaacaggttctcaaaacgagggtgtaaggtatacatataactgttttgatatgctccaacttgcatgaccttcaggtcttaatgcatgcattctgcctgaatggttcacacgaatctacattagtaattcacaacttttatgtaccaaattagacaagaagctgctggtgctttgtggaacctgtcatttgatgacagaaaccgtgaagccattgctgcagtgggtggtgttgaagctttggtaagctcttttgctcccacatcctctgcacctcatgcctttggtgtctattagctgtttttctagaaaaaaggaatataatattccggcctccaacattcacaagtgaatgagtatggccaattacaacagacccatagtacttagactatgcttcaccaatcagagtaaaaaacatggaacaaagaaaagagactcaaatccctatcctattccttcttcgacacgtaacttgctgaagagcttcaaactggtacatttgaatagaagacatctctctgaagaggcttgtacttatatactttgtagtgatgcagaatgatgctgccttaatgtaacagttaaattatgctaaagttatttggttgcaatctttgtagaagagttatcttgaattttatggtgaggtatgatgtcaaagacactaagcctgtggaaacaagagaaagtaattgataatactgctaggatgccaaaatatttctaggaactcttctatcccagcccttccatatattctcaatctcactttaatagaatagaagatatatagttccccttttcagacaatgacttctgtttcttaggttgctctagtgcaacaatgtttgaatgcttcagaaggccttcaggagagagctgctggtgcattatggggattatctgtttcagaagctaataggtaacttcaaatgataacatgttccttcagttgtatttacacttcagtgtaaaaggcattgtcagtttaccacattcgtataattgattcttatgtgctaaatgaaagaatcctctgagtttaattttgtctccttcactataagcgaggctgcgttgctgatgaagtgcacttgactacttgagcctattattattattatgttgtgttccatgatacccttacaatatacccttttgctgacaacatatggtagttcagtttaaaatttcgtgaaagtttctaattaacctttgttgatgaagtagcatgtgtttggatggaggggccaaatggttggagcaggttcaacccagattctggggtgtttggatcggatgtcaccaaacctgggtccaacccagtagagaatatccgcactagatgcgggttggtttggtaccaccaaaatggccggatcagcttgacccagatggagagcgcagaggagcagcagaccgggcagcgcacagcggggcgagctccgccccctggccatggcagcgcagggtgagctccgccctcagccatggcggtgcaggcgagcgggaacggcgtctagacgagcagaatggcggtcgtgtggcacttggatgatggcggtgggccgcgtgggcgcagaggagcgacgtccgcggccgcgaggtgcattggagcagcggcggtggccgcgtgttggagtagcagaggagccacgcacgaggtcctggcggcgcggtggcgtggggccttgtggggtggcgcgggatctggcatattttttttgacgctgcgaggcgcggggctgcgtgagcggctgagcgcacaatgaagaagaagaggaggataggctgccagacgggccccacacgtcagctatctcatccctatttgccttcaaaccaaacaaggaaccgggtcagaccaatccctatcaaccaaaggcgagatgggtctaacccaaaccaaaaatctgggtcaggtccaacccatcccacatagggtaatgtatggtggtagcatagggtcacctaatgaaaggaagtacatgaacagaaaattaatgtttattgttccatttcagaggcgcctgattctttaaccttttgaaacttctttgtgccattcttgtagtcatatttgatttccacattgttgataacttcatttttttctttgcattggttagcattgcaattgggcagggtggtggggttgcacctttgctcacattggcacgctcagaggttgaagtaagttctgtttgcactttatgcagtcaacaaatttgacaaatttctgttcatgtatggagatgttcagttactgaagaattttgtattgttttgatttttacttaaaggataaaagccttctgttggcaatacataatattgccatgagatttccctgtatcctagttagtaatgcccagatgtacaaaacattacatatgtggctgaaaaagcctgtacccaggttctaatccatttgactgcaccatggcagcttatggtctacctaatgttctgtttttttttcaagttaatcacgtggtagtgttgtacctttgaaatgtgcaagctcttgattcattcttcttgatatggatatggatatgtgcaaagactgttcaataatgtgttgaatttctttggtgtattttatttcaagtgacctcagatttgctgactttagaaaccattgaccgttgtgacatagttttatttgtatgaacacattgttctctcatgtcttaaatgcttggaaaattaaaaggttggcatgacacacatgtgccatttatttttagttttactgtctggttttaagtcaagtagactatttaatcattgccatcaatttattttggtaacttttgctcggacttttgcagtttttaagtgatattatagtctataatagaaagttttcatacttagtacttctgccttggaaaattggaaacaaaaatatgtttgttgcttagacaatgactccctggttccacaggatgttcacgagacagctgcaggggcactatggaatcttgctttttattatggtaatgctctccgcatagtcgaagaaggtggggtgcctgttcttgtaaaaatttgctcatcatcagggtccaagatggcacgcttcatgtctgcactagcactagcatatatgtttgacggaaggtaccatttttactattttttcttgattgcttcacgtgttggccattttatattagaatctgttttttagtttttagttgagcaaggcctacaagcagctgtcacttcaagttttgttgttggtttaggcttcaaaattctgtatgttctattgatttattactacttgtagaatgggatccatatcatgtttctagggttaagatgatgaatttgcttatgaaatagtgttcatcaagttcatttcaagtttggaggatttctgtgttaacattcagaggagccatctgttagacctttaccatgttctatttctttgatcatatattgctagactgctagaggttgtgtttgtaacttgtaagctggcttttatattttgctgctgatcattgaatctttagagttcaaggttagcaagtctaaatgttatttgcaaggttcatgccctgcagccttgcagaagtgtagagaagtataggaatcacaccacacccccaatgtgtgtgtgtgtgtgttgggggggggggggtgctggatatgtatagccacagtcacaatacaatagaggcaactaggctatggtaaatcactatcctaaaatacatgatcctgatggatcctttcctaatgctagccttcctaatggatcatttcctaatactgatggatcctttcctaatgctagccttcctaatgagtcatttcctaatacccgctcgcagtcaaagcggtaggaggatcacgaacgcagaggctggaccgaaagtctgtgaacagctgcataggaagacccttggtcatgatagctgcaaattggtgagccgaaggaacgtggaggacgtgaatctgccccagggcaccacctcacaaatgaagtggatgtcgatctcgatgtgcttggtgcgacgggggtggacaggattagcagtcatgtagatggcgctaatgttgtcgccgtagaccactgtagccaagggaactgagatgtaaagttcctgaagaagttgccgcacccagcagcattcggtgacaacctgtgcaacagcctggtattcagcctccacgctggagcgggagactgtggtctggcgtttggatgaccaagacaccagattgtcaccgaggaagacgcaaaagccagaggtggagtggtgggtgtccgggcagcctgcctagtcagcactggagtaggcagtgatctggtcgacagggctggtgcccaagtggaggctagcggagagctggtggagggcgtgcccttcacatagcgtaggatacgcttgatcagcgccatatgcggctcacgcgggtcatgcatgaacaagaagacctgctgaacagcaaaggccaagtctgtctgcgtcagtgtgaggtactgaagggcgctggcgaggctccggtacttggaggggtcagccaccggggcaccgtcagtggtggacaacttggtccatgcatcgtccagtgtggtagtggggtggcacttggacatgccagcccgctggaagagggcgacaacgtactagtgttgggacaggaaaagaccggagtgatcctgtgtcacagcaatcccgaggaagtgatgtaggtcgccaagatctgtcatggcgaactccgagtggaggcgagccatgacgtgctggagcagctcaggagatgacgccatgaggataatgtcgtcgacgtagaggagcaggtaggcgatgcgagcgccctctttgtccctctttgtacacaaagagggaggcgtcagacttgggagggagcaaagccgatggtgcggatgtagctagcaaatcgctggttccaagcccggggcacctgcttgagtcaagcaaacgtagtcgggggtggccgggttgacgaagccagatgactactggcagtagaccgtctcctcgagattcccatggaggaaggtgttcttcacgcccagctgatgaatgggccaagagcgtgaggcggcgatgatgaggacggtgcggattgtcgccggtttgacaaccgggctgaaggtgtcgtcgtagtcgacaccagcctgctgggagaagctgcggacaacccagcgcgccttgtaccgtcggagtggaacttgtgttcgaacagccacttgctggtgacaatattagcgccagggggccaaggtacgaggcgccaagtgctgttggtgaggagagcatcgtattccgctgacattgcagcccaccagttggggtcggcaagggcgctgcgatagttggtcagaatcggggacgccgttgagggggaaaagccgtagcggtcgaccggacaccagctgccggtctgcagtcgtgtcaccgggcgcgaaggtggtggaggcgcagcaggcggtgttgaggacgccgcaggggatgctggggttgccgccgggggcactgggggcgcacaggaggcgctggtggtcgtggacgccgctgatagtggccccaaagcgaccagtcccgcccggacgtggagcaggctgtgctgaagcctgggacccatctggaagctgcaccgtgccagcatagatgatcgccaggtcttggtaatatagcagtacagccttgctgctgggaagaggcgcagacgagcactcaacagcagcaggaggcggagtgtctgctggtggagaaagtccttgcatcaagaagtccagtgatgacggcatggaggccgccgacggagttgcagcaaaggggaacacagtctcgtcgaacacaacatgacatggcactatgacacgccgagttgcagcacggaggtaccctttgtgggaagaagggtagccgaggaacaagcacggggtggatcgaggggagagtttgtgggatgttgtggcactgagatttggatagcagaggcaaccgaacacacgaagggaggaataatccaggagctgctgatggagtagttggtaggggatggcatgctgtacagaagcagaggggtgccggttgagtagatatgtggcagcagcgaaggcttcagcccagtatggtggtggcatggaggcgtggagtctggagcagcaaagtgcggatggtgttgttgatggtgcgaagtatgcgttcagctttacagtttcattgggaggtgtaggggcacgagaggcgcaagctgatgccgtggctggagaggaagtcagtagtggcccggttgaggaactcggtgccattatcagcctgaaatgctttgggggtgatgctgaattgcgtacgagcaaagcgatgaacgcaacaagatggcgatgaactcagatttgtggcgtaatggaaaagtccaacaaaaatgatagatcatcaagcatcacaagataatatttgaatcctgaagtgctcaaaacaggggatgtccatacatcacagtgaagtaactcaacgatagaggtagtgacagaagtagagctactgaatgggagccgggtgtgtttgccaagttgacaagcatgacataaagactgcggctgcttattacatgatatgttctgtagggtggcgagggtggaaggacccgggtgaccaagacgatgatgccagagcgtggcggaggtggcgaggctgcaggtgggcggtgtgggggtgatggtgtagagatcctcgccactattgcagcgaagaatcacgcgtcccatctgcaggtccttgacagaaaaacccaaagtgtcaaattcaatggagcatgaattgtcatgagtgaattggcggacagaaagaagattgcgcactagagcaggagcatcaaggacattgttaaggtggaaggtagtgttggctgccgacaaggtagaagtgccaccacaggaaatagaaatgttactgccattaccaacagtaatgaaggaatcatagtgagggaggcaggagaggagtataccatccgagggtgacgtgtgtagacgcgtccttgtcgaggacccaggggtttgagccctggaatgatagttggttcagggcagccacaagcctggcctgattccagggaccagcgcctggctgtggctgaggaggaagggcgccatcggagtactgtgctgcggcgaaggcagtgtgggcctgcggaggggtgcccaggacgtcagggccgctgtgggggcgccactgctgttggtagccaccccaaggggagaagcagacccatgggccagctggctggggaggaccgtggctgcctccctgggacgaaccaccacgaccgccacgacccttttgccgattgtgatagctgccgccgccgctgctgtcattgccggggcgggtgccatggttgctgccagtattgcctggccggccgctgctgccagaggcaccctgactgcccatggatgcatggcaggcggagctgcatgaagagcctgcgaggagggcggtctgggaggtgacctggcccttgttggcaaggcgaagctccttgaggatgagcttttcgcgggctgtggtgaagttgggcaacggagtggaatctgcgatgttgtcggcggtgctggaaaattggggtttgaggccacgcagcaggttgaggacgagctgcgattcaataacggtgtggctgacgtcatgcagggcatcgactgtggtcttcatcttctggcagtaggcgtcaatggagaggtcaccctgagtcatcgaatggaattcgtgactcaggaagacggcgcgagaggccttgttcgcctggaagatgctggagatcgctgtccacagctgacgggcggtctgatccggggccttggcgagatcgaggacgtcgtctccgacggtgctgaggagccaattgcggacacaggagttagcagcagcccaggccgcatcggtagggcgtgcctcctgtgtgccatcgacgtgcaggagaaggctgaatttgccgcagagggagaggaaggaggacgaccagcgagtgaagttgggcgcttcagttcgagggtgatcagcacatgggatttgactgagatggtagcataaggggggatggagaagacagccggtgccaaggctgaggctgagttggtgagggcagcagaggagtcgctggaaaggggagcagtgctcatggtggcggcttggcaaggaccaatgctgggggtgggagacggagagaaaggcgcgaccagggtggtggcgcagcagcgggaggagggggtggggcaaatggacctaggcccagactcgtgataccatgtagagaagtataggaatcacaccacacacccacagtgtgtgtgtgtgcggggggggggggtggggtgacaatagaggcaactaggctatggttaatcactatcctaaaatacatgatcctgatggatgctttcctaatgctaaccttcctaatgggtcatttcctaatactgatggatcctttcctaatgctagccttcctaatgagtcatttcctaataagaagatgtgcattcatatagatgtaggaactactttggttttgtctggatgtgtggtgctgcggtttccataaatggcaagtcaaactggaatgttggttgttagaattgttctataaaccacatgacatggagcgttgctagcttcaacacactcacattaagggcctgttggatctcctaaaaattatgagaatgagacccaaacatttggattccagggggtgattcttatcgaaccaccagatccagctaaccaccaccaccatactatttacagataataggtgtgaagcaccttcaaccatctataatctctgtctataatccagggatccaaacgtacctttttatttttaatccagaatccaaattctacagttactattgagaatccatattctaataatctctaggagatccaagcatgccataaattatataagccataaggtagaatgtatttttggcacttgacaaatttatatagatgttactgatggtatctttcatcagaagtagtattattcttagttgtacttcttaatagaaagatatgcagctctcctgcgtgttcgagaaaaaaattattcttagttgtacattgttttatcaaataatttcccatttcctttgtaacaactcaagtgaactatacacgtagtgtttgttcactgaaaaattgtgttgtagggcgtttatgaagcatctggtactttgtacaagattttcctaatgagatatgatcatcagatgcctaaatctgaaatttttgaactgacagaatggatgaagttgctttggttggagcatcctcggatagcagttccaagagtgttaatgttgagggagctagaagaatagcatttaagcatatagaaacctttgtgcttactttctcagatccacaaatgttctctatggctgctgcctcatcagccccggcagcgctgtctcatgttgctgaagcagtgtttatacacgaagctgggcacctgagatgcaggtttggctctacatttagttttgagcctttatgaagttcttactcagagcatatgaagttccttttggaggattcatatttgttccatgcatcttattttcatcttttgtcatgatatgtagttagagcaacatagtactaatatgatgcttactttcgccagtcgatctgagattggtagatttgttgccatgcttcggaatccttcaccaattctgcgtgcttgtgctgcctttgcccttcttcaggtttgtttcctttatcccttctcaactgataatgctgtttatcttgtagctctatctagagtcattattgtttgagacatgggccatattgtccattacaagagcagttttggctgctttgttgacattgatattgttatctctttctttcatctgtctcagcatcttgtatagtactataaaacacacgagtctgtaactaagctaaatttaaaatgggggtagcggatatggagcaaagagtatttttgcttcactacctctactttatgcgcatcttatgtgcatcctgaagagtattctcaaatgggaagcatgatgactaatcacagcttctacagcttttccctgttttttcttccttttcatggtacgaaactgtcaatttgtcagctccttgttttgtcagttattatgcttttgtttcatttggctcattccaaagattgattacccatttctatgcttggcttgaaaattactgtatctaactgctcattgtcgtatgtcttatccctttctcctatatacttgtgtgcacacaacgaagacttcattttgtaactatgtgtatcttccattgccatctaatctgatgagaagtttgaaatactgcagttcacaatcccaggaggtcggcatgcggtgcatcacgcaggtctcttgcaggaagcaggagcaggtcgagtgttgcgtgcagcggcggcagcgacaacagcttctattgaagccaaaatttttgccaggattgtcctcaggaacttggagcaccatcagtcagggacgtcaacatgaacacccagcataggtgcatcctccaacaaactaaggcctctgcatcgatgggctgcttggccaatgcagaatgtaccagtttggctttcggggcctttttacatcacaacagttttggtccgtgcagacagtgactgaaggaactccagcgaaggtataactcacaactgtgaagtgactaaacataagtggcagctcttcccgtatcggacgtttaaggttgagttgaattttctagagatcatttgtgtgtacaagtaaaaaaaatagcgtcgatgagaattataaactggcatatagaacttatggatatttattacttgtttgttattgttgaggtgtgtggcggcgtcatgtagaaattggggtattcctcccagcatacatgtaactttataaatgtactgttatgtatttcctctccatgattcattctttgcatttatagatcgaggtgatgtttagcacaatgaaacaagggtttgatttggtcaacatgaacatcatcagtaagctaattgagcatgatacaatagccaccctttttttttcaaaaaaaaaaatgccaaacttttcagtgatgtttttagaaaaaaaatacttggagaattttcactgaacatcttagaaattttatggaagcctttctacattttttaggttttagaaaaggttcttaaatctccatttttaaaataaaaagcgagatctttttacaaaactttttttcaaaatatctttattttaaaataaataaaacttcacaaaaaggatttaagataaaacaaaaaaaacatcagaaagttcattagaaaagccaaagtagaaaatcaaataaaaatgaggcctgtttggtcaggcttgattttttttttcatttatcacatcaaatatttggaaatatgtatgaggtactaaatatatattatttgtaaaattaaaacaacagttagaggataatttgca

SEQ ID NO: 3597 - DNA, 6360 bp, Sorghum bicolor
tgaagctctggtgcgtgtgcagtgtatgtgcagacaaagcaaagcaatgatcagcaaagatatcaataatactagtgtgtgtcaggatgcatcttcggcagatctgatcgatttctcgtcagctatcatggttcggttcccgtggacgagagaagcatttcctcatgtggcttcatgctaacgcacagttagattcaggtcagcagaagccgtctgcttcacctttaacaaaatcaggagcaaaatcacctgttctctacacacaaacaccacacgtgtatggataccagaaactgtttcttgtacgccttctctttctgtacagtatctctgcacacgttcacaaaaaaaaatcagtccttaactgatagtaacagtgagttcttagagtgcgcagtcggcctgcaaagctaggttggcagagttctggaggtttcggattttcccaagtcgagtggctgacttgaaacgagttgtagtgatcataaaagacggctcctttttgaaaagcacagtgccacggcatggaaatggaaggtcttgccttgcgagacatcacgatccaatgctggagcgtagtgcaggtgcctaccgtctctctactactcccccatcagggagctttgcgcgattgcagcccaaagaaggaagtggcataactgccatacactcgtcatgtgtaccagcactgttgacacaaacatatggtggattggtggtccatgatatgggcctacctcaagcaaatgaggcctgaaaaatgtcaggaacgctcaattcgtgtactgagacaacactgtggtacaaatgcggtgttaggattggtacatcgtttgtacttttgcagcattgctcaaatcggcaattgttgaggatcctatgcagcggagcaagatggtgaaaatgtaaactatccgagttagtggtgaagtaagctgaaggtgagaggagaaatatcagattggagtactcagaactgggaaccgttggagtaacgaagatgatattttcaaaagtggcaggttgttctttccgtttttgaaaccagtggcaggtcagtttggacagtgacaaatcgatgcaagcattggttctgagctcattcagaaggtctgcagtctgcagagcactaactgcagcttgcatgctgattgctgaagcacagagtggttaagataactccgttttttagtacagtcttagcaaatctacaactgctcatcatttgaattcggtcaccgagtcggcgatcacgcaattgaaaattgctcagccgctacacagctccatccaccggttaatatggcaatggcggcaatgccatgacagcgacgatcgatggccctgaaccaatggtaaattttggtacggtttgtcctggttgcctcgctcaagctatgctacgtgtactgtacaagcagaatatgctaaataaacgtcaacttatacaaagtccggccgtggaagccaaaatatccgtccctacaatagcatttctcccttgggatcaagcgcccccccggccctccctattttagaatttgttcgtcaccccctatatcagcgtcatgacctcgacgtcgcgctttatcccgcggcatattatacacacttgccaattgataaacccccaattattttacctgctgcagacagaaataccatttgtttttatgtgcgatcacgaggacgatgacgcgaattcgtgtccttaattagttagagcaaatataaacgtgagagttcatacctcccgtccaatagcgatccgacaacatgttggaagagattaaactagctgggacgaaatcaggaaattcatttgagcagccatgaatgatcccctggccgattagtagagagctaagtagcactgcgcctctgtggatccgacaagtaggcctaataaaaaggcgttgtgtacctgccacctctctagctcactccttgaggacccggctctccctataaatacctccctgcttactgcctccaagagcaagcaagcaaagcaagagaggcagacgcatagctgcgagtagagtttcttcgtcctcctcctctacctgagtgcagtacgtgtgctagctcacgcacgcacgtagtagctagctcgtacgttcgccagaaatgtcgaccaactcgaggtcgaactccagggccaacttcaacaacgagatccatgacatcggcacggtgcagaactccaccatgatgccccccacgtactacgaccgatcgctggcggacatcttccctccccacctcctcaagaaggtatatgcatatatatcatcgtcacagagaaagaagctataagcttcgtcgtctctggttcatcctgttttcgtttcgttggttgctaaccggcggagacactgatgagcatgtgtgtgtgtgtggtgctccctcccatggcggaacccatcaacaggtggtctcggaggtggtgtccacgttcttgctggtgttcgtgacgtgcggggcggcggggatctacggcagcgacaaggaccgcatatcgcagctgggacagtcggtcgccggcgggctcatcgtcacggtgatgatctacgccgtcggccacatctccggcgcgcacatgaaccccgccgtcacgctcgcgttcgccgtgttccgccatttcccctggattcaggtacgcgttctcgttcgcaactgttgttatacagattacagctgcagcctgctgcagacctcgtcttcttgcatcaaaactgaggcatatatagttggttgcataacgatatatttgttggcatgcgtacagctaagctcctcagtgacatataacaacgcacaccagcgattcctttcgctttgctgagctcttcttcctttgacattcttatatagtatatttcagttcctttttagtacgtagacaaaacaattcagccaattttatatttctatctaagagaaaaatagatgttggcaaacatatataacactatgtatttcaaatgccaactgtggatagaagcgtgtcagaatattttaacatgaagataacttgttctgaccaacagggtcgtagtacttggatatataattaacaagagggtatctgtcttgccgtatctaaaatgtttgagaactacactagcattacacacaaacccaaataactggttctctctagtcatatatatgctgcatggcaaatacatggcttaagttaagctgcacatacttgtcatggtgtgatcatgggccaaatgattcacctttttctaaggcataatagatgccaaatgatcaagtatagcttttttgtattattatcctcatctaaaaggaagtcaaagaacaacgcttagtatatgctcatgcatgatgcatgtagcttgttgtcccggaccaaccaataatgatcgtgtatgtttcatatattcatgagccaaatagtgcccacgcggaattaaagaatctcgtagcagcgaccttagcttggtcattcccctcacacgtccctttccttggccaatttggttgcctagctagctgaaacctggagctggagccaagcaatcagtagcattagcaaacacaaataatacagagtgtgctagctacttgtataatacgttggggcttggacacggcatgtgaagaaagacctgccggcggttccagctgatgagctgacatggagcgaaactgccagccagaagctcgtgtagtcgtgccaatgccaagacgcaagagcctggctatggccatccacatgggctccaaccgaccagattggcgtcgggccggggcgtctgccggccacgtcgctctcgtccgcgttctcacggccggaccggagacaagtgttccctcccgtcccgtcctttttggcagaaaaaaagcttgcgacgagggttaatttggccgttgggtcgggtgccgcgcgcgtgcggcgcaggcgagaggtgtggttgccgtggtggtggtgcgcgcggcgagggacaagggaccgcgagggagtggccgcgccacgcacggtcgctcgctgcggcatgtgcacatgcatgtattattattccctcggggatgtgccgaaaacggcagcgcggccggcctctggttcggcacccaattccggcagctggctggcccaattgccggctgcgagccctgtttcacgacgggtgagagggtgggtgaggttgaggctgacccgaaccgattcgatgtgccggccctgccgagagcaccgcatccggccgggtccgatcgatgcacgtctctgtacgtgtagaggtgcagggtttaattaagtaataagaataactaaagatcgatacatgtttgcttatatcttttgtgaagcgacgcacgtctctgggggagatgctgacgagctagtgcgttgcatgtgcatgtatatggatggcaggtcccgttctactgggcggcgcagttcacgggcgccatctgcgcgtcgttcgtgctcaaggccgtgctgcaccccatctccgtgctgggctgcaccacgccgacggggccgcactggcactcgctcatcatcgagatcatcgtcaccttcaacatgatgttcgtcaccctcgccgtcgccacggacacgagagcggtaagttccagagcagtgattcctgttgatttttcgccgtggaaaacgatgatttctgacgctgttttttttttctttttcttttgctgtcgtggatgatgcaggtgggtgagttggcggggttggcagttggttccgcggtttgcattacgtccatcttcgcagggtaaatacataaatataaatacgtacgcacgcgcgcttagagactgagaacacacatattacatatatacacgccgggttattcaattcgtagaatacttaattattcaagttgaaaatagttgagaggactacgtcaatatccatttgattactaaaccaccagtcagtttgccttctactagtaaacaagtgcagaatccaaaacatgattagccaacagtaacgattctttaattcagctagctagcatgtactaaaccgtgagtagctagtttactacacgccagccctgacctggttcgtaccataactaaatttgacccggccagtcccgaacgatcgtcaggatcagcacacgccacgctgacatatatagtgacatagtagtagagctatagatgaactggtgggcatgcactgagacgcgagggaaacctaccgagtggtgattgcagggcagtgtctggcggatcgatgaacccggcgaggacgctggggccggcgctggcgagcaacctctacaccggactctggatctacttcttgggccccgtcctcggcacgctctcgggggcctggacctacacctacatccgcttcgaggaagcgcccagcacccacaaggacatgtcgcagaagctctcctccttcaagctccgccgcctgcagagccagtccgtcgccgcggaagacgacgagctcgaccacatccaagtgtgatatgctttgcatgcagagcagagcgcacactgcttgttactcctcactcaaatgtatcggtgatactcctagagtagtggtccgtagttatgcatgtctggtctgtgtgtgtcggtgctcatgatcatgatccatgcacgtacgcacgcacttgttgcattgtgtgatgtccggtccgtggcgcggtgtggatggctcgctctctcaatgtgccaatgagctggagctttatttttgggacgaacactgtgccgtgtgcgtgtgtgtgcagccagtcgtacacacgtgccaaatgtaccctctcctgctgtcacttgttccaaaacctgttggtgcttatataaagatcactgtgccttccatgacaaaatcctactccctcttcccaaagtttcaattcttagcattgtcttaagtcaaacttttaaactttgactaacttttttttaaaaaaacactaagatttatagtaataaattagtaccattagattatttatagaatatattttcataagatactcattttatgtgataaatattgatgctcttttctataaagttggtcaaacttaaaaaagtttgtctagcacaaattctaggagttaagcttgcagagggagtacttcttgcactagtaatatctgaagggaaaaaaactttgctagggtactctagttaagtactccctccatcacaaattataagtcattccaagaatcttagagagtcaaaatatctcaaatctaaccaaatttataatataatataacaatatttatgataccaactaagcattattatgttcttcattagttatattttcatagtaatatataaatctttctattttttctataatattga

SEQ ID NO: 3598 - DNA, 5099 bp, Sorghum bicolor
catggagtattaaatatagatgaaaataaaaactaattgcacagtttggtcggaattggcgagacgaaccttttgagcctagttagtctataattaaacaatatttatcaaatataaacaaaaatgctactattcctattttgcaaaattttttggaactaaacaatacctagaaacctttcgagcaggcgcaggaggacgcacagcccagaatctgcacggatcacggggcctctattcgagtacctgttttgtttgtttctttggcgtagcaacataaaaaaacaaaaaaattgtcatattgtgattcatttagatatactggaaagctttttttttctcttcttcctatgtactccctgcgtcccaaaaagagtatcgttttaggattttagacatcttatttgaccattcgtcttattcaaaatttttacataaatattatatattttgttaagacttattttattattagagatactttatccatgattaatttattttataatttacataaaattttttaataagacgaacggtcaaacacgatatcgaaaagtaaaaaaacatcactctttttgagacggatggagtatagatcatgcagaaatcagtgatggaagcttttaatctaaactgccctacatctttctcaagtatagtgagtgatagatacaggtcatagtgcgaggtgtaacgtacgtcgataccactgtagttgttggcactacttctaggcaggaattaaaagtcgtgacattgatcactaaggtgcggcgtaacttgtcgaaaaaagacagcaggtgccgcatcagacgggatgtcttgccaatttcagtgccagacaccgcctgtacgctgcgtgcaatatgcagggaacggcagagcctagagcatttacctgcatatgcacatacagagaacggtagagcctcacctaactttcagagcacccagattaaggccttatttagtttaaaaaaatttacaaaatttttcagatttttcatccaatcgaaactttagacgcatgtatggagcattaaatatagacgaaaataaaaactaattacatagttcactcataatttgtgagacgaatcttttgaacctagttaattcatgattagacaatatttgtcaactacaaacaaaattggtatcgtgtccattttgcaaaaaaaatgataaacaaggtctaatatggtcttttttttgttttgtcacacaagggaaaaaaatcactgagataattaattaatttgactaagcaccagagagaaggaaaaaaactggcagacactggcacaggggaaaagaagattttgttgtcgagaccaattggcccaagggcattcaagtcaaatgccagaccacttaactgccgttagacttcaaaatggacggaatggcatacggatatagccgaagatgaagttgggcacagctgtgcgaaacaactttttaatggcctgctggtttggtcaatcttttataatggcatacagttaaaatcctcccaatcccattcccattggatggatcgcacgccggcccattggattttacgctcatcgactttgctggcagagagctcatcatcaattgtgaaagaaacaaacaaaggtacgtatgcagctacctcacataagtatattatcatgcatacgtactatcgccatccattgctgtacgttgctaagactactaagaggtcgggtcccttgttagcttgtctgttgacggcacggcacggcacggcaggactcctataaataagagaagatgcatggtggaggaggctcatctacgtgctagctagctagctaggtgtgtcctcgatactctgctactccactcgacgtacgtagccgccgcagtcactcaccagtcagtatatcgacgatcatcatatcatatacatatactcgatcatatatatcactgctatacatacagatacagatcgacgacagatccaaagagagcgatcgagagatatggcggatcatgatgcgtcgtcggttccgcagaccgcggcggagggcaagctgacgacgacgacgacgatgatggacgcgtgggactacaaggggcgccccgccgtccgcggctcctccggcgggtggtcgtccgccgccatgatcctggtggtggagctgaacgagcgtctgacgacgctgggcgtgggcgtgaacctggtgacgtacctgatggacaccatgcacctgggcggcgccgcgtctgccaacgctgtgaccaacttcctgggcgcgtccttcatgctctgcctcctgggtggcttcgtcgccgacacctacctcgggaggtacctcaccatcgccatcttcacggcagtccaagccgtgggcatgtgcgtcctcaccgtgtccacggcggcaccagggctccggccgccggcgtgcgctgaccccactggccccaaccactgcgtggagcccagcgggacgcagctgggcgtgctgtacctggccctctacctcacggcgctgggcaccggcggtctcaagtccagcgtctccgggttcggctccgaccagttcgacgagtcggacggcggcgagcggcggagcatggcgcgcttcttcagctggttcttcttcttcatcagcatcggctcgctgctggccgtgacggtgctggtgtacgtgcaggaccacctgggccgccgctggggctacggcgcctgcgtcgtcgccatcctggtcggcctgctgctcttcctggccggcacacccaggtaccggttcaagaagctggtggggagcccgctgacgcagatcgcggcggtgacggcggcggcgtggaggaagcgagcgatgccgctgccgtcggacccggcaatgctgtacgacgtggatgacgcggtggccgccggagaggacgtcaagggaaagcacaagatgccgcgcaccaagcagtgcaggtaattaattaattaatacagtaactactactaatattgtacagtattgagtatataagtagaacgtaccagaatggaccggcctgtagtaactacgtagatcgatagataccgtattgcattggtggaaacgacgacgacgacgacgacgaccaaattgcattggtggaatggaatggaatggaatgcaatgcaatcatgcatcgtgcgcgccgtttgtgtgcgtgtctgcttctgctgacatatgctttgcatagatgaacacaataatacgggatgcgaatattttgggtacggacgggaattatatagaaatgcaacgcaaagctggtcaggtccagacgatgagatcgatataaattcaggagatcgagttggatgcgaatattttgggtacataccataccatatagtgtatatcatatatacgcgatcgatgagatgaggctgatgacatgcatcactgccgtccgaatgtcccgattacgaattaccggatgagatgagatgagatgagatgagatgaggcggatcagtcaaacatactagcagtacatccagaattgatcaagacgactatgcacttttgacactaaaaccaaaaacaatcgcacactccgatccatatgtattttgccgcaattgcacactatatatatatatatatatatatatatatatatatatatatatatatatatatatatatatatatatatatatatatatatatatatatataaagataatcattcatggatgctttacttgcttggtgcaggttccttgagaaggcggcgatcgtggagttggaggtggaggtgcagggttccggcaacggcaaggggaaggggaagaagtgggcggcgtgcacgctgacggacgtggaggaggtgaagcaggtggtgcggatgctgccgacgtgggccaccaccatccccttctggaccgtctacgcccagatgaccaccttctccgtctcccaggcgcaggccatggaccgccgccttggctcctcattcgagatccccgccggctccctcaccgtcttcttcgtcggctccatcctcctcaccgtccccgtctacgaccgccttgtcgtgcccctcgcccgccgcctcaccgccaacccgcagggcctctccccgctgcagcgcatctccgtcggcctcctcctctccgtgctcgccatggtcgccgcggcgctgaccgagcgcgcgcgccgctcggcctccctcgccggcggcgccacgccctccgtcttccttctggtgccgcagttcttcctcgtcggcgccggggaggccttcacctacgtcggccagctcgacttcttcctgcgcgagtgccccaggggaatgaagaccatgagcacgggcctcttcctcagcacgctctcgctcggcttcttcttcagcaccgccatcgtcagcgccgtgcacgccgtcaccacctcaggcgggcggaggccctggctcaccgacgacctcgaccagggcagcctccacaaattctactggctgctggccgccatcagcgccgtcgacctgctggccttcgtggccgtggccaggggatacgtctacaaggagaagcgcctggcggaggccggcatccaactcgtcgcccacgatgcatcagcatcagcatgacgtccgcctccatgcctgagcctgactgatgaacgccggccggaacggaacgcattgcattgcattgtaggaatatactatatcagtctcagacggacagacgacggacaactagatagatagatagatagatagatagatagatcatcatcagattatatactgtcgtttgtttctagtactaatatccccaagactaattactgggggagaattaatatccatgcatgcatcttgctagcagcagcagcagcaacttattatactatatatgcttgatttcctatacatatctgagcagctcaacgttgctgtgctgcatgccttgggctgctgtcggagacttcaccaaatatatcatagcatccatcccatttcgcctgctctcttgcctcccagtaacctccgacatagcggaatgtcccgtcgctgccatccctccggaaccatcttggtttccaaccactgtcctgcatcttccgtgactgcaatgcaaagcc

SEQ ID NO: 3599 - DNA, 3895 bp, Sorghum bicolor
taaaaccaggcatgaattcgatcgtcactactcgccatatatcatcatctagacgaggcgacaagcgatgcatttctcgcgtacacgtacgcccgtgcagtccaaataacagaacatcgcagcagggggagtggacgcccacacggaataatgtgcagtagcagtagcagccctgtcgttgtacgcgcacccgttggagccccacagcgcccaggccggccgatccgttggtgccacaagccagatggctcctgcgtttttctgcactaatggacggcctctgagaaacggacgagcgtataattggattggattcttggcctcctttggatacatttgcatggatgctgcgatcgtccactcctcatcaacaccagctagctgctgtgtttgtgctgtctctgatgagctgagagctagctagggttcagttcatcgccacctatgcatgcatggacccgttggcgtttcaggagaggatggagatcgaccaacaagctggatgcccctctctctgttgtgcgccctcagtttttgtctgtaggccaaactttagcaagcgtgtgagcgaaaatggcaggcgattgtttctttgagggaacaatggcaggcgattgttggcacaaagctaatgctaaatcgtcagctgtcgcgtacgtgtttagattattggcgccgtagctggctgaatcggccggtgtgtgtgtgtgtgtgtgtgtgtgtgttatctgtgtgctcgagtttaatttcggaaggtgcatgcagaaagaattgattagtgtggtcgctttccacagttaataccgagcttatgatgtgctcaattgctcaaacacacgaatagtggtggaattgatgcgttcaggagggcgtcattttctgtagcactcattcagtagagcgcaggacagtgattcttcagaatggatggaggacagggtaaaatattttttgttgatcttttaccggtacatggaaattaaggctctgaataaaactgacagctgactagaagcaagcagactggggctttgtttatgcacaatctgctaccagattcagcggtggctaatggaatttctctcattttcttcttacaaaaaaacaagaagaataagcaaggcatgcacaaccggcatctaattaaggccttatttaaggtcttatttagttgcaaatttttttacaaaattgacattatagcagtttgtttgtatttgacaaatattgtccaatcatagattaactaggctcaaaaggttcgtctcgcaaattataagcaaattgtgcaattaattattttttaatctatatttaatgttctatgtatatgccgcaagattcgatatgatgagaaatttttttaaaaaaaattctaaattttttcagaaagtaaacaaggccctagtcatctttatctccctagcaggctaggagaggagaggagttccttggcgccacgtctctttctactaaaaggacgccgtgccgttccagtatttaaacccggaacctccctcttgcattagagtttccctccccttgatcgttttgtcacttgaatccgtgcctgcctgctctaacaggtaagaaattggcttattggagagcagtcctattctctctctgttatactaagaacttcttcagttagcaggtctatgtattgatctagtattaattaagtacttctagttgcatctattaaaaagttcatgcgcgttcttaatctctgattgtcctgccatgtaccttttcacccatttatttatgctgtgccgatctgttttactccagaggtttgttgcgtgttgtgtctatggattttgattttgattttgattagtgctggcgcttttcgtttctacctcgtctctgaatacgatctgcagcagcgcacctagtcgtcttatgcgaatttccatataaatgttccaggacagcagcagctgctgctcctggcacaaagagcgagcagagacgacgccagcagctctgcaatggagcaggagctgcaccggcccatggagctgcccccgggcttccgcttccacccgacggacgaggagctcatcacgcactacctcgcccgcaaggtcgccgacgcccgcttcgccgcgctcgccgtcggcgaggctgacctcaacaagtgcgagccctgggacctgccatgtaagcaccggcacaacgcctgctgttatctctgcacgagtcgaatcatgcatggctaaaggaaatatgcatcgatcggcatggtggtttggttgcgcatgcagcgctggcgaagatgggggagaaggagtggtacttcttctgcctcaaggaccgcaagtacccgacggggctgaggacgaacagggccacggaggccgggtactggaaggccacgggcaaggacaaggatatcttcaggggcaacggcggcaaggtgctcgtcggctccaagaagacgctcgtcttctacacggggagggcgcccaagggcgagaagtccggctgggtcatgcacgagtaccgcctccacggcaagctccatggcgccatcgtcccccccaaggccgccgccggctccaaggttggttggttcttgaattgatttctaggagcatgcgcatgtgcgtacacaattctctctcgcatcgcaaccatcgatagatagatcatgtctcctaatttggaatgaattggaccctgttttctttctgtgggtgtgggcagaacgagtgggtgctgtgcagggtgttcaagaagagccttgtcgtaggcggtgcagcagcagcagcaccagccgcaggcaaaaggggcgccatggagatgtccaagatgaacgacgacatggcggccatctctcacctccctccgctgatggacgtgtccggcgccggcgccaacgtcaaccccgcggcggcggcacacgtgacctgcttctccgacgcactggagggccaccagttcttcaaccagcagcagacgccgccagaagccgacgccacggaccacctcggcctcgccgcctcctcgccgttcctgctgtccggcttcgcgcattacgggccgctgcaccacggcgcgacgagcctggtgcagctcctggagggcagcgtcgtgtacgctgccgccggcggtggcggcctcccggacatgtccaacaagcagcaacagcagcccgtgccggcgccgccgtgcaaggtgggcggcgagcgggagcggctgagcttgtcgcaggacacggggctcacctccgacgtgaaccccgagatctcctcctcctccggcgcccaacggttcgaccacgaccacctctgctggggctactgatcgagccgcacatcatcgcgtacgtcatcgctagcgattagtatagcactgctgtaaataagcacatctacatctgtgtgtgagaggtctcgatcgatcatatcgatctcgtggcatgcatcgagctacatatacgttccattattcgttcgtgtgattagacgattgtatagtattagacgatttgggggtgtgtaattagcattattgctgcattcacgattaatttagtgcaagatttccttggataataatgatgccaaagctatcgatggctaccttcactagccagttgtttgtgataaaaagggccggccagggtctagtagtaagtattactagtgtgcatgatatcatcgtgaacgtacctaaaagtttgacttgtaaatgatatgatactcctactatagtaggggtacgacctagctagctaatctagcattaaaagcttgattttggtgcttggacagcttggttgcttccagtcccagaagatacatatatatgctgctgccactgccatggcccatgaccagcacgtctccaccgtcacgcacgcacgaatctaaacgacgac

SEQ ID NO: 3600 - DNA, 4585 bp, Sorghum bicolor
cctaagagaagaagcatcagatgaaataattccaacgcacaaacgtttcgtgcatgccttctacgagtactccttgcgtcaaaaatgaatatagtattaggctattagctaggtgctaagtcagagcattctcattttaaccaacttttgaccaaaaaatacatatatttattatatgttttagatttattatataaaatatttatttggaaccatgattgctgatgttatttttgtataaacttgaaattaaaatatagttaaacgttgatcaaatctaagggggtgtttggcactgctccacaaactctgctccacaaactccactatggagcagctccataaaaaactggagttcgtggagtacctctttaggtgctctcacaacttcaccattttttctcgaactgagtgcgtggagctgaaactgtttggctaaaaaatatggagcgaagctgaaaaacatggagcagagcagtcccaaacaccccctaaaagtgtcagtaatataagaacggtccatgtattcagaagtgtacgtagttttttttcttctaactattgctaataaatttaagtaacagtacacgtgtcatgaatgcacgatatattactctatggagaccgtattcactgttttcttttcttctcccagagggagagtctaccgacgagcctggcgattaggttcacgttacatcgccgccccaaattcagagtcacgattagtccttgccctcgaaagaaaatcgagttcagtaccgcgagagttgcccaacaatgtgacgtccgcgcgcaacagcaaagtatggagatgccgtccctcgtcgaaggaaaagccactactggcttaaactaattgcattttatttcccctcatctccttttttgcgccattgttagcatagaaaatgcgatgacaactcatagaggacggcttggggctgttgtgacaaaaagaacagatagcacgactaatcagacgactgaacaaaccccaccatgggtgccctttttgtgaacttgcgatgtgtgcatcggggcatgtactatatcctgccttttcccctcattttcgtcgtaccttttgtgcgctctacaaataaaatccttgaagggcacagtgtatcctggagcaaagaaaccaagcacgcaaaatagcagtgaaagattttcttttttgaaaaattagcaggagcactactatgtcatataagaagaaagcagaattggtttacaacatataagccttacatttcaaagttcactcgaacacagaaagccttaagaaaataaaagtgactaatggagacaattctagcttcccagatgttctaataaaaatatcgagctcttccttaatcagtcttaatacctaggccggtgtgcgcgtttatctctcaaaaaatctctgattacgctctttttaaatatttcaagtcaagtacatcaagatggccgccgttcttttttgctgggatgctttatccctcaaaaattctctaattacgctcttttcaaatatttcaagtcaagtacatcaagatggccgctgttctttttttactgggatgctaacttcttccaccaaacttgcatagtatacatctcatcgtcgacggcagtgaaagattgtcaacgaagaatctaaatgagattatgaacaaaaaggcaagggagaaataaactccgtgcatgtttcacaatggactgatgcacaagcaggtttcatgtattattattatttctatattattagggtctgatctgatggacagtacaaccggacctcctgccccatgttgcaaaatcctgcaggttgtatgaatatgattggtacctccattgacaaattcacaactgctaattgctgagcagtagggagtatatttctgaattatcttgcagaccgatattctttttaatttccagaagatatggtttattaaaccttaactatttgcagataacagcagggcagcagcaagccaacgaccatccatcccgctcctcctctctctgtcaggctgtcaccgtccccaccgccgtcgtcctcgtcaccacacctcaccacacccgttgctcccactcctcccctctgcttccagaaccacctcctcgccaccattgctgctgctcactataagactcttcactcccgctgcgacacaagcaccgcaccatctcagctcagctcagcaagtagcttcttctagctctagctaaccaagctcggttgctgcaagaagctaatagtagccggcgcgcgacatggaggggaaggaggaggacgtgcgcctgggcgccaacaagtactcggagcgccagcccatcggcacggcggcgcagggcaccgacgacaaggactacaaggagcccccgccggcgccgctcttcgagcccggtgagctcaagtcgtggtccttctaccgcgcgggcatcgccgagttcgtcgccaccttcctcttcctctacatctccatcctcaccgtcatgggcgtctccaagtccacctcaaagtgcgccaccgtcggcatccagggcatcgcctggtcctttggcggcatgatcttcgccctcgtctactgcaccgccggcatctccggtaccgtacaccaccttcgtcctctgtttcttttcttctagtttcctccttcctctgcttgccttgcctgcctcgtcgtgtgtgcgtgctagctgctgagatgtttgtttttcctctctctcccccctctcgcaactgtgcaggcgggcacatcaacccggcggtgaccttcgggctgttcctggcgaggaagctgtcgctcaccagggcggtcttctacatcatcatgcagtgcctgggcgccatctgcggcgcgggcgtcgtcaaggggttccagcaggggctgtacatgggcaacggcggcggcgccaacgtcgtcgcgccaggctacaccaagggcgacggcctcggcgctgagatcgtcggcaccttcgtcctcgtctacaccgtcttctccgccaccgacgccaagaggaacgccagggactcccatgtgccggtgagtgttcggagctccagtatcaaccttgactgcttacttgtccgtgcctctcctctcctccgtggaagcttgactgacatggttatcgatggtttctttgtgggatgaatgaacagatccttgctccgctcccaatcgggttcgcggtgttcctggtccacctggccaccatccccatcaccggcaccggcatcaacccggcgcggagccttggcgccgccgtcgtttacaaccagaaccatgcctggtctgaccacgtgagtgaaaacaagcctcttctcccttcatgctgttataataagttgttccactgccttagcagaattgtttagcttattggtggaagtagcatgacgagtctaatctgatcgatcggatgaaatcatccgaaactaaatagtgaaatggagtctggttaggtgttacaaaattggggagtggctacaacattcaactgccacaaagtagtagaaagcattgatcagtagcagctttctgaaggtccaagcatgatatgataggatataatatcataagcatttgttggttaatttgattagattatggaaacctgcccttatccgaagggtgatgctgctttaatgtagcagccattcagccaaccactaccttctaggacaacgacctgcattagcgcattttatagtacatgctgacctcaacaatttctggcttttgcagtggatcttctgggtcggccccttcatcggcgctgccctggctgccatctaccaccaggtgatcatcagggccatcccgttcaagagcaggtcttaagtaaacctcctgttgctttcagatgccgccgatggaattactcgtattcgtggttgtttccaatgcctacaatgttacgtggagttcctccgttcctctttcaagttcgctctgcttttatctgaactccagacttgtataatttcagtacccaattgtgtaatatgccaccgctgttatgtgaaatgaaaacaaaaaaaaaaagtctttgaagtgatgatgagatagtcgagttgagtcatccattcggctctgatgttgcccttctgcaatgtctggccaatggccaaaccctactgtgcctcggccagtaggcagcggcgtctcaagcacaaactacagcaccgtgacaacggctacgcagcgcaattgctctcaagttggcggggtttggcgatttgttctcaagttggcggggttggcgccggcgaaaaggacgatgatgagtcaccccacattcgcagcggccggtgccaggcacctgccactgccagggtgggtggaggactggtccttctcatcccgatcccggcgcaatgctacaaaaaccagcgcggctacaccgtggccgattcttgtttcttcctcgcgggccgcgcagccggggagacgccgttcagtttcatcagccgccacgggctggttgctctcgccattactgcatatggtggtccggtccggtccggtctcgcggtgcctaggctgcggcgtgagcgaaggtgatcgatacgagattggtc

SEQ ID NO: 3601 - DNA, 3422 bp, Sorghum bicolor; identical to SEQ ID NO: 3590

SEQ ID NO: 3602 - DNA, 8474 bp, Sorghum bicolor; identical to SEQ ID NO: 3506

SEQ ID NO: 3603 - DNA, 9592 bp, Sorghum bicolor
aaaaatcttaaataaaacccttgggccttaaaaaaaagtctgatcttgccaaaccgagagtacacagaacacccttttcgcaactcttgaaatccgggtacacacgcaagtacaggctacgggtctatagaatccggtgtcacgtggtggtaccggcaaatcacctgtcaagattcctggcaatagtacactgctctgtgtctgtgcactctggtttgacctgtctcggccccggcccgagcaacgccgcacccaccacggcgccgtgccgtggtcgctgaaaaagaaacggcgcacgaggagaggagcccgctgcgtgctgcccaagtgtcgcggacgggcgccgggcgggtgtcccgtctggctccagccaaagcccaaggacaaggacaaacaaacgactccgcgggcggcgcgaatcgaaccatcccgactcgacgaacctgaacggaggcaccagcaccacccctctctctctccagggccacacgtcagacacggcaaccgtttcagccgtcaaggaatggaagagtagagtactcctaccgtcctacgtgctcaagccaaccacccgagtaaagtaaccgaccaggttccaacggtcccgcaccgcacctgcatcattctgttgggcccgcccccgtccggtgggccggtaatagaagccacgcgtcggcgccgcacgtggaccaagcgccgcggcccgcctggctggcgagcgcttatatgtgctggtgctgcccgcctcaccggctgctgtttttcatcctgcccccccttccctcctcgagctcagcacacaaggacaaggacacacaacaaaacgcgcaggcgaggcgagggaatccctcccattccttccctccgctcgcggctcgcctccgaccgacccccaaccaaagcggcgctcctgcttttcggcctttgcgccatccgcgcccacaagcgattcggattctccctacccttccaggtgcgcgcgcgtgcgatccctaagctattattcctctgtttttttttttgattaatctctcttgttaggcttcgaatcctgggttatgcggtgattgcgagcgggcgagttttgcgcacttgtgcgagacttctttctgccccccctgttgtggtttaaagtccagaatagctctgcagattggagtgcttctgatcggcctctgaggctggggggtgtgtttccgctgcgttcttctacaatgatttgattctagctgagtggcgtggcgtgcattttttgttcgcttgttctactgttccaggctccacaatctcgtcacggtttgtttctgattcctactgttggtgctggttgtgtttttctacctgtggtcttagtttgatcagtttttagtttctaggatgccatgatcagttgactgcatctaggtctgattactgattttttaacttgattgattggtcacttcagtttgggcgctttgaatgatttcaagttactcgggacttatttcaaaagaaatgattcgtgctcatttatgtctacttttttctacaaaaggaaacaaaaataatggctacctacctgttttggattttggattgttctaggatgctggcaggtgagagaggtgatttattcacaaattaactacagcagtaaaaattcttttttacataattggtaggagcagtaagccttatgttagactgatagcgactggcatctgtttccgcgcacttgagaagggatgggcgtcatgagcaagaatctttctaaagcagctaaccatcatcctctctcagcttcacctagttttggctatatatgatcccatttgaagtcgtttcacttacttggaatagaatggaatcacacccttcgccaaaaatgctgtgctgtatgtgccttttgccaatgaaagatatagtcagagtctcagaacacacattagaatgtctagccttacagtgtttaaccatctaagtaacatatcattaacactgcaggtttgcagacttaaatggagaacaacgttgagaaaaataacatgttgaaagagttctatatcccaacttatattttcataccggagtcgccggtggagcatgcatctcagatacctacttgtccagtggttgtttttatcaacaccaaaagtggaggtcaactgggacgtgagttaattgtcacataccggaagcttctcaaccatgcccaggtagtctattttttgcagatatacttgtctggtaccacattgatcttgcattttttactgcagtaaatgaagttatggctttgtggctaggcctaaccacatagttatgtaaaattcaggtatttgatctgcttgatgaagctcctgacaaggtcttgcacagactatacagcaacctggaaaggctcaagcatggtggtgacactcttgcttctgaagtctataggagactaaggctaatagtgagcgagtgcaatctggcaatttcatgttccactatctcctgctaatgtttttaccattattttgtatgtttgtttatttgaatagtcctaacatgtgtctattttatcatggaaatccaatcaggttgctggaggtgacggaacggcaggttggttgcttggagttgtatctgatcttaagttagtacgtccaccgcctgttgctacagttccgctgggaactggaaataacttgccatattcttttggatgggtgagtttaaaaatcaaaacaatccttttcttcctactagacaatctttactgcagtacttgcatagatctgctttgagcctttgatatatacttgatgataagatctttaatgcattcagccttatgcgaaggcgaaatattttgtagtccttttctccttacattgcaattttttaactttagtagcttttctggttaagtctagagaattttgggtagtaaactattctttacaccttttgtggaacactttatgtgactggtggctgataatatcaaataattaatatgcagggaaagaaaaatcctggaacagatcatgattcggtcatatcatttcttcaatcagtaagggaatcaagagagatgaacattgacaggtgggtttgctttttacagccttcactgtctttctgtatgaaatcttcatatatgggtcttgactaatattggaatcattacaagaattcagctggcacattgtcatgagaatggagggcccaaaagattctccttgtgatccaatcgcacctcctgacttgcctcattctttgcatgcatttcgccgtgtgcccaagacagatccacaagatatggtaacaatgctggacattatcatttcttttccttagtgttagcatagttactgcatttatctacctttgcctttctttttggacatggctgttgtttcccgctttctccttcgtaagaatatgaccagctttgctatatttgaattatcttgttgatatatattaatctatccattcaaaattgtaagtcattttagttttctcctaagtcaaacttctttaactttgatgaagtttatagaaaaatgtacaaacatctacaacatcaaactagattcattagatacactattaaatattttgatagtgtatttatctgatattgtagacgctaatatatttttctatacacttggccaaagttagacaagtttgacttaggacatacctaaaacgacttacaatttggaacagtaggagtagataatatcttgaactataacaaaagggaatagtacatatcatgcatcaagaacaaccattgctcaaacacgcctttcttgtagtcttgtgccattctatatatactccattacttgaacttcaaatatttagttgggatcttttcatcttgttgagtagaacatgaggattaattaatcttttcaacttattgaatagcacataatgtattttgaagtagatactattttgtgcaatatgtttttctctccactggttgaatttcttaaatgtcagttatcacataagagaaaattcttgtaaaaatgattgtgagaaaagttgaactagttgtcaacaatattatttgaaaacaaacaatttgaactatgctttgctatgctatgctatgccatgttttctgtataatctttttatctgcatgtttccaggagtattcttacacatttcgtgggggattttggaattacttcagtatgggtaagttccttgttccaaaaaggtgtatgctttaagttgtggctcaataccttttgttgatttttttaaaataaaatggaaagaagaaactttctccttagctaaaatggcagtttgaaagagattctttttctgtcgcaggaatggatgcccaagtgtcttatgcgtttcattctgagaggaaactgcatccagagaagttcaagaatcagttgtccaatcaggtgaaataagctggtgtgctttatttattttcttagtgctggtcattccttataattgattctcatttatgatttacgtatatgtttagcagtacataaaccaatctctttgctattcttactccagaaaacatatttgaagctggcatgcacacaaggatggttttgtacctctctgtttcatccaatgtcacggtaattctcttggtggcactaacttggctgtggatttgtcttctgtcgtgaaaaggaatatttgtcacaagttacaattcagaaatgtggtatttattctattcattttttttttaaaaaaatcatggcttgttgataactttgtagccagttcacatcacttttggcattttttttcactggccccaggaacattgcttgccttgcgaaagtgaagataatgaagaaatctggaaaatgggaaaccatggaaattccacaaaggtaagccttctgtgctcttccttgtctatatcaattaccaactagccaggtgccaatatgtctgacctgataccaaatagatgactactacaggtcaacttaatccgctaatctagaaattacatgtaaaattaacacactgaagcgaagtaagcgaaaaatactcatatcataagcacacataactcacagttcacaaatgtaaatcaatctatagaaactcctctaaagtgattttggccaactctatattttaaaagaagcataataaaccatgagcatatcaaagagttttggatgttatgtactcatctttgcattgatgaaactttgaagtttcacttatagcatatagacaatattgaagcatataatcctcatgttttccttctgaaccatatttctagttagcacacatcacagtggaagcactaggtgcttatattattttcagatgtttgtgacatgatgtgagactaatgcttcgaattggatatatataatgttcttaccacgtttcttacaccaatgcagtattcggtccattgtttgtctcaatttgcctagcttctctggtggactaaacccttggggaacaccaagtaagaggaagcaaagaaaagtgagtttaagcttatgctaatgatattccttgtacactaccttttttctaccattgaactcgatttattccacaaaggaaaattatgtttaagagggtatttttaaatttcctatttgatcctctcatgtgaattatacaattgcagagagacttggtaatgcctccacttgtggatgatggtcttctggagattgtgggtttcaaagatgcttggcatggccttgtcttgctatctccaaaaggccatggaactcgccttgctcaggtttgcaactgcatactggatcattacttgctgtattttctcccatccacatactggatcattacttgctgtattttcccccatccactccccacatgccacatgcattgctatcagtggatagatggatccaagtaatactagttagggcggctgttatgtggctggtggggatcgagggagatggattgggatcgaaggagcggcggctgatagcttgaatagtacccgcgctacagtacccacgggtactgttcacagggaggcggctgtgagagcgagagaggaggttagggttttgggcgccaggaacgccagccgcggggctctacccacggccggcaagagagaagggatttccgtctaatctcttgcttgattagtttgatacatctcctctctttatatagagaggtttacttgacttacaagcaaggtttacttgacttctaagcaagcgactaattaaccctaatgggctaaggcccaataggtccttgactcttctaacactacatcccacctggacatgcagctcgtcctcgagctgcaacttaagagcatctccaacagtttgccaaattccacttggcaaatcttgtggtttggcaagttgctaaaacaaatgacaagtaaaataattttatatctccaacagtttgtcattttggcttggtaaaatagaaaaggaggtccacatcacaccatttctgccacaaaagctgccggccgcgcgtgggcacctgtttgtcaggcgttgcattgtcgtggctacaagcagctacaagaggcctccagctaggactagtacgagtagctacagtgatcactgtgactatgtgctggagtacacagggccgaggccttgtttacttttacccaaaatccaaaattttttcaaaatttcctgtcacatcgaatttttagacacatgcatgaagtattaaatataaacaaaatgaaaaataattgcacagtttgatcgaaatttacgagataaatcttttaagtctagttagtctatgattggacaataattaccacaaacaaacgaaactgctacagtatcgcgaaaaaatttcaggaagaaactaaacaaggcccgaactgcaagcctccaagatggtactagtacaggcacccgtcctgttgcatcatgagtgaacgacgaaacatctctgcacactggtcttgtccaataaaaaaagctgccgcgcggcctcacccacgccttctgcgaaccggatggcaagtcgaacaggacgcgcaaatatgcgcgtgtacagaggatatttgccaagttgctaaaagatagcaagtgatttggcaaactgttggagcaccaaatttctagttttgccaataaaacaaaggtagcaagtgtaaatggtaaactgttggagatgctctaactacgacactaataatgactccacaagacacaaacgtaacacctaaaaagaagccttttacatctcggcttattttattattctgactcgaaacggaatgcaaatctttattgatgacttctgaagatatgtcgggcaccctccgcgtgatgaacatgtacgtgtgcagccacctggatcccatgggcgccatctggacaaaagggaagcacatggacggccatcaggaattggccacaacaatgaccagcggaggcgccctcgtggcggtcgacgacgaaaaacagcgacgctaggcaaagcgctcccgccaatgacaagatagatagggaggggagcgccttccaaacgccaccgacgcagaggttgagttcgccacctgcggagaaaacaacttgttgcccgccacccatgggaggaactgaatgcagaagttccttggtgcagcgaacgagattgaactcatccatgtggcgaagtgcaacttggaggagatgtgaaggggtgtcgggttgaatcagctgcagatcgcgcatctcccgcacctgccgacgtgcaaggagaccgcgcgcagcagtcagctaagcagcttgtccgtcggctgctcaatttgttgtgacttctcgccctcatcttggatctgttggacactgacgcccctatagatgcccatcggtgaatgggtgctggaggcttggcacaccgggaacaacaacaacgctggtggtgggcactggagtgaccgtcgtcgttaccgtcggggtgctcgccatcgtgtacaccagccccatcgttgatgccatagcatatgatgggatcggcgaaggagagggcgacatccatggctgatgcatggaaaccggagccgtcggctgcatgcccaaactgacgaggtaggactgaatcccggccaccatcttgccgaggtcgagaaccgccaccgtcagttctgcattcgacatgacggaaccggcggataaggatgcccccgcggtcagcggcagcgaggtccacatcgaatcgaacctgagatcaacgataccagatgttatgtggctggtggggatcgagggagatggattgggattgatggagcggcgggtgatggcttgaacagtacccacgctacagtacccgcgggtactgttcacagggaggcggctgcgagagcgagagaggaggttagggttttgggcgctaggaacgccagccgcggggctctgcccacggccggcaagagagaagagatttccttctaatctcttgcttgattagattgatacatctcctctctttatatagagaggtttacttgacttacaagcaagacttatttgatccctaagcaagcgactaattaactctaatgggctaagtcccaatagttccttgactcatctaacacgtccttgactcttctaacagctgcccagttcaaatacaatttcaactaggcaagcagatggattaaacaatttaaaaagcccagtcaaaataaaaccactctgcttccggagattcgaatattcgaccttcaattcaaagaaaactagttcatgagcaataaaattcttttgtcttttcatggtcaggctcaccgtgttcgatttgagttcctcagaggcacaactgatcatgcttacatgagaatggatggggagccctggaagcagcctcttcccacggatgacggcaaagtcgtggtagagatctcccatgctgggcaggtgaagatgctcgccactaaagactgcatagccaaaggcatccatgaatcgtgcccagctatttcaacggttcatccagagtccagctccagcgacgacatgaacgatgactttgaggaggagcggaggaactttggtgctgccttgtcttttagatacttgggtgacgtgaacaaagaataaggtctcttgttttttattgaaccttgtacattttgctttcatagggcgtagcgaagtagtttgaggcactaacttttgtaaggttgtaacttgccgatgtaagataaacttttgctgacaatacaacggattctggggtgactgtttgtaccatcagtatttttcaatacactttttcttcagcaactcattgcctgagccctgagaaactacaatggctttaacaaaggcattcgatcttagaaatcagttagttacctgcgaacttcgatttgaaacaatattttataattaaacaaaaagacacaattcaggcttactataaaaatatattatcttaaataacaagagtttttctataatacaaatagtttttcatatgaatctagtaatatcaatgctgtacaatcaattcaatctatataaagtttcagatattgattgtttgatgggcaaagttaacaacgtttaacttaggacaaattgagacggacttgtat

SEQ ID NO: 3604 - DNA, 7320 bp, Sorghum bicolor
taaggccgaaaatgcgaaacgataggtatgatgtccgaaacttcagtaatctgtctctcccacacagaaagattgagacctgcaaaaatagtaataggaaccgggagattctttgctcaactcgcgcatcacgcggcgatgcttcctggcagaataatagaaagttcgggttcgcaatcatggcctcggtttctaagcctcctttgttccaatcgcccgggcaacactgtacggcaaaagcagtacacatcagttagttgctaggggagttcctcatccataggctattttcctgcccaaaaaaatggcacttgcgccatcaggctgtacagtaaactactagtgttcaatcctgcatcgagccgccaaagcctcgaccttgtcttatgcaaggggcccctgcttaacggtaagcgtatcccgttcggcactaattgaggaatctcaagcttgtccaacaacattttggctcacatcgtgaaactagtggttgagagcagcagttcatttctgatcgatgttattgatgtgatcctgatgtctaatttagtgagcaggattgagtgtgtaattattctgatttcggaaagaacgtagcagcttagatggattagtgctcgttattactggtggtcttgtgcccttgttcgatgaatcggagcacggcctatccgaccattttcacaacagtggatgacagactggatatgccatgtctgtcgctcaaaccttgctaaccgtggtccgtggagacgggcacttgctatcttttctctgaactattccgaccactcgatcgagctctccactgtcccacgaagacaacagggtgtttggttgaagttgttaaaatttaacgagtactatagtatttttattttatttgaaaattagtgtctaattataaattaattagtctcaaaaaaattcatctcttaaatcactctctaaatatgtttttaattttataaatagtctacatttaatactttataaatgtattcaaatattcgatgtaatggagggtaaactttaccgcttcaaaccaaagaggccgtagttgacatcgccatgtgatcacatccatttttcagtgagaagaaaagatcgtgttgctggtcacgactcacgacaatggttaattccaggaagtttcagtccatgtctgtctgtacccctttttttcttctgagtctagtctttcccttccttgctcttattttcatcaccgtgctttctcatctgtagtatctgcacaacttggtacgatcgtatcaacgtacgtacgtacacgcgctacacaagaagaaaagccaccatacgaattgctcacgacggggcacccgcgagagacgggtcctgccgtccgggaaaacccccctggctagagagcccccggccgagctcaacgacctcctgctgcgcggtcgcgtggactcgcggccgcgggtcgggagtcggcacggcggatttccgagtcccccgttccatttccacacgttggacgacgaggacgacgacgcgggcggtcaaaagccaccgcgcgaggcacggccggccacgcatgcagggttgcagaccgcatcatcagccccgagcccaaccgccaacaccactctcccccgtccccgtccccgtccaatccagcgcccgcgccaggaaaacaacgcgtcggcggctagcgcccaattgccaaccccggcaatcaaaatccccctcccgcccgccacgcgcggagaccctgacactgacgatggcccaactgtcgcagcagggcgccccagcccccacccaccagccgaaccgcacgccacgcccacgccggtggttatccgatcgcgggttggtgcgcgtcctcgtttgaccggttgaacgccctgcccgccgtcggatccgagcaacatcgacgccgtccgtagcagagcacagtggccgcgccgtgcgtcacgtcacgcacaagtcccgctcactttctcgttaccttcctcagctggagtccggcccggtcgagggcacaagcaccaggcagcagcagcgatcgaggcctcctcctgcttctgcttcagcttgagcttcagccgccccccgccttttataaatcccacgcctgcgcatcctcttttgacaaagataaggtcaaattgcctgatttgcttgctgcttgaactcgagacttggtgaggagtgagcagtcggtcttcctcttctccgtcgagggggggaataattaagccagctgcctgccagggcctcttccccgcggggaagaagacaggggatgagcggaggaggcatggacggagctccggtcgccgagttccggccgacggtgacgcacaacggccggttcctgcagtacaacatcttcggcaacctgttcgagatcacgcacaagtaccagcctcccatcatgcccatcggccgtggcgcctacgggatcgtctggtacgtacgttctgctcgagcttgagccatggctgattgcttgcgagctgcagaagatgattaccgagtgttaggattacaattactagtagtagtttaattaatggatgaggatggtcatggattgattggacttggaccaaccaccaatagattcttatctatagataagagtatagcagttgagctagcggtttggttaatttagcgactatctactagtgcagtggttggtgagttctcgaatcgaatgaacaccctacctcaccttttaggaaagtatttttttaggaaattattacgggtgggttgattataattctgagaataaataagaaaaatctgtacggttcgagcgcagctcggtgatgaactttgagacaagggagatggtggccatcaagaagatcgccaacgccttcgacaaccacatggacgccaagcgcacgctccgggagatcaagctgctgaggcacctcgaccacgagaacgtaagcaagaaacatgtagcccttgctgaatagttgaatctggcgccgtttaattgctagctgctcccattcgggttttggggatgactgactgactgactgacacatgaatgaacaaacagatcataggcatcagggacgtgatcccgccgccgatcccgcaggcgttcaacgacgtgtacatcggcacggagctcatggacacggacctccaccacatcatccgctccaaccaggagctctcggaggagcactgccaggtaataatactaagtgactattattagcagaagaaaagaaacaacacggcgtcgccatcagcttaatttgccgccgcctgtgatccgagtaatccgacgactggctggctaattataatctcggtcgccgggcgcagtacttcctgtaccagatccttcgcgggctcaagtacatccactccgccaacgtgatccaccgggacctcaagcccagcaacctgctgctgaacgccaactgcgacctcaagatctgcgacttcgggctggcgcgcccctcctccgagagcgacatgatgacggagtacgtggtgacacggtggtaccgcgccccggagctgctgctcaactccaccgactactccgccgccatcgacgtctggtccgtcggctgcatcttcatggagctcaccaaccgccagccgctcttccccggacgcgaccacatgcaccagatgcgcctcatcaccgaggtaccaatataataccatccgatcgccgacgcaccgccactctttctggttgcgcttgcgcctgcacgacacgatcgacggcatttctgacgcgtctggtcatcgccactgctgctggccggcaggtgatcgggacgccgacggacgatgagctcggcttcatccggaacgaggacgcgcgcaagtacatgcgccacctcccgcagttcccgcggcggccgttcgcgagcctgttcccgaaggtgcagcccgtcgcgctggacctcatcgagcggatgctcaccttcaacccgctgcagaggatcacaggtcagtccagtcgttcggcgcctcgccgggggcgggcctactacagctagcacctttgttttttactgttatttcttttctccatgtgcaaccggtgcgtgcggctgctgaatcctcaacctccgcacgtgcgctttcctattctcgtgccgtgttgacacttgactattagtaggattttttttttgtttgaggagcaagcagccatgcgtttggtagtcagtaggtctaggactagcacgtgggggcactcgcgatgaggctttctttatcttttcgtttttatttgacaaacattgtccaatcatagagtaactagacttaaaagattcatctcgtgatttacagttaaactgtgtaattagtttttattttcgtctatatttaatactctatgcatgtagcgtaagattcaatgtgagacgaaattttgaaaagattttggtttttggagtgaactaaaaaggccacagtgtaggagtagtgtacatttccagagaggagttgagtagccctggcagtatggcggcacttcaatgcgtcggtttgttcgcccaaatttggatgttggtctggtctggtcagaagtatatgcaatcttctttgtgccttgtttagttccgaaaagatttcggatttcggtactgtagcatttttgtttgtttgtgacaaatattatccaatcatgaactaactaggatcaaaagattcgtttcgtgatttacagttaaactgtgtaattagtttttgtttttatctatatttaacgcttcatgcatgtaccgcaagattcgatgtgacggagaatcttgaaaactttttggtttttgggtgaactaaacaaggccttggtcttgtttagtttcgaaaactgaaaagttttcggaactgtagcactttcgtttttatttgataaacactatccaatcgtagaatcgtagagtaactaggcttaaaagattcatctcgtgatttacaggtaaactgtgcaattagtttttattttcgtctatatttaatagaccatgcatgtggtgtaagattcgatgtgacgggaatcttgataagattttgttttttggggtgaaattaacaaggcctttgtctcgagtagaaacttttacttatgatccgcagcaacaaaatggggtgatttggtagttctcttcgttgaattcagagttgaggccataacagaaaaccgggcatcatttctgtcattctatgactaaatatagtaatgatatatagtacttatatagctttaatttccatcgaatgcgctagcatagcgtgaagcttttgttggtcagcttgttgcctaccgtccaagtgtacaaccgacgcaacactaccaccctgcgcttgcaaatatacagctaagatgctgagttgatagaaaaattacctcagggacaaacgagagtcgtacaaaaatcctgctccggcttcccacgagacaaaacctaaagtgaaaggagctgtttggttgtagaaatggaaacgcaaacgcaaacgtaaagagaaatgaactccaaatgttaccaggggtaacagatttgaactatctagcctttatgattgtgttactgtataggaactaaacaagtcgtaacttcgtacattttattaaaagaaaaaaaaatacactctctgtaactacttgtttctccttctgcctttcccaatttttattgtgcacccagggtcatcaaagttgtactcgctgtggagctttctccatatgcatccaaagcctttgctaccttttgcattattttgggggctgttgctttgacccatcatcctcggctttgtagcctcctccatatcgcttttgccgaagtgacgatgacggctatgtaccaacgtacaaaataaacatgttttatataagatgaaaaaaagagagacaaaggttgaagataatcttaaaattagattcctctattggcaggcagctgtccactagcggagttacttcagagactccctattcgtttcagattagcagagtttctttttctctgttggttttagactagcatatatatagggcctgtttggtacagcttacaacagctttataagctgttgtgagctgttttttttgccaaacacttatttccaaaacagcttcatgggtggagctgtttttcccctcctctcacaaagacataattggatgaagctggaaaaaagtagcttattgcagcttctccctcatttctctctctcaactatgcatgaagtagttggtgaagctattttgccaaacactttcttcaaaacagctcaacttagtatagctatacgatgactgtaagagctcacgaatgactgatttcattctctcagttttctcaccggaatctgttttgtcatgcagttgaagaggcgctggagcacccgtacctggagcggctacacgacatcgccgacgagcccatctgcacggagccattctcgttcgacttcgagcagcaggctctgacagaagaccaaatgaagcagctcatattcaacgaggccatcgaaatgaacccgaatttccgatattagaatgtatatctagatgtatgcttcctcttttatgcacaatgtctgtaaataggcgtaagtataaagattggagagccggggtagacagaacattgcatttgtttgtttgctgatgttcgagcccaccatcctgtctgtaaggctgtgtaatctgttgctgcaggtttcaggcggcgttcctgtaatgggttgtaccaagaataaaaggtttggactctgggtcatgtttctggaatcacaaatttgtatgccgagttagctagcgcatcttcttaccgaatccattcacgccttgtttagtttccaaagttttttttagattctccttcatatcgaatcttgcggcacatgcatgaagcattaaatataaaaaaaagctaactaattgcacaatttacctgtaatttacgagatgaatcttttaagtctagttagtttataattaaataataattgtcaaataaagccgacaatactacagtagcgaaattcaaaatttttcgcgaactaaacaaggcctcagttcagattcaaaacacagagaacgatggttttgtttgtagctaacttttgcaaagcagtaatttaatatggccggattactcgtccgttttaaactgtaactcatttaagaattattctaagttaaatgtgactatctttagccaaatttatataaattatattaatgtctacaataatacaatatcaattaaatgcaaaagagcatagctcagctggttgcccactaggattcaaggcttcgcaatttcctatatttat

SEQ ID NO: 3605 - DNA, 3508 bp, Sorghum bicolor
catgaacgctgacgaaggcagtgaggcaccactgaagccaataggaggggtttgaaggcgggggaatgaatgcagataaggagatggcaggaaggaggcatgtcagattgattataacgctgatttgtgattgattatagcgatgggttgtgatggaggacagtgaatctgtcgaaaagggcaccaccggaactaggaagggaggtgaaggtggcaatggcgagtgacacagatgggcacggtcagtgtgaatggtgaaagaagaaggggaaggatccaatttagtagagctccactcattgattctcttgtagagtaattcttgtgggggagcaagatattgagctggtgaaatgattctgggtgatgagtgaattagagtggtgggcagtagagtttttttagctcctagcttgtaatgtaagtggtgaattgatgcttatcaactcttcatcaaaatccaattatattttaattagttggtagcatttcatagaatgcactccaaaaaaataaggacgccccccctacaaaataggtagagcgagtgatttgatctgagatcttgattttagatccggcaatcaaaacaaattgagtgttgagaggctctagtctcatatggtctagttaatagaacagctactaacaaataaatactaaaaaagttatagaacttcaagtaatttcaacctagacgcaataagatatagcatttttaaaataactggtttcagttttttagctaaaataatttatttttgtattttttaagattaaacaagattttaggacttttaattgtatatcttttataaaaatgtttagataattttaaaaatgtatttgtaaccaatttaccattctgaactatcaacacatttaccttcttgctactgacacggcgataaggacgacggctaatgtgatgtcatgtaaactaaatcgttgtttgaaccgtccagagaccaaaaccaatcattttaaaagttgaagggactaacgtgcggttttatagacagagggatgaaaattaaactttgagaatagtggatagggtgaaaagaaatttgtcggcataccgttatggtcggattcgatgtggccatgggattgatttgctctgatcttctccaagttgtgtcaatcggctaggatgtacgcactgatgtagccctgtagggtcacccgcagaaaaaaagccttgtttagttcgcaaaattttttgtttttgggtactgtagcatttcggttttatttgacaaacattgtccaatcacagagtaactaggctcaaaagattcatctcacaaattacaggtaaactgtgcagttagtttttatttttatccatatttaatgttccatgcatgcgaccaaagattcgatgtgacgggaaatcttgaaaatttttgcgaactaaacaaggtataaattgctggttttagaagaatcgagacagattagtgttgtttactatcctcaatgattccttcaatggccagctgtccactttacgatctgtgctttttcctctgctcacgacagagctgacgaaaatcgctgcctgcctgctgccccggcagccccgctgattagcaacgtcggttcaccagtcaacgattcaaagtttgactacctaacccagctcagttaaggccttgtttagttccaccaaaaaaacgcaaaatttttcaagattttccgtcacctcgaatctttaaacacatgcataaagtattaaataaagataaaaataaaaactaattgcaaagtttggtcgaaatttacgagacaaatcttttgacatagttgaacaataattaccacaaacaaacgaaagtgctacagtatgatgaaatttttttttttcaggaactaaacaaggcctaaatatacgatgattgttcgcccctttcgctcaacgcaaatcgtgaaaactatcgacaattccaacagcgtcgaacaacaaagccgcctgcaagtgcaaggctactgcaatggcggccggaggcgagctgcagctgctgggctcgtggtacagcccctacgtggtccgcgccaaggtggcgctggggctcaaggggctcagcagctacgactacgagtacgtcgaggaggacctcttcggcaagagcgacctcctgctccggtccaacccggtgcacaagaaggtgccggtcctcatccacggcggccgcccggtgtgcgagtcgctcgtcatcgtgcagtacgtcgacgagacctgggcatcaagcaccggcggcactcctcctctcctccccgccgacgcccacgaccgcgccacggctcgcttctgggcagcctacatcgacgacaaggtacatatcaaagcgttggtgcagatgctgcatgctattttcctttttttttttttgcttcttgcgctgagaatctgggatcattcattgctagttttgatcgaacgaacgattctgtgcgatgtgcttgcagtttatcctggcgtggaggcagctgttctggtcgacgacggcggagaagatagccgaggcgttcgccggcgtcgtccccgtgatggagacgttggagcgagcgttcggggagtgctccaaggggagacccttcttcggcggcgacgccgtcgggctggtggacatagcgctcgggagcttcgtgctgtggatgaaagtggtgggcgaggtggccggtgtgaacctgctggacgaggccaagttcccggccctggcggcgtgggcggagcggttcctggcggtggacgccgtgaaggaggcgatgccggacgccgggaggctactggagcactacaaggcgtttcgggctaaatgggcttcacctgctgaacttgctgcttacagatcactgcaacagcaagctaattgatcgtgtattttaatgtctacgcgtttgcagatgtgtattagggttcaataaccatgaataaagtcttgattctgtcgaggcgaatagaccaatcgaatgtttttgaacaaaacaaagatatttactattgattattccaccatcgtccgctcgtgtggaacggtgtgagtgtcctgctcaagcatgttcgtcggtctgaaaagttatagctgaaaatactatttatttatttattgtgagagaaaaatattattggctgacagaaaaaattatgactataagacaagcgagtgaacaaccacgattccgaaaataagaatgttcatagaatttcccctctttttattgtaactctttttttttaaatcacagtacaaacatagacactcgtcgtacatgtacatacttaatttggattttctctaatatgtgcaatatatatcacgaatggttcatggccttatttaaaagaaatgggatgagatagaattgcaaagcattttgttcgaagatgtgagcatgtgttagttacactctgcgctctctcttgtttacataaacacactcatgtgcttggacgtctccagcaataatatctaaaatataccccctacttttatattta

SEQ ID NO: 3606 - DNA, 4471 bp, Sorghum bicolor
tctatgcatgtgtcgaaagattcgatgggatggatgaaaaatttttaggtgaggaactaaacagggccttacttttgtttgacagttcacggcacagtccgagcattttcaaaaccatcggtgcctcgcagctactcatcacgcctttagttggcgaaattttttgattcaattactgtagcactttcatctgtaattagtaattattgtttaactatagactaactagatttaaaagattcatcttacaaattacacgtaaactatataattagttattatttttatttatatttaatactttatacatgcgtctaaagatttgatgtgatgagaaatcttaaaaaaaatttaggaactaaacaaggcctcaatccacaacttaaattttggattttgcactgattgtcatattgagagtcacaatcgtcgaaaaaaagatattgtgtcacagtgagtgtttgaatagtaataacaaaacaaattacgtaagtcttttgcactctacgagatgaatttattagacctaagtaatacgttattaacatatgtttacttagccttactgaagtaatcatagactaattaggcttaaaagattcgtctcgcaaaatagtcaaaatttttgcaattagttatttttttagtttatatttaatattttatgcatgtatctacacattcgatgggatagggagtgaatttaaggaggaggaactaaacatggctattactttaatcttatttgaagttaaactttaaacgtaacttgattagaaaaaatacgtacactaacatccatcacatcaagttatttttattatctttttgcataagtcatgttttcatagtgtgcttgttcacacttgttatattcatatatcttttttcctttggtttagtcaaatttacttaaatttgattgcggacaaatttaaaatggattaatatgaaatgtagggtgtaccagctagatattctaacctgctcgcatctgcacttttcctatctagaacgtgttaaaattgtttcatgtattgtgcaaaaaataacaagagaaggtcgaccgtatatataattatagcctattagctcactcatataatacttattagttcacttgtttgtctcactaagtttcttagttcttattcatagactaaagataagctagctataaacttaaatcccgattctcttccttctcactcatctcgtcagtatatagcaaatctatagttctttaccgtaattactttaatgctagatcctttagaattttgtacagtccaaacatactaattgtgattccaatattaatggaagcaaggccttgcttagttccgaaaagtgaaaacttttcgatactgtagcaatttcgtttgtttgtagcaaatattatctaattatggactaactaggatcaaaagattcatctcgtgatttacagctaaactgtgtaattagtttttgttttcgtctatatttaatgtttcatgcatgtgctacaagattcgatgtgatggagaattttaaaaattttttggttttcagggtgaactaaacaaggcccaaaatgctgtgttggtctaaatcacgcaatcagtcgcctcaacgaagtctcaaaaagatctcccaaattctctcaacaaaccccaataaagccagaaacataaagctccttcatgtcctaatcgcaaaagctttcacccaattcatagcagtagcaacaaggataacctaagcaagatgcttggtcttaggttccccacctcattcaaacacccaaaagaaaaaccaaatagataagaagatcccaaacagtatagataataataaagtatttttttaaaaaaaatcggttgatcttttttttttccctcgcctttgactgcccacgcccacggcgcagccccatcccatcacctcgttaaaaagatcccaaacgcacacggcacacagccacacagcccccaagcccccggcccccacgcgccgtcatggccaactccatcatcccgagtacaaacagcagcggggagcgcgctgcggtgtcggcatcggccacgacgaagctgggccagctcaacgccgcggtggagcggtcatgggtcggccgacggttccgcctcgctgcgcgtgggaccacgttcaccacggagctgcgcgccggcacggccacgttcctcaccatggcttacatcctcgccgtcaacgcgtccatcctctccgactccggcgccacgtgcaccgtggacgactgcgacgcgccgtccccaaggtgcaagttcccgcccgttgaccccgggtacgccgcctgcgtggcgcgcgcccgccgggacctgatcgtggccaccgcggcgtcgtcggtgatcggctccttcatcatgggcgccttcgccaacctccccatcgcgctcgcaccagggatgggcaccaacgcctacttcgcctacacggttgtcggcttccacggctccggcacgctctcctaccgcaaggcgcttgcagcggtcttcctcgagggcctcatcttcctccttatctccatcgtgggcttgcggtccaagctcgcccagttcatccccgaacctgtgcggatctcggcgtccgcagggatcgggctgttcctggccttcatcgggctgcagagcaacgagggcgtggggctcgtgggcttcagctcgtcgacgctggtcacgcttggcgcgtgcccggcgtcgcagcgcgcgtccgtggcgccagtgctgacattccccaatggtacggtggcactcatgccgggcggcaccgtctccggcggcgtactctgcctgtcggggcgaatgacctccccgacgttctggctcgccgtcgtggggttcctcatcattgccttctgcctcatcaagagcgtcaagggcgctctcatctacggcatcctgttcgtgaccttcgtgtcctggccgcgccacacggccgtcaccgcgttcccggacacgcccaccggcgacgacagcttccactacttcaagaaggtgttcgacgtgcaccggatccggtccacggccggcgcgctcgacttcagcggcatcggccacggctacttctgggaggcgctcatcacctttctctacgtcgacatcctcgacacgactggcagcctctacaccatggcgcggttcgccggattcgttgacgatgtgacgggggagttcgagggccagtacttcgccttcatgtccgacgcgacggccatcgtgtttggctcgctcctgggcacgtccccagttacggcgttcatcgagtcgtccacggggatccgggagggcggccggacggggctggcggcgctcacgacggcggcctacttcgcggcggcgctgttcatcacgccggtgctcgcgtcgataccgtcttgggcggtcgggccgccgctggtgctggtgggcgtcatgatgatgcgcgcggtggcggaggtcgactgggacgacatgcggcaggccgtgccggcgttcctaacactagcgctcatgccgctcacctactccatcgcctacggactcgtcggcggtatcgcctcctacatgctcctccactcgtgggactgggcgtgccatgcgaccaagaggctcggctgccgcaagaagatcggaggcggcgccgagaggactaattgcggcggggaagagcagaggaaggatatggaatccgcataacatttctttccccttttgtcctctcggcctttcactttggactctttttttcccccgtcaatttcttcctgtttttagggaatttcatgtacgctatcggggttgctaggtactccgtattataaatagatcggaatttcatgtagaatgcgcgtgcttttctgctgagacatactgtactaagtcgaaggttttgggatcaacaagtggcaaacgcccacctctgcgcacgaggggtaagcatatacattaaggcatacagtatatgacatagacatggttatattgtgaatcttttatttaaaaggtatactcttggctttgtgagcacttttataaaattgactatatgtaaacatggttgcaacatctacatatcatatccttcactttgacggcatacaagaaatctgttagtccatgacggtttctctgtgacggtcttatgacggtttgagaattagatgtaattctatgacaatttgaaccatttgtcaccttgtggctgtctatgcactactggaaaatacactattcctgtgtgacatgtaatttttttgacggacacaaaattactcccataaaaaatggataaacctgtgggttggtttggcatacaggaatattatatttaacctgtcaatttttatggaccacatagaaaaaattagctcacagagtaattaaattaatatccttgtgtgctttgtatatttttctgttggatcacacacaggtcaattggcatgttcttttggcgcggcaaaagccag

SEQ ID NO: 3607 - DNA, 6961 bp, Sorghum bicolor
  misc_feature (1)..(445): n is a, c, g, or t
  misc_feature (1496)..(1595): n is a, c, g, or t
nnnnnnnnnnnnnnnnnnnnnnnnnnnnnnnnnnnnnnnnnnnnnnnnnnnnnnnnnnnnnnnnnnnnnnnnnnnnnnnnnnnnnnnnnnnnnnnnnnnnnnnnnnnnnnnnnnnnnnnnnnnnnnnnnnnnnnnnnnnnnnnnnnnnnnnnnnnnnnnnnnnnnnnnnnnnnnnnnnnnnnnnnnnnnnnnnnnnnnnnnnnnnnnnnnnnnnnnnnnnnnnnnnnnnnnnnnnnnnnnnnnnnnnnnnnnnnnnnnnnnnnnnnnnnnnnnnnnnnnnnnnnnnnnnnnnnnnnnnnnnnnnnnnnnnnnnnnnnnnnnnnnnnnnnnnnnnnnnnnnnnnnnnnnnnnnnnnnnnnnnnnnnnnnnnnnnnnnnnnnnnnnnnnnnnnnnnnnnnnnnnnnnnnnnnnnnnnnnnnnnnnnnnnnnnnnnnnnnnnnnnnnnctcattggcccagcgtgagccttgctagtatgctttcttaagcgagtgatgagagccatcaagagtgcctggaatccgttaggcacgaatgcagtgcgcccgcactttagaacactccacctcgttgcctaaatgcgtcatcacatatgcatgaagaactagacagctcggcctacttttttgacgcgtgacttagagttcttggaccatgttgatgcggcaactgagagcccacgatttaatcacgcctaggaatttcgaagccactatatagtttacaagggtatatcgttttccttttctgtgaggactatttgtcgaaattctgatacatcttcagataaagggtgcacctagatctaacaaactgcattattgagcactgcttctttagatggttgataggttttgagctgtgtgaaataatggattgaacatataggttattgacttccttttaaaaaagagaggaatttgttgcttcttttgtaagatgtggttgttagcttgaaagggatttgatttgacaacatgaatggcttttgttcttttgaacgatttataatgaaaatgtacctgtttatagccaaaaaaaattgaaaatgtacctgtcattcatgcatgaaaacttgaaacagccacgttttacacgtatgctactacagaaaagctgaaaattgtaggctctccggtttcccctggaaaataagaaacatgccatcatcaaccgaaattattcataagtcggctagttttcatgctaccgttcttctactcgataaagtataaactggctagtagttagaaatcatttgatatatatatatatatatatatatatatatatatatatatatatatatatatatatataataaatagggagagaaagtcagcgtacaagctaactcgagccaccgagagtgcctacactctcttgatatgtgtatatgaaaacccctcactctatatgtctagagaaagcacaaacacaaaaacatgatggcttgcactcactcactttcacaagtgcatttgctttccctcactnnnnnnnnnnnnnnnnnnnnnnnnnnnnnnnnnnnnnnnnnnnnnnnnnnnnnnnnnnnnnnnnnnnnnnnnnnnnnnnnnnnnnnnnnnnnnnnnnnnnaatatgggggggaattcaacttacaagttaattagagccaccaagagtgcctagactctcttgagtagtggacttgagaaccctccaacctaattgccaacagaagtcactaacacaatattatgatggcctgaacataaaaactttgagaagtccagttcctttccctcacttcggagtttgcctgaatattcgctgagttcacttgcaccagaggaaactgctgtatttggatagcgtgactgtctagctgcaacttgaaaagattatagtcgcaagttgtcaggttgactctgcatttttcttaaatcaaatacagacttgtcagttatcaactttgattttcattcctatccctaaatagcagctcatattctttcaaccactggtctgctgctgtcattggaaaatcatacataactttggacatgagcatgaacaagtaatcgataagctgtgcataacctattcactagttagtcactatttccagcctctacgttgaatgtggaacattttccgatacagattcgtatagcttgctccccatcttgggctctttggcagttggcccctattgaaaatagaggtttgaccatgatctctggctggagagccttcttgcatctgcatatgcatatatataatgggcagtccctagcttcatcacgacgacgaagcaaagcagaccttcttcacaagtgcttctgctaacaggcatcgtcgcatcgctgtgtaggttttgtttcgacgatccttagctgtatatatgtttacactttatacaccatgatggagtaacaatcaatagttggctttctaagaaacaagggtgcgtgtgtaccttcatctgatcatctcattttcagatctggctttcgttaggtgcaccatgcatatgcatgcatctgactatactgtccgtgttctttcgtgaaagtattagattttttccatctgaaacctgaagagtttatgaacatatatagctttatttccttgcacgatccagtgtattgatgatatcttgtattaccatgatgccaatgtgattccttttgtggtttcctactccacatcgcagatattcctgaaaccagctgtccatcccactgggagcaccgcagatgccgcgaacggtgtctgatgggggagaagacgaccatggcgccgacgttgctagcaggacgtcgtcgcaccgccgcatggagcacggacatgggtataaggtcggtgtcccaccgaagaagaacttcctcaccgagttctctgacgcggtgaaggagacgttcttcgctgacgacccactgcggcagtacaaggatcagcccaagtccaagcagatctggctcggcctgcagcaggtcttcccggtgctcgactggagcagatactactctctcagcaagttcaagggtgacttcatcgctgggctcaccattgccagcctctgcataccccaggtcagttgagttatacatcagagcgcccttgctcatcagcagcagcacagttcatgcactgacgctatctgatacaatctgtggcctaacgaaccgtgctttggaccacaggacattggctattctaagcttgctaacttgccagcagaggtgggactatgtaagtgctctcattcacatatgcatcatccctttgttctaattgcgaccctttccaactatgctgatcagagacgtgctcaccatttttacagacagtagctttgtgccgcctctgatatacgccgtgatgggcagctccagggatatagccatcggcccagtggccgtggtgtcgctgttgctcggtactctccttcagaatgagattgaccccaagacacacccgcttgagtacaagcggttagcgttcaccgcgacctttttcgcaggggtcactcaggcagcgctcggattcttcaggtaagtgatgcctggtgattgttaacctgtcagttcgtagctcctttggcgtgatcatttcatctagtctgaaactcaactctgccacaggctagggtttatcatagagttcttgtctcatgctgccattgtcggattcatgtccggtgctgccatcaccattgctcttcagcagctgaaaggatttcttggaattgcaaacttcaccaagaaatctgatattgtatctgtcatgaaatcagtttggggaaatgttcaccatggggtaaaacactgtaccatgtggatcttttgatggaaaccacggtatttgagactttgagtgcttgacacaatatgtgtgtgctatttattgcagtggaattggcagacaatactgataggagcgtccttcctggcattccttctggttgccaagtacattgtaagacaatacattacatgctccaaaatggcaagaactcatcttggttttcttttgactatgcgatcacacttttatttgaataattcaggggaaaaggaataaaaagctcttctgggtgtctgcaatcgcacctctcacttcggtgatcatatccacattttttgtgtacatcactcgtgcagataagcatggtgttgcaattgtaagtcatatttgaccgttcttgatgttagcatatgcaagtgcattattagttgaagctaacaataaagatcatcactgcataactgcaggtcaaggacataaggaaaggcatcaacccaccttcatctagtctcatatacttcactggcccatacctggcaacaggattcaaaattggggtagtagctggaatgataggactaacggtgagacaaaccctttgatacggaaacatacttcttcagcttttggtgtcaaaattatcataacgtggaaaacttttctatgacaaaaaaaatgtgctgattaatcaactgatgcaaacttatcaggaagcaattgcaattggaagaacatttgctgccctcaaggattaccagatagatgggaataaagaaatggtggctctaggaaccatgaacattgttggttcattgacttcttgctacatagccacaggtaacaatcaattcagaaataaaaaaaatcatagccacaggtaacacttaattctgacagaagtcgttcattgtaggttctttctcacggtcagcagttaattacatggctggctgcaaaacagcagtgtcaaatgttgttatgtcaattgtcgtaatgcttacgttgctgttgatcaccccactgttcaaatacacaccaaatgcaatcctttcctcaatcatcatatcagcagtgcttggtttaattgactacgagtcagcttaccttatctggaaagttgacaaactggactttctagcatgcatgggagcattctttggagtcatattttcatcagtggagtatggcttgctcattgcggtgtgaatcacttctatttcgtttatgctaccaacaattgagttcttatattatagacaaagagctgatgactgtaaaaccttttgtgaataggttgtgatatctcttgctaaaattcttctccaagtaacacggccaagaacagttttacttggaaaccttccaaggacaactatatacaggaatgtagaacaatatcctgatgctactaaggttccagggatgctaattgttagagtggactcagctatatacttcacaaactccaactatgttaaagagaggtaaaatgtttgtattcaacatgagcttctgtcacaggaatgattactactatagggtttcagagtggcatatttggctttctttttgttattaccatggatacagccttttttgacaaaaaaagaggtgaactactatactttagtagttcaagcagaatgtacaagcattaaaaagaaagcataagatgctagtagtgcttagaagaatttttcacataaaccttttatatatctatatactgcacattagaatttggcctgcagggcagatgtagctaaatgttttatagatcttgaaattttgatatataatttgatggatgtgattagtagcattctttttatatctattcgaattgactcatccataatttggagggtaacctcaatgcaaagtcttttatctgatcagaaaaagaaagttaacaagaaagttaacagttccttgaaagtgcaaggctacaccagatgctcttctaagattggctacatgtgcaaatacgatatgtgattagtattctagtggcatgagattgcattagatgcattattgagtcatgttcagtattctagtagagaatgttacaatttaaaatcagctaaagaggaaagcagtgcttaattagaatctaattttcagaatcctgaggtggctaagagatgaggaggaggagcaacaggaccagaagttaccaaaaactgagtttctaattgttgatctgtctcgtaagtcacaagaacatatctgactctatgctatctttttacttaagttccatatagtgattgaaaacattgttctaactctcaacagctgtaattgatatcgacacaagcggaatccacgctttggaggagttgttgaaagctcttgaaaaacgcaaaattcaggtaagacgccacatctcataacaagcatttacaactacttgcagtctggtagtgatacactgctaacacaaaaattcactgaagaaccccccctcccctcttactttcaaaaaaaaaaactgaagaacccctcactaaggtaaaaatccgttccttttacttacagctggttcttgccaatcccgggccagccgtgatccagaagctccgctcagctaaattcatggacatgattggtgaagacaagatattcctctcggttggcgacgctgtgaagaaatttgctcccaaggtggtggataatgtctgaaggagtttcgtagtcatgtacagtacatgagcaaggagaagtctatctattcttcagcgaagtccagtggacactgacagtgtggatttatagagcagaagcagaacagaacgggagtaaataacatggtttgcagaatggtaaataaagaagatgttccggagttggagttcatcacgtttttcgagatgtggttggatagaaagcagatggtggcctagttgtagttgggcgtctatgacagtccttgtggttgtggagtctgttccgcgttggcaagcacttaggtgatggcgatcgaaggtttgatggatcagaagatatggatgcatattatcactgatcgtgaaagaagagttactccctcgcccccaaaaagactgttttagctacgaacctagacaaatgtttgtccatgttcatagttaaaaagatggagagagtaccacctatttgggattccaggctttgtgtctgtatcttacagtacttagcccctt

SEQ ID NO: 3608 - DNA, 12235 bp, Sorghum bicolor
tgttttcctttttcatattttccaagttggagcgcttgatattatcttttggttgcctccagcaccataaccaccatctagctccatcatttggtttgtacgaatctatctttgtatttcacccatgacaaatgttagtacacttaagtttcatcagttatccaaaaccaaattagggctttcaacaccaaagactatccatggtcgttgtatgcatcaaatgatagaagagcaagggctttcatggtgatagaaacaagaacctacaataactttcagtaatagcacgacaactttcaataacattatgagagcgagtagcatttgtcccccgcatcgaagtgtccctgtcaaattagggttgccatggcgactgaaacatattaattaaaaggggagattaggagaagagctaacgattggaggtgggatttatgggatgagagatccaactacctggaatggttggatgacgacacctacagttttggctgcgaccaccaacctactagggctcaacgtagttgcaacccaatgtcaaagaacatgggtgaccgaaataagagagaaagagtgttggcagaaggggcctagtgttcctttggtcatgaggagacacaaggcacgaactatccaataaatataaataaacaaattaacaactccacctacaaattctttataacaccccatcttgctcaccactcacgagagagcttgagcaacccaagagaagaactatctatgttatgtaatctatatttgactatcttaggaaaaaagagagagtccaacagttattgtatctggctttctaaaatagcaagtcatgtatcccgaaattctcgcatgctagatatagcttgcatgtgccgctagccattcacttcactgtattggaaaggttgttggagttttatattttttgatcgagtttctattttaaaggttacctaaatcataagtttagtcatctatttttaccaactttgttagagttgctctaactatatattaatactacaaatcaatcatgactggagctagaaccctccataaacatgggaaataaaaaagtaccatcgcatacgttgttttttgaagaatacgtcatgaatacttaggccccgtttggttccccttactaaattttagctagctaaaattattttagctactcttgagtgactaatggaactaaactattttagctcattttagtcaatgtgtttggaactttaggtactaaagggactaaagtttagctagctaaaatttagcaagaagaaccaaacaggaccttataataatttctgattatagaacaaaggaccagctaagactagttgctaaaaataaactcaaattagttaagttggcaaactagttagctaacaactatttataggcttagctaacaaattacccatttatagccccatttggatgggctagaactaaatttaggttaagaactagctgtctaacaattattcctatgtatccaaacaagactgaagtaggcttttagaaatattggcgaagaggggacgtccggtatgatgtacttactgtacacaaatacataagaatcattgttcatttggctacataattgtaataaaaaaatattttttgttaatttattgtaagagaaaaacatcgttaaataacggataaacgtgactgataatgtcaagcaaacagatatcagaatctattgctccgaatgagtgaacacgaacattgtttacttgcaccatgtgagagacagctaatgggtttttatttttttaatgactgtcacctagacgtcaaaattttccagactataaaaccaaacaatccttgaagtggccaaaaagcatttgtcgatcgacaacgacgtcgtcaaaagccaggcgcactgccgcagcacaggccaaagcagcaggcagcaggctctgtgtactagggttaaagaagggtttttggcgtctagcagtccctttctgctgcgtcccgcattgcgttcctcgccctcttcccctctctcgggtctcggctctagccgtcgccgcgagcgagatgcagggcctcgcggtagcaagcccgcttcctcccgccgcggccgcagctcggcggcggccgcgcgcgtcctcctctaccaggtaaggaccagccatcttcccacatttgccgccgcctctgaggttatttcggtaagagtggtaggagtggggggctcccgctcgagagctcgtgatcgcattatactagtgagagagtcgtggctgcggttggtttcgacttccgtgggggtggggatgggttttggatgcctaatttggggcttccgatgttgggaatttgatggatatggtttccttttgttggtgctgctgaactcgatcacgagatcctgatttgttgggattagtaaactagctcttgggagcggcgttaagttgcaatttctgtgtaccttgtatagttgtatctaaccgcccgtgctatattggttctcttatgcacttcatcggtgtatcagaaattcgatgccattcggtgtatacgagttgggcttggttggcccctcaaattttctggagctactaaatggaaaatccatcgatagatttgatctgcatgagatttaaatgtaaagttatgaaccatgagcttcgaatttagaattgtctgcttttactgttccccttccacaaaaatggggagcatggatgcacaaacttgcgtcatatactggtttcaggttatacgtagttggatttgacagtctgcactcttctgttactcttttttccttgctagatttacaggagttcgccccatctaatatcacaaatatgcatcatatctgagtataacctgccatcctttcaatcattttatgcattatgttaatgttatgctgatttacagggaagcagtttcacaatgctggaagtacgaattaagtcgagatcaatatctaggaggcttcctaaggtagtgttttgtgcttgtccactaataaattattcattgtggtctactggatcatgtcattctttaccactactttgcattgccttgcaaaaaaaaaaaaaaaacgcccccttaatattcctcttttctctcttgctctattgttcaggataagtcagtctcaaggaagcttgcacagacatcgctcaacaaatttgctcagaccagctgctggtagttctaccttccatcatccaatgtttgaatatcttactcttagcagcatcccatgctaaccctgcttcgccctgaaaatactagcctttcctcatcctgaacttattactatcaaagatttgtcactttcgtttacatattcgccttttgtttgcagcagctatttcagttgaacaagatgaactcaatacttatcttccaaaaggtgatatgtggtctgtgcacaagttcggtggaacctgtatgggaacaccccaaagaatccagagtgtcgctgatatagttctcggtgattcttctgagaggaagctgataattgtttcagcaatgtccaaagtaaccgacatgatgtacaaccttgtacagaaggctcagtcaagggatgattcatatacaatagcattggaagaagtttttgagaagcatatggctgcagcaaaggatctccttgatggagaagatcttgcaagtttcttgtctcagctgcactcagacgtcagcaacttgcgagccatgctccgtgctatctatataggtttgagctgctaatttctccacatctcatgttcttctattcttgagtaactaatcttgtttctcaggtctggaagtatattctcagcttgttgaattcttacttgtttgttatttttgctatcatggattttggaaaacttgacttcatgatttctgcagtctgctagatgctgagttgatcatgctttgacttgcacatcaaaacatagcatcatcttctttgtctctcatggaggttttatatgtgttttggggttctgtattttctgtagcagtcacttgtatccatgtatccactagtgctgtttgtcttcactattactatccttgatacataacgttaggcaggagcaccaaatgtacccaaagttagtggtaacttgaaatatgtaatgtctgtgatttataataccttcttaatataatgatacgcagttctcctgcgtgttcgagaaaaaaaagtgatgtataatacctgtatttaatatttattatttatatgtttgcagctgggcatgcgacagaatctttctctgactttgttgttgggcatggagaattgtggtcttcgcagatgctttcatatgcaataaagaaggtacacgtgggaaaagctagacaactttatagttatctgcaatttgaacaacttactaaggctgcagcgagcttatccactccaatatcatagaattggcatgtcacaggatatagttggataggaatttaatccaagtgccatatagttgtggatgttgatgcattttgttataaacttggtcaaagtttgagaagtttgactttggacaaaactaaaataccttacgttttggaattgaaggagtatttatagtaaatgctacccattagacatgtgtgtctctttcagaaacatttacaactacgagttgtacttccattcctttgttacagttacaggatactggttttttttttggaaggttaggataccggtatttcgatccggtgtttacctttctttacaaactgacctacactgcagtatttaaaccatgcagtctggggcaccctgcagttggatggatacaagagaagttcttgttgtaaaacccagtggttctaatcaagtagaccctgattgtttggaatctgagaagcgacttcagaaatggttttctcggcaaccagctgacataatagttgctacagggtttattgcaagtacagctgaaaacattcctacaactctaaaaagggatggaagtgatttctcagcagccataattggttctcttgtcagggcacgccaggtcactatttggactgatgttgacggggtatttagcgctgatccaagaaaaggtttgtcctaagggagttttttgctttttgactgtttctgatccattttaaactgctgatgttggcattggcatacgcataattgatttaggggatgcatatagtgcaaaatcatgtttgggtgctaacccttgcatcacctgttggatgagattttgagagatcagatcaaagaggagataattgttactagttgaaagtgtcacatggattagggtgcctactcacacccctttaattcttgtctatccatatgtcaaacagttcatgtgaagggccagaagcacaataatactgtttttttttgccataatacggttgacattgcttaagtaaaatcctgtcatagtgtgatttatgtacataactagaaacttggaacagtaattatttgttaatactgtcactcacggtattgagtgtattctctcaagtacttatcaaagaactggatgtgctgataaaagcctccaagtactttgatctctccattttgatgtaggtgcaaatatatcttccaatgaaatatttaaacttcaattatccagaaaatcattatgaccacattatggatattggaaagcaaacatggtggctttgtctagttctttattgaaacagggcaatgcccttctcttgtatcaatgagttaattatatatctgattaataagcatctgattaatgcagttagtgaggctgtgatcttaagaactttgtcttaccaggaggcctgggaaatggtattttctctattcttgggactgttgttcatatgcaagtcattcgtcatttaactacatttgagcaatggagcacaacatattttatgcaattatgctctatgatcattctttctttgcattccaagctattatatccctaccacattaagtctcattgatttacttattgtatgcagtcatattttggggcaaatgttttgcatccgcgcaccattatacctgtgatgaaagacaacattcccattgttattaagaacatgttcaatctctgtgcccctggaaccatgatttgcaagcagcctgccaatgaaaatggtgatttagacgcatgtgtgaaatcatttgctactatcgataatttagctcttgttaatgttgaagggtaagctatcataatttattattttaaacctccaagttctgtacaactgattatttatgcttttagcaattaacctcgacctcgtgaaactgaacttccatgatcttctgtatgtagctttcaatagaaattggttgccatgtccactagagagacatctatgttagatgctgcttttggctgatgtagcaatgttaactaactacacacaagatggcttaactattgactgtgtgagtgtgactcataaaaggtatttcttgtattacctaatattctacatttcttcactgcagaactggaatggctggtgttccaggtacagcaagtgctatatttagtgctgttaaagatgttggagctaatgttatcatgatatctcaggtagataatgtccattcatctttgctatgtacatatgattcatcttggttcttcctcactgcaaatatcatgcaggctagcagtgaacattcagtatgctttgctgttccagaaaaggaagttgctgcggtttctgctgcattacatgttaggtttcgtgaggcattagcagcagggaggttatctaaggtaattatcatcttgtacagcaattattttaaatactcgaatcagcaaacatgacttaatgaccctgtttgacaaagcctgttattgtgcataatctgcaacaatgttttcaggtcggctggtcgaacctggtcgacctgggactgatcagatgattaatcgtgattaattgtcgaccaggtcgattaatcgacactggtcgaccctggtcgtccatctggtcgtccatgtatatcaggacatatacctatatatatacctctctatatatactatattatacacaataaaggaagcatctagactgcattagtgtttagctggtgacttatttgtggaagttgttttcctctcttttctgcactgtccagaggtccatattcaagtctcaaactccatttctttgctgacttgctgctggaagcctggaatgccataattagcaagcaccaacactaatgcagtcttgatcttgacacaccttaacagcagcactgctgcaataacaaataactaattgcagaccatagcagccacacagccagcatattacataaccaaagtccatgacctggttaaacagggcccaaaaacagagtaaccaaactggttgtccatgtcctggtcggacgactaatcgcgattagtcatcaactaatcagacgaccagctttctggtcgagctggtcgagtcggacctcctgattgaacacttgggaccgaccaggacgattaatcgtgattaatcgcgattaatcggatgacctgaaaacattgatctgcaactggaaaagctggtcaaacgcagattctgcttattaataataagcagttgcaggatccttgtgttcagcacagcttctgcttaatttgtggagaaactgaggaataagctgtgccaaacaaggcctttgacattatttgagcgaatcatgttagttttcacttttcagaatggaataatgttatttccagtctaaatgtgtgaagcttgctcatctggcgaaacatgacttggatcgacacacctgtcaaagcagtagcaagtgaacaataagatgctaactcaatattacggtcacaaaaaagaatacattgaagataaatttcattccattcttcgtcgaaaccatgactttagattaaagattacctccaaaaactcagcaacaaaatgaaagatttttctcgaaaacacaagaaagctgcacttcattatattaagaagaaaatatgggacaagaacccaaacacccacatacacgctctacacacgctaagctaaagttttaggttacattcttgcctgctaaatataaaaagacaaccacaaaaccaaacaaataggccattctaaggcaaaggtgccggggtagttaaggaagagaggctttgtgtgcctgctatctcccaaagatgtcattcctcgctgaacaaaatgaaagataatagagcacctctcagatgtactttgttcctgcattttcctatccctgtttgcagtttacaggtttgtgatattattagcaagggaagtagctcaatgagttgtgaatttgtgatgtgaatgtatagcaaagtctttgttatatgcattgtatcacttctattttttaatgcaaacaattcatttcaggttgaagttattaaaggttgcagcattctggctgctgttggactgaggatggctagcactcctggagtcagtgcaatactttttgatgcattagccaaggtatttttattcttggtttggtgaaatgggagttctattgatgctaggacttattaacctattataacggattcaggcaaacattaatgttcgagcaatagctcaaggttgcagtgaatacaatattactgttgtattgaagcaagaagattgtgtaagggctctgagagctgctcactcaaggttcttcctctccaaaaccacacttgctgttgggatcataggacctggtttaattggtggaacactccttaaccagctgaaggatcaggtatcttcagccttgtaatttcataaattgcatccagtcatttctttgaaagactttcagagttcatttaaaccagaaatttcccagttgtattgatttagacctttctgcaggctgctgttcttaaggaaaatatgaacattgatctacgtgtcattggaataactggttcaagtacaatgcttttgagcgacacgtatgtaattgaatccttgtttcctcttctgtgattgtgctcacttactgcaaataattttgtattattaggcgcatggtaggaaggaaggaatcagcttataattttgttaaaaattaagaaattttgcatgccattcaaagagcagtggatatttatttatttgtttttactgattttttccctgaccgctttacatttgttcttttggggtctgctattataattatgtattcattaatatttcacaaactttccttttttgtttttctgtaggggaatagacttaacccagtggaaacagcttctacaaaaggaagcagaaccagctaatattgatagttttgttcatcatttatctgataatcatatatttccaaacaaagttttggtggactgcacagcggatacaagtgtggcatcccattattacgattggttaaagaagggtattcatgtcatcacgccgaataagaaagcaaattctgggccacttgatcgggtaattatttggttggtgaaaaatttgtatattttctgtgtgaaataattgtttttaatgatcactgactgtattttaattgactgtcagtttgtgcccattaactgcatcaatgactgatcaactgatcatggctaatccagaattcataaacttcattttttgtgaatcttggaagacatgaaactgatttgtgaatcttaagacaatcactttaactgagatctatttgcttgttacataaagatgtcaaattttaagcacattccatacagaatgcacatttgctgctgcagtgtttattgattaataaatgtttcttttttcttggatacagtacctgaaattacggactctgcagcgtgcctcatacactcattacttttatgaagcaactgttggtgctggcctcccaatcattagcaccctgcgaggtcttctggagacgggtgataagatactgcgtattgagggcattttcaggtttgtgtgtatgcttccgaccaggctacaggggaattttattgtgccaatctgcaactttgttaaaccacaaacgaaccatagtaaattctttattcaataaattcagtaccattctattgatggctgatatgaagagttgtctttcagtggaactttgagttatatatttaacaatttcgaaggaacaaggccttttagtgatgttgttgctgaagcaaaagaggcaggatacactgaacctgatccaagagatgatctatctggaactgatgttgcccgaaaggtagaccctgttttctgtcaaacggttattgaatatcatacttattctttcttactccagccactgtatttcaatttatcagcacagtagatgggtttttatttattttccttttttctttgagcgggacaatttctgatttctgtatatgcatcaacaagaatccttgcagaacacataaaactaaaacattgaggatatgaccaaagataatggggagagtgcattttggacactgaagagtagggctttgcctataggacactatctatcatgtttgatttcgccataggccaccgcaaatttgtagtttgtctccaggacactacaatactagatgaggaagaaaagatcattatgccctcatcttcacactttttgattgaccaacgtaacaaaattcctagccttgactatgtgtgtctgtgtaaggatttcaaaaaacacaaaaaacaaacttacatttaatgtagtttttttttcttgttcttcattagtgactcatactttttccccctattggagcaggtcattatccttgcaagggaatctggtttgaggctcgaacttcctgatattcctgtgaagagccttgtgccagaaacacttgcagtaagattgttctcctcttagcaactaatgccttgtatttcactctccctaatttgtttttatcacgcagtcatgctcgtcagcagatgaattcatgcaaaagctaccaacctttgatgaggactgggccaggcaacgcagtgatgctgaagctgcagacgaagtgagtagacctctatttcccacaatatgctttcccatgtcgtgactctgatcagatatatttctattgggacatggcaattggattgtaagatgcatgacatctctagcttttgctttgttgggtccattctcggtgcatatttccaacattacttgagcagaggtgattcagcttccctttttcctttccgaaggtcctgcgttacgttggagtggtggacacggtgaacaagaaaggacaggtggagctacgtagatacaagagggatcacccgttcgcgcagctctccggctccgacaacatcatcgccttcaccacctctaggtacaaggagcagccactgatcgtgcggggtccaggcgcgggcgcggaggtgactgcgggtggcgtcttctgcgaccttctgcggctggcgtcttacctcggcgctccttcgtagagcttccagctacagttgtcaatttcaagaggcagacggacacactgttctgcatgatgcctccggattgatcttatggacttgttcatatgttgttgtttctgaataagtgccaggaaataaggcctctatcttatgtagggagagagaggttcggctttgggatagccgactatgtgttgtttttgctcagaatccagaatcctgtgaattgaaatgaattataccaatggaacaaggtctactggaggtgtgatgtgagtatgccgggctcagcagtcagcaggtaacggaacggcaattagaaacaggcattcaaggtggagcaactacagaaaaaaagttctgaaaaggtttcagatgcaaaaaaaaatatatcacaaaattgacgcacaattctttaaaacaaaagagcaagcccaaatctttttttttatttatttttcatcgtaaacgatctttcaggttttttttaagaagctgcaggaatttctacaggtggcaaacgcactgcctctttagttttctttagtttgggatcttatccatgttgtgttgagggtaaagttttagaggcaaatttggcataagttgaaaacctcggtggcaaggactgaactccaaacattgagtctcctgccaccaattctctgcgaataggcgcatcgtcgccggctaacggtgggcacctaggccacctgcaactatattatcgtgaaacacagggactagaccaaaaccaggttcaatgtatgcagaa

SEQ ID NO: 3609 - DNA, 3497 bp, Sorghum bicolor
cctaaagctgagttgatttattatcttctttctgaaatgtgaataggagcaagattccatttcatccccatcaaacactgccaccgtgtggtgcagttggagacgccataaactcctagtatagatcctaatccatgcattgaacatcaacaaatgcctctgctttagcaccaccgtatgatacctttttatgtttttcacgtttgcatgttgcaacacgcagaagtgaaatatatatataaactagaccaagttcctttctgcttacatcaaacaggcaataattgatgtgctcagtccaatcaagcaatgcgacgtcggcacacaaccaaataaccaatgcaagaaccaatcatcgtcgcgaacctgctccgtttgattttgggctcagatcccactactcagatggctgtttatgtggccattcaggcgatgaagtatcaagtaggtgcaaatcgaaagaggcatatttctttctgatatctttctgatacttgttacacaacagcagtcgtagtagcagtagtagtagtctagtactagcagcagcagtgttatgaggtcagaactcataacaaagggggatcaagcgaccagatgcaagtcactatttattaatgcgtcatttggagccgcgatgagacgcttagcgatctcgtcattgatcaagctggataaatatatgtatacgcacatacatatgtgcctttgtaagcatggcggtgtaatctttttgtgttttctcttggcgtattggcccagttgtcttaaaaaaactgaactgacagaggatgtctgcagggttattgtaagttataattcagtgggacacagtatgttcacagcaatatattgcttcctagttggaataaagatccatgccatttttctgtgatttggactgagatcaagcaagggctctaagttcagtttcagcagtccagcagtctaggcttctaaaagtgttggatgtcccaaccgtggcttaagaacacttccttcagaagaaaataaccatctcgtcattgtttctactctctggattgtgaattgaagctttcttgttgatagctacagtagttgccttgtacgtatggtataaaatatgaaacaactgttcttgctactagattgatttctactagcattttggatggcaattcagagactgaatatgaaagctattggttataaaacatagaaaaagagatccttgatatgtagtccatcctctcgatcagagtatcttatccaaaagatttcagaggattaatttgtacaagaacaggacaggtttccagagacgtaagccattgaccggacggaatctacaagccctaatatagaagtcatgaactgcaaaagtcagcagctgagtcagtaacagtcctgctctgatccctcagccgaagattccgttccgtccctcctactcaattatttttttaacagtttattaaggcaccagcagatgagttttgctttgcccctgtaattactatacacatgcatcaatcatgcatgcagcatgctgccgctgcatcaaagcttgcaaaacacggcgtcgactcggcgagaatcgacgccgtttggctctgtgcccaatcatcgtcgctactgcagcagctcatcttctgtcagaggcagagctcgctgcgaatcggcataaaacaactccatgatttattttaatcctttcaaaagccaactgtttcttcgtctccttcgaaagccaacttgtgatttgtttattttaatcctttatttcagcctagctaatagttatagaagtgagtaactgacacccattggtggttggtctattagtttatgcttcgcatttgcaatgctcagcctataaatacgcctgctccgtgatctgcttcttcttcattcagatcagatatatatatatatcttgttagcttctaatcgagatcgagtagttcagctgattattcaccggcaagaacaagctgatcgacgagtgcaatcatttgatgaagaggtttgcagtgcaggagagcgagatggcgcgcgtgctgatgctcatgtcacactcgcacggccaggaccagtcgctgccgctgccggtgatcgccgccgggcgcggcgacggggcggcgccggagcgggtgttcgtgtgcaagacgtgcaaccgcgtgttcccgtcgttccaggcgctgggcggccaccgcgccagccacaagaagccgcggctggacggggacggcgaccccgcgctcgccaagcccaagctgcacggctgctccatctgcggcctcgagttcgccatcggccaggccctcggcggccacatgaggcgccaccgcgccatgacgggcggcatgcccatgccaccgccggcgacgacgaggatcgtcgtcgacaagaagccggacggcgacgtcgtcggcatcatccaccacgaccacggccacggcggcgtcaagcccggcgggctgtggctcgacctcaaccacccgccctgcgacgacgacggctgcgacgccgaggtggagtgcggccacattaatgccgccgccgccgccggtgggatcacgttccatcagttcctcgacactggcaccatggccgtcgactgccttggctactagataccaccaagctccatgattcttctccctgccacgtactactggtgcaccggccggcctccgttttttttctctggaatcttcttctccatttgcttctgcgtggaggggagaaatccacattttgtagcaatagtagaatgaaggtgcctaatgcatcatgattcatgaatgcatggatgatgatgtgcatgaaggttttggggtgtctttgagctgcttggtggataatttggagggctaatttgccaccaaagctagctgatttaccatgggtttcatgttattatagataaaaaccctttggtcaaatggctttgatcgatataattatttaatctgagtaagatatatttagagagcttgtggctttcttcagttggtaatcctgactctgtatatgtcaagttgccacttttagtatcttagctgacataacacatgagttgaatctgcgatacttgacgtcgaaatcgatcaaaggtctttctgtttaatttgcttttatttgtgaggctagtattttctctgcatattataatgtgattattatcgttaagaaagttgatctgagtagttactccagaaagagactgaactctgtatataaacactgttagggaaaaaaaaagctattatagtatattgctactagatactgtatacctgcctcagcccagagtgacatctatgagtgttcctcttatatcttatctatattcaagatagttctatatatagttaacatattcaagtatagttctacatatagtttttagtcgcgaggtttggcatctttgccttgataggctccacctcctgggtctttttagcgttgctgaggagccggtgcttggctggtggctgcgtgttcgaaaa

SEQ ID NO: 3610 - DNA, 5992 bp, Sorghum bicolor
ttgccaccttcttaaggtgcaaggatctaatcataagaacctttttttccaaatttgagaaccataaaatcaatttctttaattctgtctaaccaaaattcggggttaaaattcccaaaacttgaaaccctaaatgaaaccattggttttgacagaggactagaggagcatgcaaaacaagcgaagatggtcatgtttgcatttctaggtaaatacaatttaggttggtaatagttaatagctaatattagtggggtattgttggatcctgtagctaaaaagcgaatgcattttatctttagttgctatattgatagaaaaaaaggttttggcaacttattagctaggttgatgtagctagtgatatactctctttattataaattataacattttagctttttatagattcatagttagatatagtgtatctctaaatacgtagcaaaaggaatgtatctagaaaagttaaaacatcttatataatttagatttagggagtagttactactcgtagttaagagtctagctaacagttaactagtctattaattagttgatcccctgttttaattcagtataatttgtatagctgactggatacaaacattaattagttgcctagttgcatatgtgctgagctcagtctcacttgagaggatgaccagtataccacattgggggaaaaaaaaaggcgcatcatttttgacccgacctgccgctagcaagtccagtgcaaactaaaatctggtcatattactgaatgccaagctttactaagtcaacaggaccggtcaacactgaaaccagtaattattaacatcataataagaagtcaaaacaaattcgagactaacatgaaaaaagaattacaaagagggaattcttgagagccgtgattgagattggcagatcactgaacagcatgactcaggactgccgctaaggccgttcgcgaaaagaaaagttttttttttcttttaaaaaacacatttacaaatataacaattattgtctaattattaaccaactaggtttaaaagattcacctcgcaaaaaatacatacaaactatacaattaattattttttaatctatatttaatgcttcatgtaggtgtgatgtgtccaaacattcaatgtgatgaaacgaaaaaaaaattacagagagggaattcttgagagccgtgattcatattggcagatcactaaccggcatgactcaggactgctggtaaggttcgcgaaaagaaaagtttttctttaaaaaaacacatttataaatataacaatttgcgtccaattattgactaactaagcttaaaaaattcgtctcgcaaaaatacatacaactatacaattaattaatttgtaatctatatttaatgatttatgtatttgtctaaacattcgaatggacgaaaagtttttaggtgaaaactaaataaggcctaactttggtgatcatccattatttttacaaggctaccactctcctatatagtatgattgtttgtgtgagattgaccaaacttaattcggtcaagcgtcattagccatttgtttaccagcacaaggttttctttttttcccacctcccctcccctcccctcctgcaacggtagtagtggtgctggctgcctgaatggcgtcatgaagcgcaccgcaccaccaccaccggtccaccggccaggcggggcccacgttgtggggcggttggtgagcggagcggggcggggcgggccgaagcacgcgggcctcctcccccagaattggggcccacgagtcagcggcagtaagggcgggcgggtgtttggtgggtacgggtcgctgtcccccacccaacccaccccgtccccgttacggggggcgtcactgcccctccgctcggccgccggatgcgaccaaatggaatcggacggcgacggggccaaaacgctgcggccggtgcccggtgccgacgggggggcctataaatgggccggcgtgcggcccggcacggcgtgcgctgcggccgggtcggatctgagacgagacgagccccccctcctcctcccgaacgaactgcttacccatcccactccgcctccgccggatctcgtcggactcggatccgcccgaccaccccgcgccgccgcagcagcagcaggtgagcatccatcccctctactctccttcgccccggtccgcgaggcgccggcgccggcgccggcgctctgcgtgcgttccggtgcctgcctgcctgcttcctctccctttggccgtagggttttgttctgttttgtttttggtgtagcaaggcgttttaggagcaacccgggctcttgctccgccgccccgcaatggtgggagtaggctccggcacgcgtcttgcgccattccttgccgccgtcgaaggtttggggggtggacttgccatgataggtttcctgctttcgttcgttcgttcgtttgttcgtaccgtgaaatgttttgtttttttttctctctcttaaattactccgatgtagtcaaggaaattagtccgtccgatagtcaaggagggatggtattctccctcctttcacacgcacctgttcggagtggtagtgatggttcttatcgtcttgtcgcgttctgcgagatggaaaaaaaaaggaaggaaggcaaagctccaaacgtggttgacgatctcgttggaacaccgtccgtgtttgttaggaaaaatctgtgctttcgggtcaacaacatgtacatacatgtggtagtctgaattttttttctgccggcgaaacaagtgcagaaactgcttagggtagggtggggtgatttatttaccttaataagagtgtctaaaggttgctcctgaaatgattccgatgctgatttcagctatcctctcctaaaataaatagttggggagaagaattgggcgattagttttgtcgtattaatctataataaagaaaccgcatgcttctcacacagtttttgctaggcaagctgcacggggtagtgttatttcgagtgctggtactctgtacccgtgtgaaggttgctgctaaaatggctgggctgctgagtaacctttacatgcaattgttggcgaaaaatgatcctctaccgataaaccacatgttctaaaaacaatttaaatggccagctgtgtgtaggattcatcaacgtttctttttgctacctgaacagacgatttgggggagtttctttttacaagctaagctgccagtttatgcttttactatgctcatgacgttgctttatactctgttccaatttataagttgttttggcgtttctagtatattgcttttgctatgaacctagacaattgttatgtctagattcatagcaaaagctatgtacctaggaaagccaaaacacattataatttggaacggagagagtagaaactacttttccatcctgcaacatgtattggaagaatataatttgagtggttgttttcttccaagaatcttgttacgcaatttgttattcttgtgctgattcgggtcgaggcttggtagattcctcttgccttatccactaaagcacaaatgcagagcatagttctgtacgagtggatcagaaacgccatacttttctcagtgggacttagttgactcagcgtgaagaatctctcaacatgaaattgtggtcttgttatgtgccaacaaatatgccctttttgtgcttgtttagtagcctagcactttttattgttgtcttttgttgcatgagacaataggaaaaaaattctgagaaggcatttttgcccaaaggagtacagtgtttgcttgcgccctgggagtccagtttgttgatcaataaatcgcttagttattgctatctaaacatttccataaattgcttctttgttgcctatatcaatgttggtcatgcaattcatttggttatgaggattctcactttgccttagccattttgtttacatattttctgtaactaatcatttttattgtctgctgcagatcagagaagatggccgcagtcgacaccttcctcttcacctcggagtctgtgaatgagggacacccagacaagctctgcgaccaggtctcagatgctgttcttgacgcttgccttgctgaggaccctgacagcaaggttgcttgcgagacctgcaccaagaccaacatggtcatggtctttggtgagatcaccaccaaggccaatgtcgactacgagaagattgtcagggagacctgccgcaacattggtttcgtgtcagctgatgtcgggcttgacgctgaccactgcaaggtgcttgtgaacattgagcagcagtctcctgatattgctcagggtgtgcacggccacttcaccaagcgccccgaggagattggagctggtgaccagggacacatgtttgggtatgccactgatgagacccctgagctgatgcccctcagccatgtccttgccaccaagcttggtgcaaaactcaccgaggtccgcaagaatggaacctgcgcctggctcaggcctgatgggaagacccaggtgacagttgagtaccgcaatgagggtggtgccatggtccccatccgtgtccacactgtcctcatctctacccagcacgacgagacagtcaccaatgatgagattgctgctgacctgaaggagcatgtcatcaagcctgtcatccctgagcagtaccttgatgagaagaccatcttccaccttaacccatctggtcgctttgtcattggtggacctcacggtgatgctggtcttactggccggaagatcatcattgacacctatggtggctggggagcccacggtggtggcgctttctccggcaaggacccaaccaaggtcgaccgcagtggagcctacatcgcaaggcaggctgccaagagcattgttgccaacggccttgctcgccgcgccatcgtccaggtctcctacgccatcggtgtgcctgagcctctctccgtctttgttgacacgtatggcaccggcacgattcctgacaaggagatcctcaagattgtgaaggagaactttgacttcaggcctggcatgatcatcatcaacctcgacctcaagaaaggtggcaacgggcgctacctcaagacggcggcctacggccactttggaagggacgaccctgacttcacctgggaggtggtgaagcccctcaaggcggagaagccttctgcctaaggcaccctcactttttcagaagaagcttttggtctgctgcgctttatcatgttttatctggcttctatatgttgtgattcttgatctgccccttgcttatcatttgtacttgtactgtcctaataagtggtacttgtgagggtcttattgtgtctgcttatttacctagaggattatttctggttttactggttatgtaatgcttaaaacaatgaaagaagctacaggctacagccactttgagaagtaatgggacctcgtgcattttggttacatattccaatgctgtgcggtgtgattatattgtcttgggcattgccgtctacgaatgttcattggacagtgtctgtgtatgtgactggtgaagctgcaatggctaatgtttggtgaagctgcagtggctgagtgtactccagtctgtatttgtggcagctgcaacctacctggtaactgaacatcgctttcttgtgtctggtggcctgtagagtgatgctgcacacctgtttgttgacattaggtggtagttggtgagcaaccagaaggggtttagtggcattaataggtcaggatatatatttcctaggtctaatgaggtcagatgtcaaatttcgcagcaacccagagtgcagcccattggcaagtcagctgtgcatgtcagtgacaacttaattgaaactctgaatctcctcttctggtagaccatcgcctatcagtaagtgatgtttcgtctgtctgtctgtcaccctctcaacctctgctgatcttgtcaaaaaaaaaaaaaaaaaacctctgctgatgta

SEQ ID NO: 3611 - DNA, 6032 bp, Sorghum bicolor
aaagggacattatcttctggtgatgatcttctcttcagcctctcaagggttgggtcatctgaacagacggcaaaattgttgccttgttgcttgatgcaccaaagatcacataggacttcaagtgatagaaatacagacagagcatactgatgtcgcagcctacaattcttaaaatttaaagatgctgatgctgattatgtggtctgcaaatgggttatccatttcctctaatgaaatacaggcaaactcccgggcgcgaaaaaaagcaaatgggttatccagaacagcaaaaaagaaaagcggcttggtcgaagatttttgaaaaaaaattcgaaatcatttaggatgctggcacaatatgttgcttcagaatataaaataggcctttcaaaagatacaggaatatacaccaagaccctttttctttaaaaaaacccctagatctgaagatccgaaaactataccaccaattcgcagcatccgataattggaggcatgtcaaaggctgattgaaatgtgagcaaacactaatttgtcaaaatgtgtcacacatcatatgacgttaggagggaataaataatgtagaagcaaagtcaaccaatgcggtgaatggaagacgtttaagatgctacaacgtgcaaacaataccgtcattggctttgatttcttgtttttaatgtttcaacatggcagttagcagatactaccatcatattgaatcagcgagtccgtttggctgaataagttggacagactgttggggaacaaaagaacatcggtggaggcgaacccacaataacgctttggtcctgggctgaagaatctctaagcaggagctctactagtttacactaaaactagctttcattgtgtcaccaaacgacaaaccagcattgtatactcgtttttggattgaggatttgaagcgaagacctctctaacttgtcggcacgaatcatcattggagtttcaggaatgcggcggaacggtgaaaatacagcgcacacattgttcttggatgcaacggttcttgtcctttttagcaaagcaagcttatcgacaatgcaaatgccaagtaacgagagctgtgatgatccattgagtaactagataatcaatcgacaatagaccgtcgttctttttagcttttgccttgcctatgatgcaatactaagtactactctttttcttaaaaaaaaaaaaaattatacgcgtcctcaattgctacagccagacaaaacagtgacaaagacccgttttctctagtccatccttttggccaaggaaacagcagtaaaagcatggttccttttccgggtgcgcttttcgtttgagtggtttataagaaccgataagttaataatgaaaagcaactccacgttcattggagcagttcagacgaagcaggaagtaaggcatccttcaccattggcgtccattcaggtttaggataagacgaaaagtggccatacgtgcctgctgttttagcttcttatatattccagcacagaacaagttcttggctggctggccattggcaaacttcgccttgattttgtattctttcagttgcaggaggacattccttctgcaaagacgctaccccgtccacaggccacacaggtagaggcaggcgcagctctcaatgagcgaattccaaatttctgaaaatcactgaagccgtttcgatcaaactaaattgtcacgtgggtctggtcagatgtgctatttgtgatccctgataggaaataaaaaactgaaactatctcccaagttgagacgatgccttgcacaactgcactgcacaagacataaatgatggacactatcttcttaaactgccggtatatatagattatattaagggaactggaaaagaaatcacattttatctctaaatgaaaatgatacacgccctgccctgcttccgtgtccatctgtcttccccatcgcagccagcttcgctgtataaataacccttgcgcctcccggcttctgaccatccattgtgatacttcagacagacacttcttcttgcctactaagctctcttgtgttcttgccttctgcctgtgctgtgactgatggccagcctcaccgatctcgttaacctcgacctgagtgattgcaccgacaagatcattgccgagtacatctggttggtggcatccttctgctcttgctctgattttcatttcagaatcgcctttgcattcagaacacaatccttgcaagtttcatctgatcgtcggtcgtcacctgaaatttgcagcatctgcacctttttgtttttcttctgtgtactcgtagttaccagcgcagtatgttctgaattctactatgccagctcgaaagtcttttgtgcaagtttggcccctttctgatgtcgcctcttctgtgcaggattggaggatccggcatagacctcaggagcaaagcaagggtgtgtagtcttgttcacgtcgtttctttctaaaccatgtcgtttcctagcatgaaatactttatttctgaccatgctgttgttggagcagacggtgaaaggccccatcaccgatccgagccagctgccaaaatggaactacgacggctccagcaccgggcaggctcccggagaggacagcgaagtcatcctctagtatgatcctcatctccttgcttcgttcatctttttaacttgcatggcaccttgttcattgtagcttatgtggttgcgcctttttttttcactctgaagccctcaagccattttcaaggacccgttcaggaagggcgacaacatccttgtaagcctttgcgtaccttctcgttttacatttctcttacaattcataaaagcggtcaaaaagttttttttttaaaaaaaaataaagaagatgaggaaggaaaagagggaccaaaaggccaaccttgctctgggatcatatgatttttttttctatgtttgtttttctactacttactctgggatttctttaaaaaaagaaggataataaaaagactgtttgagtaaaggtagtagtaaattatttgaaccatgtgagtagaagtttttttttttggcaagcaagctatgttggtgggtttgttatgcttcttattcagactactctatctgtataggtgatgtgtgactgctacacgccacaaggcgagccaatccctactaacaagaggtacaatgctgccaaggttttcagccaccccgacgttgcagctgaggtgccatggtatgaatattggctcaatttcagacagtgttttttcagcctagaaaatatcagcattttgttgtactggtacacaggaaaatgttacagtactaaccaaaatagacaaaagatgttattacagccaatgaagtaaatggtttgttattgtagcacagcagtttagaaaaaaaaaaggttgatataaatacaacataattgaacttagaaagtatgtgaacaaaatgttcaacataaaagttttgaaggaccaccatatttggaaaattccatctttttatctactagtacctttgtatcttatccggttcctcatcaggacctctgtctgaattcaaacaggtacggtattgagcaggagtacactctccttcagaaggatgtgaactggccccttggctggcctgttggtggataccctggtccccaggcaagaaaacttctatgacccttcaacttttatctattgcatgcaagttaacaaaaaaaaagtgttgtaagctttgggggaaaaaacattacctttttttttacaaaaaaaagaacactttgaaccagttgacacagcgaaactttactagtatacaaaagaggcaatcttgagcttttgacgagatgagaaatccttttaaaagtacataatgtcatgtataacaaattgttcatgtttggagtcctattttagcaaaagtgatgttaggaatcctataatagcgaagccatatgtttggagtcctataatagcaattatctcatacaaaagaggagggcagaagcatgccttgcaagtatctcaactgttgggtgcattttcttccttttttccagggaccatactactgcgctgccggtgccgataaggcctttgggcgcgatgtggtcgacgcccactacaaagcctgcctctacgccggcatcaacatcagcggcatcaacggcgaagtcatgcctggccaggtagtactacaaccccgcaagttacacatgcacagtaatcgacgcgtgctaaaactgctgaattctgaactggattccgtgtcaaacagtgggagttccaagttggcccgtccgttgggatatctgccggtgacgaaatatgggttgcccgctacattctcgaggtcccttttttcgcagtatcttccgatagtgcagtgtcaaactagactactagagtgctgcagctaacagtgatttttttgctgactgagtggtttcagaggatcactgagattgccggaattgttctctccttggacccgaagccaatccaggtagatgaagtttcttctaattctgacatgatcatcacatgagcatgcatagcgattactgaatgaatggcattggtgctgcttgttgttcgtgtgcacgcagggtgactggaacggcgccggtgcccacaccaactacagcaccaagtcgatgagggaggccggtggctacgaggtgatcaagaaggcgatcgagaagctggggaagaggcacacggagcacatcgccgcgtacggcgagggcaacgagcgccgcctcacgggccgacacgagaccgccgacatcaacaccttcaaatgggtgggtatacatacatatatggtttctgatgcgaataaggccttgtttggatgttgtcggattcacttcaatccatgtatgttggtgcggatgttgtcggattcacttcaatgtatgtgttgtggtgtggattgaagtggaatttagttcaaatttcaatccaatccacctcaatacatgtggattgatgtgaatccgactaaacaaggcctaagatgcgatgtgaatggtttctgatgctggtgtctctgcatcagggcgtggcgaaccgcggcgcgtccatccgcgtgggccgcgacacggagagggagggcaagggatacttcgaggaccgcaggccggcatccaacatggacccctacgtcgtcaccggcatgatcgccgagaccaccatcctgtggaacggaaactgataaagccacggttgttcctcttctgcacaacgctactacgcctgcaatgcacgcatccgctctgatgtcatgtcagtttggttttgcgatttcggttccccgtcgtggggtgtcctaaaattttttacttcggtctccggtgtactgcttggaaagtctgaataatggctgcaaatggattttgctttcgtcataggggtacctagctacctttagctgttctttcctgtttattggatatgtataatgtaatgtaatactattactacgtgattttatatgaaaagaatcattgtcgttttgttcgcgatcacaagtacggtggttccattccaattccatgctgtccaccctttccattgtcagacgcagcaccactgtcacactgtgggattgaagtagaagcacgacacttatcctggggccaacaaattaaatctgatatcccgtctctgtcttgtgagttgtgaccaccgagtcacccaaggaatatgatatgatgccgacgccgtgtggctctttaatcttcagccccttcttcttaccaattgtcgatgagacgcacacctgctgccaatgtggcgccttttacctttactacatgaaagtggttgaaaggaaacggagggtcttccggttccgcatctgggactagcaaatccaggtcttatcccgggcgacgctggcgaagaaatagcagatcgtgcagcaatatattgtgcagcaccgagcagcaaccagacagcagctattttccttggaagcaaccagacagtatacccattcagcagctttgtctcggtctcctggtatt

SEQ ID NO: 3612 - DNA, 5661 bp, Sorghum bicolor
actagatgtggaatcagtcccttaaactggccatcctccttagctctagcaatgaatatggctaacatatccaccactaaattgaaaagcatggtgacaggggatcaccttgtctgagacctttcttcgtttgaaaataatgtcccacaccattatttacctttactacaacactaccccaaatagaaattgatgtatccattggcaccaccaagttgagaatcctttcatcctaagggtttgttgaagaaaaggccatttaaccatgccttcttaaagtccactttaagagtaactctatttagcttcttcctatgtagctcatggatggattcatggaggatcgatacaccttctaagatatatcgtcctggcaaaaggcagtctgtgttggtcaaatgaccttctatgccactctgttaactctattagttgtgacttgtgaccttagtaaaaatcttaaagctcacatttaaaagacatatcagtcttgttggttcctaatagcttctccacattttggtaaaagtgtaataataccaaagttgaggctacgaagaggtcattctcctttgtggaagtcataaaatatagccatcaaatcagcttttatgacttgccaaaacatttgataaaattcagcaggaaaatcatttagttatgttccatttagaaaatagtctttttaatctcttgttcactaaacatggtcgcgaggatatcattttttcgtctgtcacgtgtggaatgtcatccactatattttccatcatgaaaaattagagcaactccaacccacctcctaaacaagtccctattctaaatctagggacttgattcaaaaaaatcaactccaacccaccttctatttaggctcctattttccataccctcctaaattatacttccctctgtccctgaaagcttcaattcctagaatccgtgccagtcaaacttgtttaactttgaccaactttatagaaaagagcatcaatatgtataacataaaatgagtatcttatgaaaatatattcaatgataaatctaatgtattaatttggtactataaatcttagtgttttttctataaatttggtcaaagtttcaaaattttgacttaggacaactctagaaattgcagctttcagggacggagagagtagtttcaacccctcacatctagaaccccctatcctactagtttaggaggtgggttggagttgggttttaatttgagctcctacttttttatcatagcatgtaaataaaaatttaagggcttaatttagggacttgggttggagttgctctacgtctatctgttcgctgatctgaaaagttaaaattaaaattatagttgattgatttattatgagagaaaaatactacttgctagcagaaaaaatacggctgaaaagagaactgaacagttgttatgctcctctcgtggtgataactaagttttcaagattctccgtcacatcgaatcttgcggcacatgcatgaagcattaaatatagacgaaaacaaaaactaattatacagtttgtttgtaaatcgcgagacgaatcttttgatcttatttgatcttagttagttcataattgaataatatttgtcaaataaaaacgaaagtgctacagtagcgaaatccgaaattttttcggaactaaggccttgtttagtttccaaaaattttcaagattccccgtcacatcgaatcttgcggcacatgcatgaagcattaaatatagacgaaaacaaaaactaattacgtagtttatctgtaaatcgcgagacgaatcttttgagcctagttagtctatgattggataatatttgccacaaacaaacgaaagtgctacagtagcaaaatccaaaatttttctcaaactaaacaaggcctaaacaaggcccaaacacaagaaagaactcacggctgtcaggcagaatccgatgattggtcgtctctctctctaaagaatcggctgacatccgcgatggcgtcagtgagaattcgcggtgccgccgccgcggcgccacccgcgtccgtagagcccgagcggagagccggaggcacactaccactccaacttgcccacctcgacggacggttctaccaccagtccaccaccctcaccctgtggttcattgaacctggcccttcaacactcgccaaggccagccaaccaactagccaaagccgccagggggcgtctgtgctctgcgcagcagccctttcgtcccgccctccctccacctccaccccttcgcggacagaaaaaagaagtgtcagtgtcagctgcccccgtataaagcgcgcaccaccagcggcggcctgcccgcccgcccgcccgcatcgccatggctctcgccgtccgcacgccccgcttccagcctcgacggacctccatttctgcgcccgcaccacccgcctcgacatccctcgccgccgcgaacgcgagggcccgtgcctgcgcacgcgccgccgtccgagcctcgcccttcaccgagggcacctcctcctcgcgctaccgccgagacgcctggtcctacgccgccgccgatggctcctccagctccgcatccccgtcctcttccgatgctgccgctgccgccgccgctgcggcggcggcggcggcccgccgggagacgagatcgcgctgcagctgccggagctgcggaggctcctggacgcgctgagggcgtccagggggaaaggcgccgagggggcagacggcggcggcgggcccgggagggtggcgctggtggggacagggcccggggaccccgagctgctcacgctcaaggcggtccgggccatcgaagcggcggacctggtgctctacgacaggctggtgtctaacgacgtgttggacttggtcggggagggcgccaggctgctctacgtcggcaagacggcgggataccacagccgcacccaggtgggaacactcttccttggtttcgatttggatcaatttgaggtttacacgcgactggaaatgctaattgggaacacagaattgaggcgacctcagcttaggactttgtacctttccttccccttgtttgtaatttgtgtgttcgatggctgattgatgcaatgtaggaggagattcacgagctgctgctgagctttgccgaggctggtgccaatgttgtccgcttgaaaggtggcgatcctctggtaatttactcttgcttgcaaatctacttagcacctgatgattattctggcacttccatttgttaaccaagctcaaacaacaaaattggtttcacaacttttgctagtggtggtgtcatcaaacattgaggactaactttttcaaatgatgatccattcttggtgtggcttaagtcattttcaagtgatggattcatagaactgattgtctgatactgattagtactgttatgaccaatatgtcatggctgtcacatctgactcatcagagtagcaggtcataaaagaataaaagtaaaccctcaggctactgttttcctttggaaggagacaatattgctaggatcgaaaaagatcaatcatttgtaagctgttgtgtttgcacagctgtgtagatgatcaatcatgtccttatttaatcttttcagttatcattgcagaaatacttctcaattctaagtgtggtagccttgcattaaccgagacaaacaatgccacttaattatgccctgtactttgttttatctgtatagtagcaatagcaactgattctaaattttttctatttttcattcatttttcctcaaaaaggattcccattcttattggttatttggttgtaccatctcatgtaaattccatgtggatgtatcattttagagattccagagccataatggtgcagttgttccttttctaataaaaaatagaggcagagaaaagtagcaacaacattgcaatttttatcactttgagcataggcagtgtttcactccacatataactctctggaattgcgcttctatctgtgggcatggggcaataaatttacttgtgttcctttcaggtttttggaaggggcggagaagagatggatttcttacagcaacagggaatcaaagtcgaagttatcccaggtatgataatcctattgcactagcttggatactttgcattgtttggttggtagcagttatgaaatactttggatctgaattccaaaactctgcaggaattacttctgcttcaggaattgcagcagaactaggcattccgctaacccatagaggtgttgctaccaggtatgattagccttttgtagttctacctaacttttaactactattgcacaaaaggatttcccctttgtatggaaatgtttcttctaaatgacttttcaacaagcttcatcatttcccatcagttttttgtttaggatttgcaatactccctcaattagcatgcctaaatatggatcttttgagcattacttgctgtaactctgaaatggttcccgtttttcaccgtacatgtctaattgtgtagtaaaagttctcggtattattttctgctgttctgctgtgctatggttaatggaatatcatttttttagtaaaaaactctcttgaattattaatgaacagaaaggtgctattgtctctgacactgtactgtagagatagaatatttcttaagtgcttatagtaggataaattgttgacataatcttcgctgcagtgtcagatttttaaccggacactccagaaatggtgggacagatccactacatgtagctggaagtgcagctgatccagacactactttggttgtgtacatgggtttgtcaacacttccatcactcgctccaaagttaatgaagcacggcctgccgccagatacccctgctgttgcagtagagcgcgggactacacctcaacaacgaacggtagcgactcttaggcccgcaaaaactaaattgtgtttaaccttactctgccatcctgaatgttcctcacactgtaggtgttctccttgttaaaggatcttgtggatgaagtcaagtcagctgatctagtttctccaactctaataattatcgggaaagtggtatccttgtcgcccttctgggtggagtcatctgaacattatgcactgaaaattgagagctcttatacaaatgaaaccagatgatagcacgttttcctgattttagtgattggacaatacttaagtaatgaaatatcccagatacgagcagttccaattgagatccatttaggaaatgcaagcacaggttcgacctggtgtacacaaaacatttcaggaagcatggattctgaatgatggatggcttaagcccataacagcattgggacagaagcgcacttcttctgatcatgctttgactctttggcctatctacctgagatccacaaatttttgatttagttgttcgacaataattgtgtgcttctgtattgctttggtgggaattgctttgatcccctttcttctgttgatgaagaggtcatgtctggaggcttgagcttcagtatatagacgcatttcaattcagtgtggtctttgtcagagaagtctcggtagatgtatgttttcattctgacttgtggcccattcggagcgcaggattttacagaattcgacaataagtagttatattttttgtggaa

SEQ ID NO: 3613 - DNA, 4476 bp, Sorghum bicolor
ggaacgacgactagtttacacattcctgtccgatacatgtatcctgtacgtatgtacacagggttgtgtcttgtgtgcgtggcataaactcgatctgctcggtagtaggagaggaagaggaatgcatgaatgtagcgacatgaagtgagtatgtaacggcgaccagcagcagcagcagcaggcgcatcggtttcagcttctgtaccggccccgaccgaagaagattcttcgccggacggacggacggcaatggctagctggacaggacggaaggcggcaggttcatgtatccgccgagagttgaaggacgagcggcggcccccgcggaggccgagccaaccggggcgtgcgccccagcctatttcgctagcacgtcctcgccggccgtgcgtcgcgaacgctagcttgccatcgcatgattgcaaccagcggaaaccgatgcattacagtacgtcctgcagactacgacacgcggccattgctgccgatggtcgtggtccacgtcctgacgctcccgctgcatcgttctggggcacgaggcagccaacaacggctggctgggctggggatggagaacacagcgagctagcccaggcccaggcagtctgctgcgcggcacacgcctgcctcgatgccccccgtaccgcaaataataaatactacatcgatctttagttttgtacggattacgtacagtgacaggctgaaactgcgtaggaggcggtatctacagctaatttattaggtgatccgtcagcaaaacagcatcagtgagcctttctttccctttttttttttcattcagtgtacaattcgcttcttatacattatcatgcacgaagcacgataaaatactgttgagattgaaaaataaaatgcgcacaggaccaatctcgatgggaaaatgtaaataaagaactgaaagtatcatcatttcgcaagcgacgattcatatgtcactagactgactaggcaacaaggcaagagcaacgtattctatttcagcagggacgtagaccacgtaactgacgaagagatgatgatggaggcgtaaacgctactgactagtaatcaatattggagtatttgttcttgatgaggcggatatggattggacgacaggacatgaataattatgaaagaagatgctgtcctagcttattaatcgcatatatatggacgagtagctagatagacgaacgttacagtagtgcgtggctaacgcattcaaaaatccagtagactgaagacattaatcgaggctatattagcatgacaacaaaaaacttgtgatgttatacatttgttgattttaatacggaaagccgttgcgtgttcattgaattcgtccagcaacatgttcagtgtactctgtaatatctcgtcaacaagtgctctaacagtcatcaagccgatgagttaccggtttgattagctagcttgcttttaaaacaaaaaatataataagaatatttgtggcgcacttcctggacacttgttcctcttcgttcgaaaggaggggacacctgttggcagccgcagaacatgaacaatccaaattgacgtttcgaaaaaagaaattatatatatgctgttccttttgcggaaaagctatgctgaaatgagtcgtgaaaaaacttttactgataataatggttttagttatataacagtattttttttcttataataaattaacatcaacatcagtatcagttaaaaaatataaccagccgagcatggtgaagttccatatcatcaatacttttaaacggtatcttctgtgttttctcgagtgactgtgtctcacacactgttcataggcaatagaacaaatctctagcttcacctttatctgatatatctgcttctgacagccacaaaaacctggccagagaatatccaaaacagtactggcaaaagaaggctgcccaggtgcatgcatccagctcctcctcgtgtcctatataaactgcccaaggttgttcggtgttcacagcaaaggcggcactgcccaaaccacctctttggccgtatcgcacagcgctcacccatacacgcacgcacacggtctccactgccactccactcccaccgccgctgctacatcagcagcaagcggccggtggtgtagcgccgggcaatccaacacacctatggcccagatgatctccaccatgcctatgctggacgccgccccggccgcgtccgccattatggcgcccaaactgcaggccgccgccgccgcctgcctggacgcgccgccctcgggcatcaccgtcgtgtcgaggcagcacgttcgcccggacgccgcgtccgcgatcggcgacctcacgctgtccgtctccgacctgcccatgctgtcgtgccactacatccagaaggggctcttcttcccggcgcccgacctgcccatgccctcgctcgtgtcgctgctcctgtcgtcgctgtcccgagcgctcgccgtcgtcccggccctcgccggccgcctcgtcacgctgcccgacgaccgcatcgtcatccgctgcaacgacgcgggcgtggacttcctccacgccgtcgcgcccggcctgtcgcttgacgactttctcgtccctgacgccgacgtgcccaccaagttgacaaaggacttgttccccatggaccggaccgtgagctacgaaggccaccgtcgcccgctcacgtcgttccaggtcaccgtgctcggtgacggcgccgtctttatcggcatcgtcgccaaccacgccgtcgtggacggcacctccttttggcaattcttcaacacctgggcggccatctgccgcggcgagtcacccaagatgccggacttccgccgaaacttctttggcgagtccaccgccgtcctccgcttccccggcggcgtcggcccgtcggtgaccttcgacgtggacgcgcctctccgtgagcgcgtctttcacttcagcgccgacgcgattcgcgagctgaaaacaatcgccaaccgtcgtccgagcggtggccaagacgccgaggtttacggcaagatggcgcatgaccccaagaatccccaagtgctgcgcggggagatctcgtcgttccagtcgctgtgcgcgcagatatggctcgcggtgacgcgtgcccggaaacgcctggcgcccgacgcgacgacgacgttccgaatggcggtgaactgccggcaccggctgcagccggccatctcccctgtctactttggcaacgccatccagagcgctgtaacgctggcgacggtgtcggagctggctcgcagcgatcttaggtgggcggcgggcaagctgaatgagagcctcgcggcgtacggcgacggcactatccggcgcgcggcggcggcgtggcaggccgcgccccggtgcttcccgctgggcaaccccgacggcgcggtgatcacgatggggagctcgaaccggttcccgatgtacgagggcaacgacttcgggtggggacggcccctcgccgtacggagcgggcgcgccaacaagttcgacggcaagatgtcggcgttcccgggacgcgccggggacggcagcgtggacatcgaggtgtgcctgccaccggagaccatggcggcgctgctccgcgacgccgagttcatgcagtacgtgtcgtgcccgtcgcatctgttgtgatgtactgtaccggtgccgtgcgtgcgggcgcgagtgggggccatcggccgtcgtgacatgccgtcgggcggcgtcagcgctgctgtttggattgctcggtcgtccttgcctttcgcgagtactactagcttagctggtaccaagacattgtatctgtctcgctttttcggagtgctgcgtgtaatcgtgttagttagcaactacttgtagtacttggaatttggaaatgactcttatgctgcagcctgcaagcgatgcaacagcggggacaatatgaaccgtgtagcaagagttagaaacaagtttctcaaaatgttggcactactgaacagttcatcagatcgcgaaagctaccttgttaaaagctacatactccctccatctccatcccaaaaaaaaaattaaggaagtttaactcaatacaaacccagagttacttttttttaatgatacagaatcacatctttttgaggcggaggtaggacatcagaactgaaaacggtaccgatattttccgaccgtattcgggaccgaattcgtttagagaggtttagatctgtccgtatccgagtccgaatgtttaacatccgataccgtatccgtatccgaatacttaaatcgtatatttatgatgtcgacatcgaatcatatcttatccgacatgattgacattatccgtattcgaatccgaatccgaccagaaatatgaaaacaaatatgatatcggtgatatccgttcgtatccgatccgttttcatccctaatcagaacctagggccgaagctcacatgatctagtaatatatcattttccaacctatacttgcatgcca

SEQ ID NO: 3614 - DNA, 6232 bp, Sorghum bicolor
ttatttaccactactgctgaaagaaataagaaataaaagaaaagaaaagaaatcagccatggggcggcccgacagccagccgtctgcgcggcccaggcgctggccaggcgcggcccagtccgccgtggctatataagccgacggttagggttgaaaaccctaaccacccagcccaaccgcctggccgccgccgccagccgccggtgcgctgccgccgccgcgccatctgccgaagcccgccgtcttttcctccttcccccgttgctcctatggccgatcagagcccctgctctctccccgtccatggagatcggccggcagggtgagcgccgcccgtccccggcgagcaagccaagaaacggcgggaccccccccccaccggccccgctgccggcgctcaggagcggccggtcgcctcccccttcactgaggaggagatgaaaccggcgccgagggcgtccacgagtgggagagcgcttcggtgcccgtcgatgtttgcagccgtgactgcggcgtaggagcggcctcgggtcgatggtgtcctgatcggagagagcggcggcgggcttggaggaaggttgagcgcgacgtcgaagtcgtaggcgaagcccggtggccaagccggcatgtcgtcattccggcgcacggtcgcagggccaccaccttcgttccacgggcgaagaagcgaggacgatgtcgggagcagcgccgttggagtcggcgccgggaacggagacggcttcggcaacgacgacggcttcggcgaggccaccgatgttgccccaacccggcggacgaaggtagtcgggccgtggcgggggcaaacaccagtggtgtattgtgtccgcgatgaacgcggggcttggcgtggcgtcgaaggtcggccaccggcgtttggtccggtggtgagacggcggcgaagggcgatacggtgctggccaatgtccctgaggacacggcggatggcgccctgaaggatgaacctgcggagtcctccagggtggctggtgctatgggcgatggcggcctccacggcgtcggtgaccgcgtcaaccatggcgttcatgaaagggagtggaggggtcgtcatcttctacctctccggtgagtctccggtggaactccggcgaactctttctttctggcctacttgctttcgagtggacagagcacgtggctgataacgtgtttaggccttgtttacttccaagattttttacaaaatatgaataatgacactttcgtttgtatttgacaaatattgtctaatcatagactaactagggtcaaaagattcgtctcatcaatttcgaccaaactgtgtaattagtttttattttcgtctatatttaatactccatgcatgcgtctaaagattcgatgtgacggagaatctgaaaagttttgcaaattttttgggaactaaacaaggccttagcgaaagtgaaagtgatggatataatgattgattattactgttgtgtacagtagatgtttatacacagaagaagacggttaatcattggtgccgaaagggcctatccgaaagggcctgtgcggttgtacccttccgaagaggtctatacagttatactatcgatgattacagaattacaataattgatcactaattattattcctaataataattcttaacagttttgacggaagcctaaagggcacgggcgagcgcggacgtgaaccccagtgcgccccccctgacccacactcggctgcgtctcccaccgtagccgcaagttgtatctgtccttggagcccactccggcgctccccaatcgcactcgctctatacaccaaccccgtacaccacagcttgcctattggctcttacggtcttgcctcccgtactggaccccgcaccgtccgtgcaccgcgcccacgcgccgaaacggcgatcccgcacgcgacgtcgcccacgaggccgcggcggcgcacctttgcttggctccaacaaccatttcttttttttcttttctttatacctatctatctcgcgcaataaagcgcgacgccacccagcgatctaggccgccgcctcctcctactgctccatctccctcgctctcgccgcctcgttcgcttcgcctccgctccgctcccctccgccccccgagccgagccgagcagagcgcagcccgatccggaggtggggatggcggacgcgaagcagcagccccagcagacggcggcggcggccgcggccaccaccggcgtctggaagacggtcaagcccttcgttaacggcggggcctccgggatgctcgccacctgcgtcatccagcctatcgacatggtcaaggtaccgtaccaccgcgccgctctgccagtcctctccgttcggcttcctttgtagtgctcgtgtcgtgtgtgagctggggtggggtggcgggatcgggggttggcgggcttagatctacgggaatggtggttgcttgccacgcgaagcagtcggtcggatgcgtacccgcggagcttgcgctcttttggttggatctgatgatgaatcgagcgtggccttggggtcagcgtggtggaactgagctaggtatttgggtggggttagctttagatccgtcggaattgccgtgactggatcatgtatgcgtcgtgggtgggtgggaaggctggtgggaattgtagttgtgcgttttctgggccgcgcgatctgattgttatggatgggacaattcgctcgctgtagttacttggatccatggagatcggtttctgtgctgtgattttaattcatgtgaggtcggcatctgtgcgttgctgctcggttctcttttggtaagatctgagtatctatggaggtcgttagctgaccatttaatggattttcatttgtagtaggtggttgttttttaatgccctctgatttcctcttagaagaggatagacgcaatttgtgaactagtctttgtcatttgattgcctctatgtttgagtggactcgagcaaatgaaatatgttatcataatacaattgtaatttgttggtgaggatctactagttggaattgtttcagtcccccaccccctgccatggtttattgatgctttcacctaaaagaaccttaggtcataggtaaagggaaccacatgttttaacttctattccaacttgataactggcttagtagatgtcagatgtcactgtcaaaagtcttgatggcatgcctttttggagctttatactctagggcgctttgcaagtggagcccatcttatactaattcttattattgttttggtttcaggtgaggatccagttgggtgagggctctgctggtcaggtcacaaggaacatgcttgcaaatgagggtgtccgttccttctacaaggtttgttttattttcctggtgctctgtaacttttccttataaaaagttctaatacttgcaactttgttactgactctatgctattgcaattgaaatattttattctagagaaactgaaccatgtattaagtttgagtatttgaccttgtgaacgcctattttgttcttagatgtttatctatgcatattttcaatccagcacatgatgctgcatactgcaacactacaatatttgcttgaccttaaatgcaatccagcatatggcgattttactctatcctccacattacaagacattaagcctgcataattgtgttcatctgacatttgcaattaattggtaacttggattgacatatagcttaattttctccgacgcttttcattggcagggtttgtctgccggtttgctaaggcaagcgacgtacacgactgctcgtcttggatcattcaggtttgtatagtctgttgttttacgatcaatcgaccagtcattactttttgatttgcttgcacaaaaaatatctgaatcagcttgttgtaacatatgatttccatttgaatgggtgcctgttgtagcgttgagattgcacctacatattagtagctagtggttagcccctgtcagatatatggttgcaaatacaactttgtttaagctgtgctgtcttcaaaatgactttaccctttgagtgccttgacccatgaggttgatggttgttcatttatctgcaccttcttttgtacaaagtttttcttgaaggaatgatgctacttaaaagttttgtttgatgtgaatataaaattctgttccacaaaggggcttatattttttattttttttatttttggtgttaggtgaactgtatgatcttggagttacttaactactatatagcgtgaacaaatgttgcaatgtccaattaactacttttatcaaagtcatgaatgcagatctaaaatcagcagtgaatattggagttattttatcttggtttccaactataactagtatttaattttaaacgaatatctcggatacatttttcagggttctaactaacaaagcagttgaaaagaatgaagggaagccgttgcctctaattcagaaagcttttattggtctgactgctggagcaattggtgcttgtgttggtagtcctgctgatttggcactcattagaatgcaagctgattcgaccctgccagctgcacaacggcgcaactataagaatgcttttcatgcactctaccgtatcactgctgatgagggagtccttgcgctttggaagggtgcaggtccaactgttgtgagagctatggcactcaatatgggtatgcttgcttcctatgaccagagtgtcgagctatttagggacaaacttggtgcaggagaaatttctactgttgttggtaagattctagtgcctagaaaccttgtgcattttgtgctattgttattgaaattgaatgcccgttttcttagcttatgcaactgtctttgtgcttaatttcatccatttctatatgtagctatgttaggcctgctgtcagcttcctgatgcaattgtccaatttgattacaggagccagtgctatttctggattcttcgcctcagcttgcagtttgccctttgactatgtgaagacacagattcagaagatgcaacctgatgcgaatggcaagtacccatacacagggtctttggactgtgccatgaagaccttcaagagcggtggtccattcaagttctacactggtttcccagtgtactgtgtcaggattgcaccccatgtcatggtaaatagagaatgcctggctatactctgctggacaagtccaccttttaccttattttcaatccgttaactttatagcatattcatccaatgataatttgaatgcagatgacctggatattcttgaatcagatccagaagcttgagaagaagattggcatataggattgccaaccgaccaatacagggttgaccgctctatgctgttatggcttgactcctataataacgttccagctgcttttgcaccatggtagatggttttggtagagacaagtctggtacaatttttaccttagcttacttgccaattgttatgttgcaataatcaaattatttgttgttggcggaaatttttggggggcgggctttgttggctggatgcagccatgaggacagggggtaatacatagttatgccattgaatggaattggaccatattttatacagatttttttttgcagtcaggcttcactccttttgaactcattgcatttgggacattatttttttgtaatgaaaattgatgtttatgaatcggctgggagattatgggcgcgtttgatttgtgtctaaaaggtggccctgggcccctcagctgcaacttctcgtgtttgattttcttggcgcatcagcgagctcggcccatgagatgcaaaaaaacactctcgtctggctcctaggaaacgctctggagcttcttttttcgctttgtttcttcgcagccaggctcgctttagtgctgacagagcgccgaaggaccgctcaagactcacctccgacttctcacctcccgcaccgtgaggctgtgcgagctccgcggcggcctgcgcacggatatgcaagtggcggatgcagatggcaacaactacatcagcttgcccatggacatggcctccgctgccaccttgcaagccggtggcgagcaagtgcggcagctgtgggtcacgagcgcaagcaatggtgctgctctctattcagcccagcatatgttcgatgaaatgtcaaagataagatgacaaaaaagatgtatgggtaacgttaccagttctacatgcaaaggtct

SEQ ID NO: 3615 - DNA, 8250 bp, Sorghum bicolor
aggcccagagctatgaggtcactgtgctagagtctttagggaccaagggcattctgtacacacacagcacaatctgcgacacaatgttgccaaaaatgttgaatgacaaatgtgcgtatttcagagagaaaaggcgatgctcattttttctaaagaaaataatgacatccttcgtgtttccaacgtcgttgaagcatcgtcattccgtgttttttttttgaaaaaatgacaaagtgcaatttaacgtttcttattttcaatgtcatacggccaaactatcgtggaggattgtacacgttacatatcgcctagttctcacatctttcacctaaggtttatgaatggacctgataaggaacttagagggcaatatttggtgcttgtgtgtgggttggggttggggggtgctcttttgttcagcccaaatgttggtaaggtcttttacaaaaaaaagaagaagaggatggtcttgctatagtgcatgaagaagctagagccgctaaaataaaatattggcttcacttgctcctcattcattttcgagagaagagagaaaaatagtatctcgctacagtacatgaaggagctagatccgaatcctccatatacatctttagaaaaaaaaaaggatagaaatctactactgtactaattgtttctcatcatatagattatcgatttccgccaaacattgttccgatcaagtgttgcaattgcaacttcggacgtgtttagatacctttgcactggcttgctttgctcggttaggtaatggacacggcgccgtttggtcgaccctgcttgtcacctcattcctccattttctaggatttttcatcgtcaatgtgatcgagttgaaactactcttggtaacaagaacggccacgttatgcacaaatgtctaaatagaggctaggaattttgttaattccattctattttaaaaaatagcgaaaccttttaaatgtctagcaagtacaatagcctcacaacatatgacggtttttactacagtaaaagaaaataaaagaaaagtggtattgcattttccaaaactgaatggtctgcaaaaagccagcgattagagcatctccaagagaagactaataacacttccaaaattgatgtttatatgattagcgataaaatatgggtcgaacagttccccatggaaaaatgagcgtgtgccccgcatctatccagaaggaggcgtgtccccaatagttctgctagtagtactactactgctttctctggtgttactgccttctcagccaccgccattgtctgtccctgttcgtctccctttctggctgcttgcttgatgcctacctctgcatactattcgacacaagaggtgcatgcgctagcagagaacaggtaagaacaggcaggccacatgtgatggcgatgagcacaaggctaatggcggcgctgaggagcacaaggctggtggcgcaactgatgagtagacaaaaaaggtcaagatccaactaactaatgacatgtcactattggttacggaaatattagggagctggtgtagatgaaactgaatttagggtacatttagtttaagagggcctctaatagtaagttttgagggttaatttttaaggtacctcttggagatgctcttacgttcgtttgatacgctttttctgttcccaactcggacggagcccacagtcgaaacaagatccagccatccattctgcaaaccgccatgacttgcacgaatctcacagcagctctcacgcttcccccctctcctccctccgcggcgacgccaccgagtcaccgacctgccacacgcacacccgggtccacagccacctgtccgcattgcgtcacctcgccgttgcttccttccattccagagtccctctatagaagcgcctccacgaccgcggcctcctcgcaggcagaaacgacgtcccaggagaacgagcgcaacccctccgccgactcgccggggagaggggggacggacgggagcgatggaccagacggggtcggggctggacaagcggatggaggcgctgtcgctgcaggcgagcgctctgcgggaggccctgcagcggagcgaggagaacacggacagcgcggtcgccgccctcgactcgttcgaccgccacatctccgcgatcgacgcctccttccgccccgcgcaggttcggccaccgccaccctccgtgttcccgttcggcgagggcgcgtacggagacggagagatgacccgtgtctgattccgccgccgtgtcgcgcgcaggtgagggcgcaggccagcacgatggcgaacgagaacatcgacaggaccatcgaggccgccgaggccatcctcgcgcagttcgagatcgtccgtcgggtgagaaactgctcccgtcctccggtttctgttcgagaatgctctgaacccctagcgaactggggcggtgttttgggtttagttgttgtacgggattactttatttaatttggatgggattcagggcgccaaaatttgcattcaatgctcccggactagttttggtgcatgcctaaaattcgaaagccattaaaggtccatagatgggttgtacgctgatgattctgtatgtgaatgctcatattgttgccatggccttgtttagttcaccccaaaaagcaaaaagttttcaagattctccgtcacatcgaatcttgtggcacatacatgaagcattaaatatagacgaaagcaaaaactaattatacagtttagctggaaatcgcgagacgaatcttttgatcctagttagtccataattggataatatttgtcataaacaaacgaaaatgctacagtaccgaaatccgaaatcttttcggaactaaacaaggcccatattgatttagctgcagtcggttgttattatgtcaagaatacaaccaatgattgatgattagcttattactattgttagttcattgctttgttgaattaatctgcagatgtatactcagtatcttcacaccgttagattactagaggatctatccatagggcttggtgtagtcgcaaagtggcggttggttttcatgttctaagattagcattgatagttattgaccggcttatgtgcttttgctagttcagtacttcatcactttctccagcagatgttataaatggctattcactttctccagcagatgttattgcgggtatcttgggcactcttaggccattaacgatttttatcgaaacagtgcattcattacaatttcttatgaacatgctgataattttttagctttattaggctgaagctgtgatattgaggggtccacatgaggatctgaagagcttccaggaagctgtggatctgctgaaaggcgtcttccacttcttttcctccaacaagaactttaagagctgtgaaggagtattgagtcaagttaacaacctcttaaccaagtctaagcttaagatcgaggaggaattcaggcagttaatgagtacttacaggtaaattttacatgtaccttgttgcagagtcatccacttcttttccttgaacaagaactttaatgcgtctgcttctgaaccaagttcattgttgatccttataattggtttagagcattatgtcctgtatttcctagatgtctttcagtagtaacttaccaattcttttgatggctggtcaaagtaaactattgcatctcttttttcagcaaagctagtgagcccgcacttctatttgattgccttccaaagtccctatcggcattagaagggacctctcaatcagttggagagcaactatccaaaagctttgaaagtgctacatacaggactccaatactaattcccccaagaatatttccacttctgcatgatatagctcatcagttagttcaggatggaaatcaacagtcgtgctatagaatttacaggtaggtttcttgacttgatgtagcatctagttgttctgattatttatgcacagatcacaatatgacaatgtgttcaggttgtttgtggatatctggccaatgagtattgagagtaaatgagttgatggaaatacatcgataccgacaaaatatgcaagcaatgtggcacacctagtcaggtcttggtcagcagcttacactgtatgaccaaaaattgttggagcttggaaatcgccttacctactgagtaacttaatttatgtcagttcgagcatccttgatttggaaacatttatggatgccatgcagtatgaatgatcattactttttcttctcaacttgtatcgtcattctttcttgagttttaactgtgtgatctacagaatcatgcttggatttgtttcttttatcagagatgctcgcagctcagcgttagaactgagtcttcaaaaactgggcatagaaaagctaactgaagataagatccagcagttggagccctcaaatatgaaaattggaacctggactcatattatgcacattacagtaaggatgcttctaaaattatgattgtgttgtatgtgtttagacatcaaactaataaactatgcttaaatcaggttaaagtattactggctggagaaagaaaaatctgtgatcatattttcgatggtatcactttcaacaaggatcaatgttttgctgaagtggcaggaagcagtgttatgactcttctcagctttggtgatgttgttgctaaaagtaaaagatctcatgaaaatttgtttctactgctggagatgtatggattaatgcacggacttcagtcagacgtatgtggagataatgcattcagcacttctcatcacaaggatcatgtgtttgtgtccatacatacattacgttttacatcaagttttggccagtcgttatgatggttattactggccataaaactagattagttgcaaattatgattgcttgcagttacagttgctgttgtctttaattgtcttgccatcagcttcaacaatgttgattgttagaactagaaaaaattactatcatcttcatctcttttttgaacttattaccaggttgaagtgacttttcaaggaaatttttgctctgggatgcgggaggctgcattaaacctgactaagagcttggcgcaggctgcccaagaaactctgcttgatttggaggtggcagttgaaaaggaaaattcgaagactatcatacagaatggaaatatccatccttttacaatcgaaatgatgaattatgtaaaaggcctatttgagttagtacaaccctttccatcttgttataccttcctgacaaatgagtattagtataagctcttaatcaaaacagagagatttataaatccatctcctttgtcttgagttgtcttatgagtatgccttccatctggaaaactcaatgttgtttcttatggttgcactgtaatacctgttgaggctgaggtggttaatgaccattgacaatccattgtgctccatcgttttgtttttttctttccaaagtctcccgaagcatttgggtgtctattggcggtttggcacaatttcttgagtctcaacctgctagtattagtgtttttccaggtttacagcttcacttgctctctacgattgccttgctttacttgaaaaatctgaggcagtatctgttatgcttgctataaataattatttttttttatttaagcatggtttaatttttcagccacactaacatatctttattctcatttgaacagttaccaatcaacactgaaaatactatttcagcaacctgaaagtggcagtgagactgaatctcaacttgcgattacaaccatgaagattatgcaggcttttctgaataacttgaatgggaaatctaagctgtacaaggatcctgcattgtctcacatatttcttatgaacaaccttcactatatagttacgtttgttcgcaggtatgtctcgttcgtgcttcagatccaaatccacagatgtcttggcggtgtccctgttcaataatttgttatgtctcacctcagatcagaatccaatgatatacttggtggtgactggattcagaggcaccgtaagattgtgcagcaaaatgctaaccagtacaagagggtagcatgggcaaaggtcagtgcatcgtcggcaataggatgtatatgtttcttttatattttactacttggtgttaaagcttatcatctttttgcaccttttagccataatattttgttgtacatcctctacctgtttcactgttggagatctataaaatacgatgatttacttgctgcactccagtggtagctgatgaaaaattcagttgttattttttctctgatagaatgcactaagaactaaggtttagaattcaaccacaggttatcctctataaattttggattcaggtttctattggattctcaggtttaaatgaacttgtgatctacataacccatcatgaatttagttccatttctggagtaaacttttttgtgtgatgagaagaagacatactttttactgtgccctttcccttcccttagcacgctttacattcaagtctggtaggttatatagttaagattttctttctcctgtatgtgcatcatagtaaatactgaacagatcagcatcctgttataactatttcacccttgcttagcaagctctatgttcaagtccctgtaggttagattgtttaagattttctttcttgtctatgtgcacgattggaaatattttttatagaatcacatcctgttaaaactactccgcttctatgattttagattttccagttaaaactactccgcttctatgattttagattttccaggtactctctgtccaagtcacaggtggcaatagttcttcatcgccatctgatgttagcagcactggagtttcaaggactatgatcaaagaacggtctgtacagtggcatattctctgtaacatggtaaccttttttaatgaaataaatataaagaaataaggaaattgtatgcttccttggcaggttcaagtccttcaatatgcaattcgaagagcttcatgcaaagcagtctcaatggactattcctgatcaggaattgcgggatgaactgaggcttgccatggctgaagttctgttgccagcatataggtctttcattagccgttttgggtatgtgaagtaatcttctttatctgctcaggatgcctcacaaaatctccattcagttaattgtttacagttaatatttattcggttatacaaactgcagtaaaaaaaaaaagtggtgttctgaaatgcatgcagccaaactctaaatagtccaaaatatacaagtactcagatttctcacatgaaaaatggtattagcaatggtagaaagtgtgcttgtgatgtcgcgtcagtgtcttaaatggcaaattaaagatctgctagggattgttgtgttttacctcaaatgttaatgaggcctaagaaaattatggatgcaccaccatcttgttccaattttcactctatttcattcattgattagctgacaaatgccaaaaatatgggggccaatcaatcagtttccagatgaacattgaactctctatatggtataatttccgagtaatcagctgtttcatagacacaataacactggctttcaatcttgttttaattctagcactgtttttaactttcaggtatcttattcaacgtgggaagaaccctcataagtacatcaaatactcaccagaagaattggatcaaatgttgggtcagttcttcctaggacagtaagttggtgaacagaagcgtttaaaacagagaagtagagaggaaaaggccttgtctaagtaaagttttgtagcgcagcttatggcaaatatttctacaggaggaactaactatctgtttgtttgcatcgcccgtaaatggttactgaactactgatgtagcctaagtgactcctctacaacacctgtatcgcataggtctcacgttctttcattttaacgtttcatgttaacgtttgagaatgactgacatgtatgcaacctcagaaggcaggatccttttcccgatttcagtttgtggggtcaataattcctttttttgaacgaacaggccaattatacgttgcctttactcatgcttttgattcttcataccaggtctctgtttccggcaacttttaggccttgtttagttcgcaaaatttttcaaaatttttcgtcacatcgaatctttggtcgcatgcatagagcattaaatatagacaaaaataaaaactaattgca

SEQ ID NO: 3616 - DNA, 13484 bp, Sorghum bicolor
ctcttttcttcaatagtgccaagtaaaaagtgataagttcgagatcctcttatcgctcttcctccattttttttctttctaaaatgcctcttctttttgttccagtgttcactgtgagagaggggacatgttttgccaaatcaaaagggactgcgagtggggaaatggtaatggcatacataatgaatctaggatttagaggagaaaagtcacgaaacgaagagagcttgaactttactcaaacttaaaaaaactaaccattcacatggatatatacacatcttacacattgcccctgagattccattttcctgaagtgcttatttcatgcatgattcatatgtatgagttctagcaacctatcattggcaaaaaagttggatatataaatatgattgacaaaatagctcgctcaataagaagatcattcattaaataagtcattaaaattatatgcttgactatgtcaaaataagggcatgtttggtttctcgccataggatgccacactgaagcttaggcgtgccaccgaataagttgtttggttggtgaaataactacggcacccatagtttttcgcagttggcttaagtgtggcggccaaaatcggcgccgcaccttaagcggtggcggtggcagtgacgtgctctgactgtcaacctaaataagttcctccaaaaagatatcttaaataaataccatatggctacatactgagtatgatttggtaacacatttcctttttttccaccacaccacgttgctaacgatttgtgcctagattcaaacaaaaaaaaaaggtaaggatacaacggggtgtgcccactaccatgaatcctgattctggcggggacccatacgaaatatagtacagataccatcacctaacaacaggaaaaaacacttaaaataacaaataaataaagaataaacaaaaagggtagtacaaaatttgtgagaatatcaggggcgaaaatataggcagtgggggccatctccgcgcgtggggacgcgacgcgagacgaggagagcggggctggtgggttggcaggcaggcgcggcgagggcgagctcatcaccaccaccctccctccctctataaatgcaggggcgccgaatgctccccaacgccctatactaaccagggggagagagaggtcaaggaaggcgagcgacgctcgggaggaagggcacctcgcgacggaggcggcgtcccgctcccaccaatccacgacaccgaccccctccccgccgcgccgcgccgccgccggggacgagcgtgggctgtgcagccaaaatctaagacacaccgatccctgggcgtgagtcgcgaagtagcggcggagaaaaggtcggagccacaacgcggccgtgagcccgcagccaccggttccgtcaggctagacggagagagcgagaggtacccgctccctgcaccccctgcttcccaggacccgcgagacgctaaaaaatccgacgggattgcaacttggcggtttggttcggctgtagcgtgcgtgcgtggttggtggcatgcgcggccgtctcgttgtttttatttatttcgatccgttgatgtttgattctgcgtcctccgtgcgtgcgctcattcgtgaatctgccgtgtcgcggcggcggcggaggaatcttcgccgccgtgcggggggttggtagatctgttcatccctgcgtgtgtttccgccgctgaggcgtttgtttcgtaaaattctttttgggagtgctctgttacactgcagagtggggcgcacgatctcttctggatgtttatggtgttgacatgtgggcgtagggaaggggacagcctcgagctttctgctcgtttttccggtgcttttttaattagtttttcccggatttctggttctttttttttttggcctgcatggcgtactagatcgatgaatcgctaagcgaataccatctgatgctcgtcgtcgtttgattgttgcatggcaggtacccaggcttgctgctgagccatgtcgacggcgcaagggacagcgttgaagtcggcgccgatggggccaggtcgtcgggcccggcgcggccgccccgtggcggcgccgtaccgttcgggctggcaagcctacggtggcgtttccctcgagggcggcgggttcctcggtggcgtgcagcgcaccgaggagcgcgtcgctccgcgggcgccccgcgcggcggcacgcgacgccgaggtggtgaggccgctctcgaagctcccgaacagcagcattgggctctacaatccctcgttcgagcgcgacgcgtgcggcgttgggtttgtcgctgagctttctggcgattacaagcgcgagactgtgagtttcatcgattccttcaaagatgcgatgccacatgtattgtagttacactattttgatttatcacgtttgggatgccaattttgctctccttttttttttaccacaggttaatgatgctattgagatgcttgagagaatggcacaccgtggtgcctgtggctgtgagaagaacacaggagacggtgcgggcatcatggtcgctctaccacatgacttcttcaaagaggtgagttctttgcaacaaaaagaaatagacgaaagcgaaactgttcttttggacagatagttcattgcttttgctttggtgttcctgcaggtcacaaaggatgctggctttgagctaccgccaccaggcgagtatgctgttggaatgttttttatgccaaccgatgaaaagcgtcgtgagaagggcaaagctgagtttaagaaggttggtgtaacactgtcaataactttgatagcctattagcaatgcaggatttgcatgttttcatttctctgattaacgatcttgtccttgcaggtcgcggaatcactgggacatgtaatactcgggtggcgtccggttccaactgataactcagacctgggtgaatctgcactggagactgagccagtcattgagcaggttttcattaccaagagttcaagatcagaggctgagtttgagcaacaggtaattccatagcattagatgtaattgcacatcaacacatgtgatggatttggctttaatattttttcatgaattgtttcagctatatatccttaggagactctcaatcatctccgtccgagcagctctgaacattaagcgtggaggagagagggatttctacatgtgttctctgtcttcaaggtgcttcccttttctcacttgagaagtttttgttttgctttcattcggtttcatggctgaaaaggatcagggagtccccactaagcacagtttttgaaatgaaactttggcaagaattttaaatttctgtagggggataacgaaatatcgccttccatttgctcttaagaattgtaaatatgtagccaaatgatattttgcttggcctaggtttgtatgaataattctcatttgaagttgtttttctttattacaggactattgtttacaagggtcagcttaaaccatgccagcttaaggggtactactatgccgacctaggtcatgaaaacttcacgagttatatggctctggtaaatacaaaactttgacactcttacacaaaaattgtcatgaccatagtctcggcagatggcaaccaataatagcaaggctgttgtaagaagatacgcttccatgcaggcaccaaactttgaactgtcttaccatcactgctctactcctatgctatttcagtcctggttcttgatgccttaaagtgaagtattagaaatctctattagttgatacccgataaccatgttgcagagtccagctgcagttctgctatggccgactgctatgcccgactcatcaggatgtgacctccgattaggtggtgggaaggaaatgtgtttggtttgaggtagcttagggctcccaactgttttgcatgaaattctgtgcaactgacgctttctttttcgtagtgctagtgcttcattctgatgttctattcagcatcttaaagctgcaaactatggctgtaataagatttctaaatccatatattaaaacaggttcactcaaggttctccacaaacacctttcccagctgggaccgtgcacaaccaatgcgcgttttaggtcataatggagagatcaatacccttagaggaaacaagaattggtaatctcgctaaacctttatacatctgctgtaaaaatagtttcatagtttggtgtgaacacagtcatctccatattcttatgctgtttggattttatggtccttagcttgtctttaagtaatctggatttatgacaggataacagcacgtgagggtctcttagaggctgagaagcttggattatcaaaggagcagctctcaagaattctgccaattgttgatgctacctcttctgattctggtatgagcacataatgtttcagtgttgtgtgatgcacagttacacctggcaaatgaaaaatacctatctatcttttggaaacttattacgtggaaaaaactgtaggcgcattcgataatgttcttgagcttcttgtccgaggtgggcgaagcctgccagaagctgtgatgatgatgatccctgaggcatggcagaatgatggaaacatggatcctgagaagaaagctctctacgagttcctgtcagcacttatggagccttgggatggacctgcactaatatcttgtaaatatattctattccactcttcttgtctgatcattctgactggttactcaatctactcaaccctaacttgtctttcacctacagttactgatggccgttaccttggagctaccctggaccgtaacggtttgaggcctggtcggttttatgtgacgcacagtgggcgtgtgatcatgggtagtgaggtcggtgttgttgatgttcctcctgaagatgtgctgagaaaaggcaggctaaaccctggaatgatgctattggttgattttgagaatcacactgtagtggacgatgaagctctgaaaacacaatactctaaagctcacccgtatggggaatggcttaaaagacaaaagatacacctcaaggatattgtagaatcagtgccagaaaccgatagagttgctccaagcatttctagctcacttccagtaagcctttcgccatgcaccattcttactagtgacaacttgggcaaaacctaagtaatttagcacttacaactcttacaatttggtgcagcaaaagaatgagaacaaggatgatgttggtatcaatgggattttaaccccactgaaggcctttgggtaagcaaggaagttttgctcatagttaactgatgtacctgttggcgtttcaagttttgctaatagttaactgatgtacaccagctacacggtggaagccctggagatgttgctactgccaatggctaaggatggagtggaagctctcggttccatgggaaatgatacaccgcttgcggtgatgtcaaacagggagaaattgacttttgagtacttcaagcagatgtttgcacaagttacaaaccctccgattgaccctattagagagaagattgttacatctatggagtgtatgattggcccagaaggtgacttgttggaaacaactgaaaaacaatgcaaccgccttgcacttaaaggtcccttggtatctattgatgaaatggaggctattaaaaagatggattatcgaggttggcgaagcaaagtgctcgacataacttatccaaaaaagtctggaaggaagggcttggaagaagctttggacagaatttgtgccgaggctcgtgaagccataagcaagggttacactattttggttctctcagatagaggttagaaatttatttacagtagtctatttttgctctatatcttatatatggttatactgatcgcccaacagttaattaaacttccccacagatgagttaaatgcattctacaaatttgttatagcttacaaacgtcttcaagcatactatttgttgctcttttcatttgcacaatgtggcataacttgcttattcctttttgtttagtttgagaatagctcctactttacacaatttaatttaatttaatttaattcctatgacagtccatcgaagtttcacgccattgagatctgactttatttgtttgcctgaaattgttatgcaggattttcctcggaccgtgttgctaccagttctctcttagcagtgggagcagtgcatcagcaccttgttgcaaatcatgagaggacacgcataggattgttggttgagtcagctgaacctcgtgaagtgcaccatttctgcaccctggttggatttggtgctgatgctatctgcccttatttggctattgaagcaatttggtgcttgcagaatgatggaaagattcctcctaatggtgatggacaactctactcaaaggaagagctggtgaggaagtatttctatgcttctaactatggaatgatgaaagttcttgcgaagatgggaatatccacccttgcatcctacaaaggtgcgcagatttttgaagctcttggtctttcttctgaagtgattggcaagtgttttgaaggcacacctagcagaattgagggtgcaacatttgaaatgcttgcacgggatgctctccgtcttcatgagttagctttcccatcaagaacccctccagctggcagtgcagatgcaaaggcccttcccaacccaggggattaccactggaggaaaaatggtgaaattcatctcaacgacccacttgcaatgggaaaattacaagaagcagctagagtcaacagccgggcagcatacaaagaatattcgaaacgaattcaggagctcaacaaagcgtgcaatctacgtggtatgctgaaatttaaagatatttctgacaagatatctttggatgaggttgaacctgcaagtgagatagtgaaacgcttttgtactggagcgatgagttatggttctatttcattggaagcgcatactgcccttgctattgccatgaacaaacttggaggaaaatctaatacgggtatgttctcatccatgtgtagcatttctctgttataatgtggacttttttttgggcacattagcaccatgaaaaaccatctgaataaaagtaggatgtatggaccattttctagtttttgtaagtgtgatgtgctgttcttttcctgaaacatgaatgtgctgtcctctgcactcaacattttagaaacaaccttgtctaaaactatagttaaattgttgctataaaatgaaactaaattattcattgcatatctgctctttctagaaaaacttatcccatgccttctggtaacctttccatcttgttgatgttgaatactagcttttgaaaacatgtcatactgatttgtttgttataatttattgcaagataagtttgtttgccttttgtaattttaaaacggtagtacaaaactaatgaggacatctgctataaatttctggggtttaatagaagtacttgaatagtcattttttcctcctacagcctggtgctgcaatgttccttttcgattataaaccccgttgttgtctcatattgtagttcaggaacatgcgtattttttttaccacaacatcatgggaggcccctacttctagatcttaatattaaatatacttattcccaagtctaagacctttgtgaccaaatgcacatgctttaatatatctgtgaaggtgagggaggggaacagccctctcggatggaaccacttcctgatggctcaatgaacccaagacgaagtgcgatcaagcaagttgctagtggacgttttggagtttccagctattacctgactaatgcagatgagctgcagataaaaatggctcaggtactttgtcaacattttgaccatgcagccattaaaaatgattacatcctgttgaaagaacatgggtcttccatatttcattttagatttactgtattttttaccttaaatttctatagggtgccaaacctggtgaaggtggtgagcttccaggccacaaggttattggtgacattgctgtcacaagacattccacagctggtgtaggactgattagtccacctccgcatcatgatatctattcgattgaggatcttgcacagcttatacatgatcttaaggtataaattgttaatagagtattgctgttttctataccacaagatctgtgattcattgattgttgctgttggctcaatttattttttttaatactccctgtcttatcaacctctgaagtcctcttattgctcttaatattcatggatcacttgctgcgagggctactcttgctactttttactggtgaacttgcatgtatgtttgtgaatctccaacttgcaaatgctgttcaatgatagtgatattcttgcctatgcagaattcaaatcctggagcccgtatcagtgtgaaactagtttctgaggctggtgtgggggttgttgctagtggtgttgtaaaaggacacgcagatcatgttcttatttctggccatgatggaggcacaggagcttcaagatggactggtatcaagaatgcgggacttccatgggaactcgggttggctgagacacatcaaactctagtagcaaatgggcttcgtggtcgagcagttctgcaaacagatggacagttgaagactggtagagatgttgctgttgcttgcttgcttggtgcagaggaatttggtttcagcactgcaccactgatcacacttggctgtattatgatgcgaaaatgtcacatgaacacttgtcctgttggtatagctactcaagacccagtgcttcgagaaaagtttgctggagaaccagagcatgtcattaactttttcttcatgcttgctgaggagctaagagaaatcatggcaaaccttgggttccgcaccattactgaaatggttggacgttctgatatgcttgaggttgatccagaagtagtgaagagcaatgagaaacttgagaacattgatctctcactaatcttgaaaccagcttcagagattcgtccaggtgttgctcagtactgtgttgagaagcaagaccacggcctagatatggcgttagataacaaactaatagatttgtcaagaactgctattgaaaagcaagtccgtgttttcattgagactccaatccagaacacgaaccgagcagttggaactatgctcagtcatgaagtcacaaaacgttatcacatgagtggattgcctgctggtacaattcatgtgaagtttactggaagtgctggtcaaagttttggtgcttttctttgtcctggaatcactcttgaactggaaggagacagcaatgattatgtcggtaagggcttatctggtggaaaaattgttgtgtacccaccaaggaacagttcttttgttccagaggataatattgtcattggtaatgtggctctatatggtgctaccaagggagaggcatatttcaatggtatggcagcagaaaggttttgtgttcgcaactcaggtgctcaagcagtggttgaaggaattggagatcatggatgtgagtacatgactggaggtgctgtggttatcctcggaaaaacagggcggaactttgctgctggcatgagtggaggcattgcctatgtttatgatgttgatgggaaattcagtgctcgctgcaacaatgagttagttgacctatatcatgtggaggaagaggatgacatcatcacattgaaaatgatgattgagcaacatcgtcgcaacactgagagtgttttggctagagacatactctccgattttgataatcttcttccaaaatttgtaaaagtatatccaagggattataagagggttttagaaaacatgaaggcggaaaaggctgttgctaagcatgcaaaggagcctaaggtggcaaatggaatttctgtgacaactaaggtgagatgcattttcaagtggcaactctgtttcatttttcatatcacggattcctacttagctattgtgaattcatcatacctaaacatttctagtttatttatgatttcgtattcattcaatagagaattaaattcttgcacaaatgtttattcatcagaacagctaataattgaattccaatacttggaagctctcattgactacttgtatcaactttcatgtacagaaagtacaacctgatcagtcagcaagccgaccaacacgtgttgccaatgccaaaaagtatcgaggttttattacatatgagcgagagagtatttcttacagagatccaaaagagcgtgttaaagattggaaggaagttgcaattgaatcaacacctggcccactattaaatacacaatctgctcgttgcatggactgtggcactcctttctgtcatcaggtgatatttctatttttgctgtttattattttatactctctccatcctgaaatataaggaatcctaggaattttaggacaaattatgtgtaatgcatatggcgcatgtaaccctccttaacaatagatagactttgtgcttaccatattttgagcttggcgataaacactattttttttttgagaacatgcatgacatgtagtggtaggcactaatggcaggtacggatgtgattgtggctttgtgggagttaattcacctagaataccttataatttaggacaatttgaatgtttcaataccttaaatttcaggacaaaggcagtatatattttaattctctttccatcattgttaagatggatacattttctgtattcagattcagttgctgaattgaagttgttgtttctctacagtatacttctaatgcgacttgtttggtccttctcttatctactgatgataagattttggaactctttttgtaacatttttattttactttcacaggaaagctcaggtgctggttgccctcttggaaataaaatcccagaattcaatgaattagttcaccagaacagatggcgcgaagcattggatcgattacttgagacaaacaacttccctgaatttactggacgagtttgccctgctccttgtgaggggtcatgtgttcttgggatcattgagaatccggtgtctatcaaaagtatagaatgtgcaatcatagacaaaggtttcgaagagggatggatggttccacgacctccacttcaaagaacagggtatttacagatactttttaaattcgtttatttttgtctgtgtttgcagtttaatttcactaccaggtagtatctcagtattgctctttaacaatgaaatgatcctattacagaaggaaggtggccattgttggcagtggaccagctggtttggctgctgcagatcaactaaataaaatgggccatttcgtaactgtgtttgaacgtgcagaccgaattggaggtttaatgatgtatggtgtgcctaacatgaagacagacaagattggcattgtccagcgccgtgttaatttaatggctgaagagggtgtcacatttgtggtgaatgccagtgttggtagtgatcctttgtactcaattgaacgtctacgttctgagaatgatgcagttattttggcttgtggagcaacaaaaccaaggtaacaacaaactgaaggcacccagataaaattttgatttacactagctcctaaatatacccctgtatttgtttgtaagatatagatggtatatcattcaataactgcaacaaaatagcatgatgtgctttatattgacctatgggcatgtccttaacagagacctcactatccctggacgtgagctatctggagttcattttgcaatggaatttctccatgcaaataccaaaagtttactcgacagcaacctggaggatggtaaatatatatccgcccgtggaaaaaaggtggtggttatcggtggaggtgatacaggcacagattgcattggcacatctattaggcatggttgcaccaaccttgtaaatcttgaactcctgtcaaaaccaccaagcaatagagctgctgacaacccatggccgcaggtgactatctttctccctttgcagttatttatcacgttttttagagtactgtttttgtccttaggttgctgagtgcaggaatatatcgttgcttgtgcatcttttccagctttggtgttcttatttgcttatttctccttttgcttttagtggccaagaattttccgtgttgactatggtcatcaagaagctgctaccaagtttgggaaggatccaagaacttatgaagtcttgacaaagcgttttattggcgatgaaaatggcaaggtgaaggcccttgaggtagtgcgtgtgaagtgggagaaggtagatggaagatttcaactcaaggagatcgaaggatcagaagagattattgaggctgatctcgtcctcctggctatgggattcttgggtcctgaagcggttagtacccctcaaggctattctagttctagtgcctaagtaccattgttatagtgcctaaagtaccatttgtgagaaatgccgtcaaaaaactatgttgtcttcctgcagactatcgctgagaaactgggtttggagaaggacaacagatcaaacttcaaagcgcagtttggagactttgcgaccagtgttgatggtgtgtttgcagccggggactgtagacgtggacaatcactggtggtttgggccatcacggaggggcggcaggctgctgcagcggtagacaagtacttatcaaggtatgatcagaatgctgcaggcgacatcactccctccggggcagggctcgttcagcctgttgcggcataaaagcataaacggaagcatgttttaggttgtcgtcagtatatcctgtgaattgctcacagcaaatactcttcttgtagttgtctaagaaacagatacaaccgggcttatcaaggaaagaaagcccttctatattttgacgatagataaacagttgaaagttttggcggctattgtttctttttcttctccagttattatgttttgcatgtctgcatgtggttttgtagtccgaataatgtacagttttccctttattaaatagatgtaaattttttgggcaatctggcgattattttctgtttgtatgcaagcgcacctgagccaccaccagtctgcaaattttctgagagttccatctttcgagtctgatggtaattgctatatgaggctgagtctcgttctcggtcgacttgtaggaacacacctttgttggtttattataggtgtttggatttggatagttttggtcgtcacgcccgcgggttcgtgattgagttaacccaccatgcctgaccagctgctctgaaactgtcaggacgattgaaaatccagaaaaatgacgacaggttggaccattgaatttttgaatgaaaaaatttcccccaaaataactattgaacaaaataggcaattgaagtcttgcgtgaacgaaacaaaaatacgacttagagtgtttgggactgctctataaattttaacatagag

SEQ ID NO: 3617 - DNA, 5719 bp, Sorghum bicolor
tggcagggctcgcggctctggaggtagctgcgttcttgcatttcgcaaatcgatacgtctacacaaacaaagccgagctatgaatctgtgaaatactctgtgtatgttaaaagaattaatatgatttatctttttttttcttgcgtgtttcatgagaactaatagcaagatgatagaacatggattctaatcgctaaacaaagtttcaggagaaaagttcactaaacagagtgcagaggagaaacaacctcacattgcaaattagtattattttcactaaacaaaagataagtatcagcaaggttcttttcagttaataaaacataaatttatttcaatatagagagaaattttactatgcttagaataaatgagagccatctgttttgttagatccgatgcttttaaaatagaaagaaccagacgaaaagaacttaagttgtaggtcagaaccaaagaataagtggatccgaaactagtctataaataaataaggagggtataacactagtatttttgacattttcgatgctacttctttgaatcacaaaataaactgcttgtctgcttctcatctgcataggaataggagttgtttctcatctacacgggaacacgagttgcttctcaagtccgcgcgtgtgatctctgtctctcttatcatctcccagagctccgggctggcgcgagtggttatcggcgcgcggcccccgatgactggcgtgggggctctcttcctcgcacctcccttcctcgccccccggtgggcaagcctcgcacctccatccctctcctagcgcgtggagctgaccagtgaacaacgacctagagaattagcaaggcggtcgaccaccctagggagacacggtggtgaagacaatgccgacgcgactggcagcaaggcgggtgacgaagccgatgacctaggaggcggtgaggcgcgtgttgagtcggcgacccaggaggtggcgaggctagcagcgacgtagtgctcaccagcgcgtggccccccagctccctccctctcatagcacgctgcttcaggcctcgagttcaggcagtggcgtgtgcacatccaagtgagcggtggctgctgctgctccagctcaagtcatcggctcaatttcagcctacaagtctacgcgagcaagcaagcactgtagtctatgcccaaacttcagccgtaggcatccacattggcgaatggtgagctttcaggtcttaagaatatacgttgttgttgcatctatcgattgaagattcatttactcctagcagtagggcaggcggcgatgcagtttagcggtacggagcagttcgtgctttcatggagagttggtttaaggagtcgagaatatgtagtgtagaaaaaagtactaatctgctcttaattagactttttaactagaacctactgcaacaaaacagcctgccatggcttatcagccaaacgaccttacgggtcgttatattattagtgctggttatgacactttataaatatataaaacgtgtatgtgtcaatcgctttttcaatgtgataaataaattcaatgatttttctctatatttaattaaagttgagtatatttgacagagagcgagaatgaagtttagcggctggtatgccattcggccggtcctagcatgtttgactgtctggtactcctacaaaagacttcacgtgcttgagtgtttggtatactcctacaaaaagacttcaagatggcaggatcaaagcacagctggttgggcgtggatatgtgggcgtgcgtatgacacgagtgcgtttatgcgtcccgacataaaaataacatttttcccttgaacgaacttggtttgtatagctgagctcgtccacgtcaataatacgtatggcacgtttttttttccctcaagaaacactcgctgacggcagcaattaattaatagccaaatagggcgtcggaataaatactccaacaggtgctgcggccattctccagagggctgggacagcaatggagtccggcggcggtgagattctgcccggacctgggttgctcgtcacctccaaacccggcggtggccgtggcggttggcgtgccgccctcttcatcctcggtaatcatgctgattgcaagtcttcaaaaatgcctagtccgaccgcaggtttgcatgcttacacagttacactgtcactgttgctgttgctactaccatatctgcagcgatgggattctttgagcgtattgggttcgtcggcgtgtcggccaacttgatcatgtacctcaccgggccgcttggcatgtccacggctgccgcggccgcgggcgtgaacgcgtggttcggaaccgtacaggtgctgccgatcgtcggcgcgctcgtcgctgattcacggcttggccgatatcgagcgatcctggccgcctgtgtactctatcttctggtcagtttgcattccaaagaaagtgttctctctgtcccaaattctcaatcattataaatttttgagtctattttaagtttgacaaaatttatatataaaataataacatttatggtaccaaataaatattattagagtttttttatcaattatatctttatagtatactatttgatatcatattttttaatttttttttataaatttgattaaatttaaaatactttgactttctaaaacctttactgcccagacctttcttttactgtgcttcagcaaggctgtgaagagagttgcatgcgcaggatgcatctccttccaactagcgtgaggtccattgcccaaatgtactcttgttgcggcattgaatcgcgctctgtccttagcgtccaaaggcagttacatccccctccatggtcttcctcttttgtcccaagagtaccatagtcaacgtagcctcaatgctctactgaatttttccggctctatgatagccaatcctccgttaactgttggtgtgcagattggtggacctcatagttatggataaaaagttcatttgagctggtttggtggctttgttttaaatctgatctgattatattaacttttttgaaaattagaaatagctgatttagataaaattcagctttggctctacacgtggcttagtacagtttaggcctcctaataaagtagagtatattatttcaaagaaagcctagaaaaatgttcatttactttttgatccatccctcctagctagcgttcagcactgcatcatgtaatttgtggttatgagcggtatagtaatactaatatagtaatatcgtgtataggagtacttattaggaactgatattttactcaagtttttctttttttaaaaaaactggcctttagtgaggtaacatgaacgttgctatcttcgcagttggtaattttgggcagacatataaccaaaagtaggtatattctaggaccgaggcaataccaaatttgtcaatttattttaaaatatagggttttcaatactctcggagtgagattagagatgtcacttgttgtcatactttatcctttggatggtcatctgcttttagagtttcttcatattgacctttgagagagtttttctgcaattagtctttgcgtcgtgggtttgtataggaccacgattatgttgatccatgacacttgtcataccttggttaaactttgtaataatttggcctgagttcacccagtttagggtgaatgaagccggatagactttctaacctttattaaaaaaaatgtcggaatttgtacttgcacgcccacgaactaggaatttcctactctgcgatcataatggtaatcctgaattgggcactcagcctcataggcagcaactgcaaccatgtttggcaattgacacttgacactcttctaccatatacttcaatgattgattacagggcttcggaatgctaacggcctcatccatgctgccaaccgcgaactcgccgccgtcggcgtctcctacccggctcatcatcttctacgtcgggctctacctgctggctctggcgcaaggcttcttcgggccatgcggggaagccttcggcgccgaccagttcacgcctagcgacagcgacaaccccaccgcgcccgcgttccggagctcctacttcaactggttccacttctccatgtcctggggctacgccatcgccaccgccggcctgagctacgtcgaggacaacgccggctggaccatcggtttcggcgcgtgctggaccgcgatggtgctatgccttaccgtcttcttacttggcacgccgacgtaccatgccaaccaacccgtcgacggaggcacgatcactgctgagacagtgcagaagtgggccgcgaggttcttccgtcgaaaggacactactccaactgatgaaaggtgaacacgagcaaacatgtttctgttgctttgtgcagagggggtcttgtcctgacgaagcttcttcactaattgtgcaggctgcttctagctccacaacgacctgaggaggagcgcggactcatagctaagctgctcccgatatggctgacgagcttagtcttcgcggtcatctactcgcaaacgtacactctgttcaccaagcaggccagcacattggacagccaccttggcacggcgacgggcctcgtcgtgccgcccgctgcgctccagtgcttcatcgacgtcaccttcatcgttatgatccccttatacgaccgcgtcatcgtgcccttcgcgaggcgcctgaccgggcacgccgcgggcatcacgatgctccagcgcatcggcgcaagcatggccacgtcctgcgtcgccatggccgtcgcggcgctcgtcgaagtcaggcggctccgcgtggccagagacgcgggcctggtcgaccagccggaggtagctctgccgatgagcctgtggtggatgattccgcagtacgttctgatgggcctcgccgcagtgctgggtatggttggtctggaggagttcttctacgaccaggtgcccggcactctccgcagcgtcgggctcgcgctgtgcctgagcatctttggcgtgggaagctacgccagcagcttgcttgtgtccctgatcgactgggcgacgagaagcaaaggcgagagctggttctccgacaatctcaaccgagggcacctcgactacttctacgggctcctggcagggctcgcggctgtagaggtagccgtgttcatgtattttgcaaatcgatacgtctacacaaacaaagccgagctgtgaatctgtaattcttgaaacgactttgcaagtagaaaattactttgcatatgttaaaagaacatgtaaatcttcggttttaattggggctggcccaattttattcaactaagttcaaaataaatcctaaagcctgaataaaatgctggtgcaataaagtgttagtctcacgtggaatggctaaatgttaactcaacctagggtttgtttgggactagcctgctgttgggaagtagcgcaccgcactccccagcaacacagtgaaacgagaaccttctcacttggtgccgtgagaggctaaacagtaacgaacagtgggcttaacagtaggtgaatacaatgaatgctctccctgttcccaagtgtggttacaccccctttatatagggcacgggaaccgacctaacatgattacaaaaatgccccgtgacggtgggggaatatcccagcatattcctttgttacagtctactgaccctgagtcgttcgtgtaatttcacact

SEQ ID NO: 3618 - DNA, 5975 bp, Sorghum bicolor
tgctaatcagtgtcagcgcaccttgcaagttccaccacactgtggaagtgtggaatcttgagattcgaatctcgcttaaggcaaagtcatttggtccattggctgggtaggaatggtgtaattgatctttcagaaaaaaacactggtgtaatcaatgcatgacaactagattcagcacttatatcacacatatgatacacagtgcacatagaatattataggcattctccaagataagcctttgtcttatttttttcttgaacacttaggaggattgtgtatcatttcattaataggtagaaaaggtggtctagttacattctgattccacggcttgggttacttctgtcatttcattaataggtagaaaaaacctcctgtcttatatactatgaattacttctgtcatcatttatcctatggttacactaatacatttcagttttgtttgctgaaaattatattggttaaaatttgcagttaaatgagtatcagatgtgcattaaaatgtatggcaaatcttgttaagctcaatcgtttacactttttctttcaatcaactattttttgaaaataaagctgcaattgtgaatttatggcaaatctctttaagctcaatcatttacaccttttctgtagtgcctttaatttcttggttggcaaagatcacgtggttggtgcagacatatgaaatgctattcttgaaatcctcataacaggtagttgtaacttctaagtgctattctttgttttctcttgctatttttatgttttggttctagagaactcttttgtaatggttggaaccaccttttttaagtgctgattgctgctcctctgctgaagcctgacatgttgcgctcatataagtgatcaatagtttcaacctttgacatccatgaataatgtgtgtacgagcacaagcacctacagtgtagtccattataaacaataatgctctagaaaaatgttcacacattcactcatactagttttctcaatacagtgtggaaacgccaaggttccactgagatgggagcatgatgaaagaacaagtttcttttttgagcacgtgctgagcacatatttcattaaggaaacagagtttttacaatgaccataagaaaacaaaagaaagataaccaacagctattacaagcgacctacaacctcaaagatgaccaacgacacaagacaagggactaaccttgcaacctagaaacatagacaagagaaagtgtgcctcacaaccaaccatgaaccatgtccccttactgattttgtcttcccttgtggctaagcacaaaattaccaacagtgccaggggcatatagcatggttttatgatttgttatgaagctcgttgattagaagtctaacagaacacatgtaattagttgcatgactactggaaaacactatcacagatagacagcaatcaagggtggcaactctggaaacatttacatcagaacaaagcctagtggaacagccatgattagaaatctgggtacagttgaaatcattttgtggacgaagcacacatgcggagataaagagaactcatcattgtggattcaattatcagaatgcaatgggcttcctgtacatacgaatgtgacttaagaataggagagccaatcatgtagaccaggaactagtaggcacaggcccttctaggacatccattcctttcatgaatcggactcagcataattctataggactatatatatgccagattgtaaggccaacttagagcagtcaaatatatgtgaaacatccaagatccatccagaattgtgctgcttatctagatcttggagccttggaggcaccaatatgatgtgatggaatctcagcaattccctcgaggagttcacccaaacacttcagaaccagccatagagcccatggcaagacccaaaaggcctgatatgatggaatcttggcagttccctcaacagcaaggagttcacccaaacacttcagaaccagccatggagttcatggcaagtaagtcatacatacccaaaagggcagattttgcagagctggtgctgcaaggtccagagcctccaagcctgtggtatgttctcattggcatgttaagaaaaacagttcattaccaaagcgcagataagcatttcgcactctctgtgtgtgcaatgtcaattctgcatggcctgtttccaatacttgaatggtggaaaagctacagcctgaagtccttccgtagtgacctcatggctggtctcactctcgcgagccttagcattccacaggtgacacttttttaattataagtaattgtgttactatgcagtacatatatagtacatatacagagattttgactaactttatcagattgatattttctagagcattggatatgcaaatcttgctaaactggatcctcagtatggtctttgtaagtaaaatcacattttttgcttttctttctcttttgacgttcttctgacctacctcaacttgcttgggactaaaaggatttgttgttttttcttttgatgttcttctgaataaatggttttgttgtttgtggtaagatacaagtgttgtgccacctcttgtctatgctgtaatggggacctctagggagatagccattggaccggttgccattgtgtcactcttgctttcatcaatggctcaaaagatagctgacccagtcatcgatccagctttctatcgaaaaacggttttcactgtgacatgctttactggtatcttccagtttgcatttggtcttttcaggtaggccttttcggtcttgtgattacaatgagcctactttccttactttcactaattagtcttttgcattgatcctttttgaggttgggattccttgttgattttctctcgcatgccgcaatcactggatttatgggaggagctgccattgttattggactgcagcagttgaagggcctactggggcttagtcatttcacaagtagcactgacgttgtatctgtcatcagagcagtctgggtttctgttcatgaaccagtaagcattttgtgcatcttttaactgtgaatggaatagaaacattgcaatcaaacttgtcgatggttatgcatattggctaatctatctcttttatgctatttcatagttccattaccagtgggagcaaattagctcttactgtacaccgtgtactgcaaataaatttatgtagttaaaaaagtcctggtgataagtaagaataagaggagaaagctgaaatttcagggctagaagtaagagaagtttcaatatacactgcagcgaaagtagcctcacagtgtctcagtaaagagcacacttcatcttcagttactgaataatttaattgcagcaactgtgatgtgtaaagtagtatttaattaataaaaaagttacacttaatcatatatatgcctaatcaatctccctgtggaaatttaaaatctctgtaacatgcacaagaatatttgtcttgaatcttgatatggctttcagttacttgtatggttgctatgcacgttttaatatttgtttgacgtattcatatttcttgatgcacattttttacaaaatttgttggttttggaaagctcttttttaattaaaatattcgtctggcatgtgatggcagtggcatcccgagaacttctacattggatgttctttcttcttgttcattctcggcatgaggttcatagtaagattatccaactgtcctcttgcttgtttgtttatatgttcatttgtatgtacataaactcttattcccatcttaattgagaggcagagcctgccatgttttcaaataaataaataaattatgttcatttgtttcttttcaatacatgattaaaaggtttgggggaccataatttcagggtagaaagaataagaagcttttctgggtttcagcgattgcacctgtgctctcagttgcattgtctactctcatggtctatatgacaagagctgataagcatggtgtaaagatcatacaaaaagtggatgccggcatcaatgcgagctcaatcaagcagataaatttcaatggatcctatgtttctgaatgtgcaaagatagctcttatttgtgctgttattgctctaacggtatgcattgctgtctgaatatattaaactgcagcatagaacaatgtaagaaatatctcataatatcgcagtggagtagattattggttcaagttcagctgtcttataaacagacaagtacacatttgtaaaattccaagtcccaacatcaaattcttctctgttgtttcttgtaggaagctatcgctgttggccgctctttttcagtcataaatggttataaattggatggaaataaggaaatgcttgcaatgggcttcatgaatgtagcaggatccatgtcgtcttgctatgtggcaactggtgaataaaacttctgtgctatatgttcagctgttaacttttgttcgacaactacattactatggtcattgtctgcagggtctttctcccgcacagctgtgaacttcaccgctggctgtaagacaacaatgtcaaatgttgtcatggctgtcactgttatggttgccttggagctgctcaccaagctcctgtactatacgccagtgtctatacttgcatcaatcattctatcagccctcccagggctaatcaatttccaggaagtctgcatcctttggaaagtcgacaaattagatttcctcacatgcatgggatccttccttggtgttatattcggatcagtggagattgggctttcagttgcagtatgattactcattcaagctcatctttactttttgttttgattcatcaaagaatgcatgcactcatggagactttgcagattgttatctcctttgcgaagattgttgtgcactcagtctggcctcaagtcgagatccttggtagacttcaggggacgaacatattctgcaacatggaacagtatccaatggtttgtcaaacacctgctgttctggccatacggatcagcacctcgttcctttgcttcatcaacggcaattccatcagagagaagtatagatataccctaacttgcaaggttacacagggcatagtttggatacacttctgatattatcaatatttcttgttttcaggattactgggtgggtaatcgataagcgtgacgcaatctgcttggtcgtccttgacatgtcaagtaaatgaatttccatgtttgagttgagaatatattttcacactcggtcataagcccacatttaccctgtctggtatgtgtgtccccggcaactggcgtgcagatgttgtgaacatcgacacagcaggacttgcggcgctggaagaactgcgccaggagctggtgtcttgtggcatacaggtgcatgccctgacactcgcacacttaagtttgcacaagagagggaatacaaccattcgaagtttcttggtaaaataatccgcttctcttgttgaaatgaaatcaattattcacagatggccatagctagccctggatggcaggtgatccacaagatgaaactagcacggctcatcagcggaattgaagactggatctttctgacggttggcgaagcagtagaagcctgcccggcgaataagaagggtagtgacctagaatgttgaattcgccaagaaagggacctcatgtgggcccgtttctgaactagagtatatgagtgtggtgtggtatagatttctatgtactctgtccagggcagtgcagctctgcgacatctgtcaaaggcacctggagcaggcagaacagaagcatgatgcgttctgcatagaataaggctatgtgtgcaatgatgtgtgtgcgaattttcgcatgtcatcatgatgcgagatgcgtgcgtgcgtttgtttgtgattactgattagatgcgtgcgttctgcgacatctgatcagcgtgcgtttgcgaacacatgcgaagt

SEQ ID NO: 3619 - DNA, 6318 bp, Sorghum bicolor
gaagcattcatggccacttttctgcattgctagctaattcgagtaatccgtagttactaatggcttagagagggatgtgctgggtacatttatttatccaccctaaccgagtaaagattttctatattgtgactcttttgcgttggaaatttggaaggttgcgttcttagggggattattgatttttcttatcaggtgggggattattgattttgttattgactttactaaggaatacattattgtgattctttttgagaaagattggttgctttatagacaatttttatctcctggttaatgatttaagatttagttttttatgactttatttttttcttaaaaaaatctcaagtaagtggtcaactctcgattccatatgctgtctaatacatctatgtataggatgcatggagtacaatttgtttatttcttttctgagcagcaagcaatagatgggtacatttttttttcgctatcaatggcctggaaagctctgcatggtatccaccacacaatggctcactctagctctacaagctactcctcccccttgcgctgctgtgtaccgaaagcgacaaccatgctcaccagcaaccgacacaatttgccgaggaaaatggtgatactcccccatctctgtgtgggcctctacgtacgtggttaaaatagtaacatgaaagtttcctcgtggctttgcttgctggacggtgcaaatactaactaccggtcaagaatccgggtacagtcttggtcatgagggcccatgcccactaattaaatgcttgacagccaaatttgagttattatcaggaaaaattcccacgcatgtactggatgcaaactgaaagccagggaaagggggctttggagcttgctctaatgacaaaaatggacagctttaggaacagtgccgttagagcttgctggcttgtccatgatttccagctgttggatcacacataattaagacacacaataaagcatgaatgttttgagaaaacaaaacaaggggggcatttcagtataaactgtgaggggcattataaaatgctagaaaagatacacaattgtcttgcgttggtaaatctttgggaattcttgcccttagaaatttgaaatacttgggctgtatatatgcgaacaaatatagttatgagttatgaatttaagatatcgtgtgtatatgcgcaacaaacaatttccgtgatgctaaaacacaaaagatgttatttttcttatacacaacaaaagtctatacgccatgatgactaatttacaggtagatataactacatatcacgcaaacttaaatagtgacatgttttatttgtcgcatacggtgtcaccacattagaaaacaaggtttctacctatgcgcgacaaaaaaaaaacacttcatgtatatacaagcagtacctgtaaagtccacacaagagttatgtcatatttcacattgagagtttaactgcaagttttaccttaaagcactatatatttttagaaccagtttagcgagccagaaatatattacgcggcggtgatggcaccacgcatgcctttcagagaaagaaaaaaagatttatatttttgacaaataggaaaaccagggtgcagcaaacttgtagacatagacttgttgacgtgactcaagaaaacaggaagaggcgtttttctcatgttttcccatttattgttgtattttgttttgatccaaatttccatcggtgtcgtgttgcaaccttgaagagagagagaagggtttccagagcggcagggggggctgcctgccaacccctctcctctctctcctcccccctacgctggctgctctgcaggctgcaccctaaagcagcgagcctttttacctctcttcctaccaccccacaccgcgcacaccatctcctcgcctcgcctccacttcctgggctacgtatccatccatctcagtcacctcgcctcatcctcgattgcaaccctcactcgccagagccgccgccatgtcggggctctacggccaggggttctcccctgcgcgaaacctctcccctcagattagaagcaatccggatgttgataggtagagcggcgcatggatttcttccctgttttgttcagcgattgctgatgccaagattgcttctttgccccccttttcttgtttggttcaatcgattgatgatactgtgatagctttgacactgatgagtgatgattcatcggtttgtttggtttcttgtgcagtcagtacttggccgagctgctggccgaacaccagaagctggggcctttcatgcaggtgctgcccatatgcaacaagctgctgagccaaggtgagatcctttgatctccgccttgttgtttcctgcagtcccagaatgcccgatgagagttctctttagttacgagtgagctcttcatctgcaatcatgaattggggactgatgccccccaatgcttggatgagtactcagtttggttggcattggattctacttctatgcttatgatctttggtcctcgctattccttatgtttcgtcggtttagatttgtattgccaagcttaatccattggttagaatagatgatcggacttctgggagataatgccaccttgctgatcgatctgactgttataatctataatgttgatggttgaggtcaacttcttggtcgaaacagttgtggcttatggtccattgatatttcgtatgcttcaaaggattgaagattgtagttgatcttaacagaagcacacaaaagcaatgacaaattaagctcctgtattgtgctagtgttagatgttttggtggtgatcatcatatgttttccactgcacagtaccagcaagaggatgaatcaatatcacacagcatacacataactactttacttattggaaacaaaatttctgacctattatgaacagttttttgtgaacgaaattgcgcttcctataatacagttttttcctattgctaatgctggaaatgctggagcctttgtttttgcattgaaatgcctttttttaatgggtaattgtgctctgtcagcttactctactctttgtgttcaatgcatattaccagaccagtcttttaggggggttccctttattttaaccttgtagattgaatagtgcattgactgatcaagtgtccattgattgacttcggtgttatttggttggaccatcctgtaaaaacaattttccttatagctaagaggccatctgtatattgcaggcatagtaaggtgatttatatgcacattcttggtatttgctaataaatttttttcttgttggttctcatggtgtagtgggagtgtcatcttctgacctctgttagcctagttctaatcaatgacttatctattttttattatataaatgaaatgatcttctgagttctgaccttcagtgtacacccagagattatgttctgagttctgacctttgttgtacactcagagattatgcgggtatcaagcattgtccacaaccatggatttggcgatttcgacaggcatcggtttagaagtcctagtccgatgtcttctccaaaccctagagctaatctccctggcaatgggtttagtccttggagtggactacaagaggtaacacttcagaatatatttgcaatcaaatgggtgactcttctgtacttcatacacaaatggatgtgctttttcctttgggaggcctggcccttgtcattgataaagatgaaccacatatcttcttgtaattggcaatgatatttcagagtcatagtgaattaatatggaaattacatgcaagatgtactggcattcagtgtgtgtgtgtgtttcacaaatactgataaattatgttctttcgcctttatgaacaattcaaaagagattaggttttcctcaaggaactagcatggactggcaaggagcaccaccaagtcctagctcccatgttgtaaagaagattcttcgtctggaggttccagttgattcttatccgaatgtatgccctccaacttgtgcagtttctcttgaagttcacacaaaagaaccattgagctgttttaagccttttgttgatatattcttctcttctgttccagttcaattttgtgggacgcattttaggacctagaggtaattctctaaagcgcgtagaagcatccactgggtgtcgtgttttcattagaggaaagggttccatcaaagatccagggaaggtaagagaagtttctgttccttttttttaaactaaaagtttctgttcttttttacatccaccaaattaaagtcctgttgcttatttaactctcaggcaaatatgttgttcgggagcctttgaatcccaatttgttttcttgaacttttaatgctgtgatcgaaatacctctcatgtgtctaaacagtatctttcctacaagtgttcatggtttctctgcaatataatcaattacttttacaacattgtgcaatgtacttctagcctggcttacctatcattcccttgccactagcataaattgttcttctatctctatttgatcctgctgatcagacatatgttttattgctctgtttttgcctatcctttcctgtttctgcttcattgcaacaagctttacctacatggctttatgatttttcaaggaggacaaactacgagggaaaccaggctatgagcacctgagtgatccgctgcatatcttgatagaggctgagttccctgccagtatcatcgatgcaagattgagacatgcacaggagattatagaagaattgcttaaaccagtggtgagtgatttctgatttgtatgaatcctattactctgtgtgcacatcatatatctatatctgctagattattgtatgacacaccttcctgctgcccactggaacatgtctgtacctcaacttgggagatacatttttgttaggctaggtcttattctaaaagtaccaatttaaatgtgggacagagagtttaacataacatagatttttttagaaaaaaaaaagtgaagatcctttacacctgccatatcattcatgcctaggtgagaaaaaaacaccggtgacttaactactactccacacttctcacataacttttttcatgtactttgcctaccgtttattgatctgattcttttacttgttctgttctgaatctgaacctgtatatatatttgtacatgtgtataatcgcttctgaattattgaaaaattctatatattatgacttacaagatcatattggtatctgctgcaggatgagtctcaagatttctacaaaaggcaacagctcagggagctggcaatgctaaactcaaccctgagagaggacagccctcatcctgggagtgtctctccattcagtaatggtgggatgaaacgtgcgaagacaggccagtagaggaacaactatgctctcctacctggccctgtccacttgtgttatgctgtcgtcgtgggaaacgccatgcctttgggcaatgtttgccatgggcatgcgtgaaggaagcaatgtgccttcactagcggagtccggtatcagctagttttcacccttcagacagggggaactgctgggaagatgagatagtcgctgatcgttggttgggtccagcgtttggttgttgtatggtctagaacattcgttctatttgttattgacggttaaccctagtatgtggtggactggtggtatgctggttaactgcaaactgcatgataaactagagaggcctgagtatgtgagctttaggtgctttattgaccttgtattataacctttaacattatggagttgcaaaaataaaaataaaaataaaaataataaaataaaataaaaaaggaccatcagctttgtattaccttatggtatcttgcttgctcactgggaccgtgaaccttaaattcctgaaatgccacaatccgtgatttcctatgcctagtactccctccattttaatttataagacgttttgatttttctagatacatagtgtttgttatacacttagatgtacaccatatttagatacatagtaatatgtcaatacatagtaaaagtgatgtatctacaaaagttaaaacatcttataatttgaaacggagggagtagtttataagataccatcctctgttcttcactgtaagatccacattattgtaagatccacattactggagcaatttcagcctttcagcacatttttaggcgattcattcagggatgtttggctccactcgattatatttgtgtaacatggcctgcgtgatgttgttggcttcctggggcacaggaaggcagtgg

SEQ ID NO: 3620 - DNA, 6542 bp, Sorghum bicolor
ttaaagaaccatgtaggaaagataaaggaggagagaaaaaaagtgttgttgggcaaggggtcaatggatctatatgcaagcatgtgtaattaggccagcatggtatcagtgtccaaacaacctcacaatgtcatgagggggccatttaaacaaaattagatacttgaacagctgcagatcatgtttcatagttgagaagagttatacagtcaacttttcatattttaagatgttaactttttaatatgttcaatgaaaccactttcaaaaccactttagaggattacttagacaacttattaagggcagaatacgtggctttataggtgagtaaagtagacaactaccaatgaggggttaagttgacattttttcgcatagaaacaagctaaggccagtctcaatgcatagtttcatgacacatttaccaagactataaactaggtaaccgagtcacatgagtttcatggagatgaaactcttctctcatctgataaaactccttcatttagtgactctgctaagtcaataatttttacttatgtggcactctatttaatgtgcatgacactctcatgaaacatgcattgaaactagcctaaaatagaccaaataaacacaacactagactgatctgaaatgctcaagaatctccgggagtgaatttttatccatgcctacgctctgtcacaccaccaactaatccaatacatccatccgataatcttaccatcatgcccacctggtcaagaatgtcgccacaaatccttgcctgcctagtgtcgcccatgccccgttgccgtcgtcgatccgaatctctatccgatcggccgtcgctggattaatttgcactgtgggtctggggctacgccggcggctaccagatcatcatgtagcgccgttgcatgcagagcaacgaccggggagttgtatagccagtagtagcgtaggccgtttggaaatggataatggataattggatatactgctttccttctgtatttccacctcttgcaaggagtagctcattaccagtacagtacctccagttcaattctggattcactttgggtaaacgctcacaccatttcccgtaacgggccggagaacaacaggggctcgagcacagagcagaggtcgtcacttcggccggcccgtgctgcgccgtcgccggccatcgcgtacggcgcgcgggcgaagccgtacgtacgtatcaatatgggttcatgacacgccacaacgtaacaaagactcgagcaacggagcaggttgcgagcaacggtataataacggcgtactatgtcggctagaagtaacagctaccaatactaccggtaacaagcacgtacggcagtgacaccgccacgggcaaccgtgaagggcgtcacttgcatcggcagacacgcaacgaagcaacgtaacagcagatcagccaccaacgcaacagggttccgcggtcgactgctggctgcaaagtgcgcgctagtgatactatgagacccgccgcgctccgcacggatcgcgccccgcgagagctcagaactgcgttgcgctctcggtcggttccggccttgccttgcgctgcatgcggaggcgacgcgctcgctggctgtcagtggctgggttcgcgtacgcggcggcggcggcgaaggcggcctggaaaaagtggacggccgggttcgttggtgctactatgataactgaccggcagagtccagagacgagctcgagcgcgcgccgggtctctccttcaatttctcccatgctgatcactgacactcgcctggcctttcactgtggcagctgatcgtctcctgataagcaagcgccgcacggcaacggcacacgcgacgtggaggtgtataagtacgggtgcgtctcccgctgctgcctgccgcgacatctcccgctcccgctccctctcgctctctcgccggtgcgagcgctgagagctcaggcgaggagcgtctagctagctcagtacctggttgaagcagagcatggaggacaacggtgccgctgccgccaacgctgctccagcgacgagcatgctgccagctgccgagaagcacgtggcgatccctgatgacgccgcggcggcggcggcagctacgaacgctaccgccggcgaggagaacaaggtggaggaggaggacgcgccggagcccgcattattggcctgcgggccgaggaagacggggctccatcttttcgtcatgaacatcaggtacgtgcgtttgcttgtgcgcaggttgcattagcgaccgaaccattgcttgctgatcaaaccatgcttgaacgtctgacgaactggttgccaccatacgatgcgatacgacaggagcgtcttcaagctcgacgacctcggatcggaggtgctccgcattgcagtgcccgcctcgctcgctttggcggccgatccgctcgcctccttggtggacacggcgttcatcggccgtttaggtaatatttataactcctgaactgatgaaaatcttcctgctcccatcttatgctttcaaggtttcatctgtgtacatacattgccgtggctgcaccaaggtcacttgatcactgggttcagttcacaaatcacaatcgagcccatcacaactcatttcctcttacatgtcagtcttgcatgtggtgtgaatgcatatccgtttgccttttgcagttctagtgaacattcgctacttctttcccttttgtcattttggtaaagtaaccaacttcattcctgctgaaatgtgcctttcagttttcagttttatatatatactatacatagccggcaaatcgaatacgtacatgctaaaaacatccaagacgtctgcgcagtgtgctctcgaacgtttcgtgtttactgatgatgctcaccatgtcgttttctgtttcatgtcaatgttgttgacatctgactcgaatgtcttcacctagaggagctacagctgtcattatttattttttttcttttgacggcggaaaaccctgcttttataaagcacaaataggtacagcattgctgggattaacagcttacactgaagagaacaaaaaggccgtggagtgcaacggcaacactacctccacaacaactaagcaacggagcttaccaagctcaaaacactctaccagaaagataagataagcaagtgacaagccataactacagctatcattgttagattcccttctattcctgttcccttctttctccttaagcttcatcgccagaaaaaaaagaagaagaagacgttttacccattatcacaatagcgtcctttctgaatcttcatccacgtgtgctgccgttttcttgttagaattgatcggttgcctcagataggacctagctagtaatatatatacgccaagggcatcctttctgttttattctcttttgattgatgataagacggttatcgtttccttctggtcgaattgtaccataggcctatctcactatttgttttcccatttttacacttctatgatttataactaggaccagcaactttagtttgccattgaatatttatgctagttgcaaggcataagtggaagcactcagccattttcagaaatatactcgattacatcaatatcagctcatcattactagtctaaaatataataatgctatcgaattaatctgtgtgcaataattggaatggtcaggttcggtggagattgccgctgttggtgtttcaatcgccatatttaaccaggtctcgaaagtctgtatctaccctcttgttagcgttacaacatcatttgtcgcggaggaagacgctatcatcagtaaagctatcgaagaaaagagcagtcaagacctggagaaagcttcccatgtggattcagaaaccaacaatttgcctgcatctggtacctagttcttggaaaatatttatatggtttcagaatttgagccgtaaccacctctgcgtttatcgtcgttatacctaatgctaaactttatttctaggtcctgatttggcagaatgcgtgaactcatgcatccccacagagtgtacagatctccccaaccaagggtgcaagaagaggtacataccatcggtcacgtcagcactaatagttggttcaattctcggactgcttcaggctgtcttcctggttttttcagcgaaatttgtactaaacatcatgggtgttaaatctgtgagtgctattatttatattaatttccctgatcaagtttattttgccagcctattttcatacatcatataatgttttcatccatttatgttgtggtattttagggatccccaatgcaaaaacctgcagttcgctacctaacaataagatctcttggtgcccctgctgtgctattgtctctggccatgcaaggggttttccggggattcaaggacacgaagacaccattatatgctactggtaagaacaaaaaacactgttgcacacctgtagtgccaatgaaacagaggagctgttcatgtatctgacattgctaactttttcttttcagtggtcggggacgcggcgaacatcatactagacccaattttgatgtttgtttgccatatgggcgtcactggtgcagctattgctcatgttgtttctcagtaagtttcagacaccagccacacttgcagctagtatctgttttccccaagagaaaagcaacagcttctgtatttctatgataagcttatcctgacctttttctctccttattgcaggtacctgataacattgatattgttgtgccggctcgtccagcaagttgatgttatcccacctagcattaaatctctgaaatttgggcgatttcttggatgtggtgagataccgttggaatccagagaccggataacatctctaactaacgaacgtatcctgaaaaaggagactgaactttatttctgtttcaggattcctactgcttgcaagggttgttgcggtgacgttctgcgtcacgttggcggcgtccctggctgctcgccatggaccaaccatcatggcaggcttccaaatctgctgtcagctctggctggccacatctctccttgccgatggattggccgtggcaggacaggtcagattacagccatgtagactaggtgatgtagtacgtttcatagccaaacagcatgttacgaactaaatcctgctgtcaatgatcaattgcaggcagtgcttgcaagtgcgtttgccaagaatgacaagaagaaggttgttgccgcgacgtcccgtgtgttgcaggtaaactcacaatagggcagcaatatttaccagagatctttgccgatcttttttccttcatcagcaactaggtgccgtgccatgctaatggccctcttcctgttcaccttgcagctgagcattgtcctgggcatgggtctcactgtcgtgctgggacttgctatgaggttcggggctggcattttcacaagcgacctgcccgtgatcgaagtcattcacaaaggcatcccggtaagaacgagacctgcctgttaaaagggagcccccatatgtaagcatttcgcaagattcagacactgacagtttttgtttcatctcggttcagtttgttgccggcacacagaccatcaattccctggccttcgtgtttgatggcatcaactttggagcatcagactacacatactctgcttactccatggtaaacctcttttcacatcttctgataaaaaaagaaaaacccgtcatgtttcattgtttcagctctgaaactcttcccaacaatgaacccaatgaaaatcttcaggttgctgttgcgtccgtgtcgataccatgcttggtgtacctttctgtgcataacggattcatcggtatatggatcgcattgacgatctacatgagcctgaggaccatagctagcacctggaggtatgatactactctcttatcctccatcctcactctatggtagctgctagctctggccactccactcatctaagttatgttgttgttgctcctatctgcaggatgggggcagccaggggaccatggaagtttctccggaagtgatgatggattggcttcgaagatgatctgtggcacactgctgatagataaggctgcacaggcgcctctcatgtagcatcagcatagtatagtacgtgttctgctggtgttggatatcggaggtagatgtagctatgggcctatccgtttcctgatcgtctgacttgtggccttgcgtggagagtttacgttgccccttcgattcatgttgtatcacgccaggatggcagttttaatactgtaccatgcatcggtgtctttctatagtaattccattcttatctcccttatatttatctttctgcaagctatttttttccttgtttgagacactgcaagaactgttttatcgtgtggaagaagcaaaacaacagtgctcaaagagatgtggagtacaggagtcctgagtgccagttcagggtgctttaatttgttatcgggaaccagacaatccgataacaatccatactttaaaccaacgggaggctaagactaccatcagt

SEQ ID NO: 3621 - DNA, 5992 bp, Sorghum bicolor; identical to SEQ ID NO: 3610

SEQ ID NO: 3622 - DNA, 4083 bp, Sorghum bicolor
taatgctttatacatatgtcgaaagattttatgtgacaggaaaatttgaaaactttttgcttcttggtgaactaaacaaggccataaggccagtcttaatgcatagtttcatgacacagttaccaagactataaactaggcacctgagccatatgagtttcatggggatgaaactcttctcttatctcatgaaactccttcatttaatgaccctgctaagtcagcaattttgtttatgtggtgtcctatttaatgtgcatgacactcttataaaacatgcattgagactggtctaatgtgccgtatcattgccgcgcccctgtcgtcggcgcatgtgtctggcgctgcgcggtggcttggtctccacgtacgcggggcgtggcactggcataggggatcaagggatggtacctacgcataggctaaccgccggagcaacagtacgatattctttttaatttcgtacgagtagtatataatttttgcgtggcgaattccggggaacgagaggatagatagggatgctgaggcagcgggcgaatcttctggatgtatgcccagcgtgcgtgcatgtggccgcaccctgataggtggtcgcgattccgacgaaatgcatgatgtgggcggtactagtgggttatctgcctttcttgtgctcgtctgccgtctgcgtgctgcaactgcatacacgaatcctgtagcagtatctacacagagagtacagtcgatggtaggcaccatcgcttaaaaagtcaggctacacgaatcctctcggtgaaagaaacacgttactactccacgcttgcatgcattcataacacgaatcctctcggtgaaaggaaccggttcacaaggccgtgtctcgtgaagaatgaataaaatgaaattaattcgaaccacgggggagagtaccactgattgacaacgcatgcatgtatctatcacctcgccctttttcctgtcccccgccacgtactagagacatgtgtaattcatttcctcatcacaaactaggccttgtttagttctaatttttttttgaattttaatactgtagcacttttgtttgtctgtggcaaatattgtacaattatatactaattaggatcaaaagattcgtctcacgatttacaggcaaactgtgtaattagtttttattttcgtctatatataaagctgcatgccacaagattcgatgtgacggagaatcttaaattttttttggttttgccttgtttagattcaaaaactttttggattttgacaccgtagcattttcgtttttatttaacaaacattatccaatcatggagcaattacgcttaaaagattcgtctcgtaatttacaagtaaactgtgcaattagttatctttttttatctatatttaatgttccatacatgtgcctaagattcgatgtgatgaaaaatcttataaagttttgggtttttaggtaaacaacgccttagggagaactaaacaaggcccagtactccgtagtatgccatgcacccgctccaaaattcccatttagcccatgcccatggcagcatctgcatcccgcgccggtgcggtgcctgccctgccccggcccccagccatgaaaaacggcgctgcacgtacggccacacaagaaccacgccgcccaagagcaaaccgcggcgtgcaaaaggcatccggtcccaattcggctgaggtcggccgtgacgccacccgcgcgggcggtcccgtccaatcccattcccatcccggggcgggccgctgaggtggccgtccacgagcctcccccaccttccgcgaacccaccacctcaccgcgctccccccgccacacgtgccctttcctttccctcctcccgaacccacctccgctttcccgcagccgccgactcgcattgacccctatcccccctcttcccccccgcccgaagcttccagaccgcccgcgccagcgcccgccgctatatatctctcccctgcccgcggttctcagcttcaacaacaccgcggaaaccatccacaggacacacagagccgagccacccaccatcgacagcacccagccgccggagcgcgagcttctttacacagcaggccggagaaacacaggcagccaaagccgccaccgcttttaccgaccgaccgatcggtgttgccgccgcctgtcgggtttaagcaaccaaccagaccaagccatgggattgccggtgatgaggagggagagggacgcggaggcggagctgaacctgccgccggggttccggttccaccccacagacgacgagctggtggagcactacctgtgccggaaagcggcggggcagcgcctcccggtgcccatcatcgcggaggtggacctatacaagttcgacccctgggacctgccggagcgcgcgctgttcggggtcagggagtggtacttcttcacgcccagggaccgcaagtacccaaacgggtcccgccccaaccgcgccgccggcaacgggtactggaaggccaccggcgccgacaagcccgtcgcgccgcggggccgcacgctcgggatcaagaaggcgctcgtcttctacgccgggaaggcgccgcgtggggtcaagacggactggatcatgcacgagtacaggctcgcggacgccggccgcgcagccgcctccaagaagggatcgctcagggtaagccgatttttttcaattctcggaattgaagatgatccctttgatttgatttgtgctgaatgaatttagcttgtactaattctatcttcgatcaatttgcttgtgcagctggatgactgggtgctgtgccgcctgtacaataagaagaacgagtgggagaagatgcagctggggaaggagtccgccgccggcgtcggcaccgccaaggaggaggcgatggacatgaccacctcgcactcgcactcccactcgcagtcgcactcgcactcgtggggcgagacgcgcacgccggagtcggagatcgtggacaacgacccgttcccggagctggactcgttcccggcgttccaggacccggcggcggcgatgatgatggtgcccaagaaggagcaggtggacgacggcagcgccgccgccaacgccgccaagagcagcgacctgttcgtggaccttagctacgacgacatccagggcatgtacagcggcctcgacatgctgcccccgccaggggaggacttcttctcctcgctcttcgcgtcgcccagggtcaaggggaaccagcccgccggagccgccgggttggggccattctgaggctgaggcgagcgaggatggagccatggatcaggagaagacagcgttgcaaggttgcgaactctgtaaatacagcataggagtcgaacctgaacccgactctgaacctggtcggggttacagggttatgggtgtcggtgttagcgtacatggagccggccggcccagtgttggcgaggctcattctttagtttcactttcaacgcagaagacggtagatatatgtgtagctgttcactttcatcacttcctcttcaacagaaccgacgaaattttgctgctcttgttaacaacttacgagtactaccgtgtgtccgtgtttgtgtctcccctgccccgtgttgtgttggtatgccgcatgcctgcagctactgcggtgagttgcagcagctgcttaataagcattacagaacaaggaaccacttagtagaattttgccacttaaggccttggtttgaatacatattacatgcgtagaatgaattggggtggaattaaattaagttatgttctaatccattgaaatagatacacgtgcatccaaggcctaaacaatgttctacgccatttcgcgcgtgatccactccaacaaacgtttggaatgaattttgggaactgaacaaggccttaatcagcaaacggatgatgtggtctgccgtgcatgcaacgtggtggtagtgtctcaatgcaacggacacacgtggtacctatgggtattggatagaacatcccctttggaaaagcgagttctgcaacaaacagcgaaccagctaaactcaaattgggggagacttttgaacatcagaattggatcaatc

SEQ ID NO: 3623 - DNA, 8791 bp, Sorghum bicolor
acaaactaacaattctatggcatactagttcatcaacctttgctcatgctcgagtgacaaatttatgtgatacacattaaaggttcatgaaggaatttgatgtgggctaatcaaaattgcttttctttttatatatatatatctctgtttcccacaccataatcgcatgctcacaccgaagcctcatgcagccgctcttaatcatgctcctttaatctcctctaaccttggtgttgtcggcaaatgaatcgaccactaaacccacctcactctcaaacacgtcgatcatttcctctcctcctacattgcccaagtgctcatcaccacggacgagcttgttctcaagaggaccaatttggccaatgacgtagttgtcctcttcgtcacaagaatccaaatcgagcctagttcattccacataagacgactctccctaaacgggggaaagtggagcgactgcaggaacacacggtggagtgactcgacgtcatcacggtgcggtgagactaagtgtagctgattgagcagcttttgttcatggacttgagcagtgggttggatgtatagacggtgcgacgatggagccagaataaacgcaaacaaagaaggcaatgtcgtaattagttgcggtccatccaaggcgctgcgctcacgtgagatagatccaatatatgaaggagcacctcaggcaacggagattattggattttttttcttaaacgatggagactttttggacaaaggaagtatgtcgcaattattttgtatcaaagtaaacacaaggcaaagcctctttggatccctacaaaactagttaggtgcaaaaaaatagttgaaaattctatttgaatccttgactaataggctgagctattgtgttacctaccatccaactatcggttactcgtagctattaatgaatttttctatgtaacacaggtaatagttagctaacaattacgaagtaactattaataaatttatctaatgcagctaacatggccggtggatccaagctgccttagctgtattgacgaatcgcaatcaagtcgatacaaagattttttttctcgctaattgctcgctccaaaggcttttttttttctgtgactcctcgctccaaaggctgtgcacacatcccaggtcttgtttattttcatcctaaaacctaaattttttaagattttttgtcacatcaaatctttagatgcatgtatagaggctctgtttggttccaccaactaaattttagctagctaaactttagtcactttagtagctaaaggtccaaacacattgactaaaatgaactaaaatagtttagtaccattagtcacccaaaagtaactaaaataattttagctagctaaaatttagcaagaggaaccaaacagacccagagtattaaatatagataaaaaataaaaattaattacacagtttggtcgaaatttacgagacgaatcttttaaatctaagtagtctgtggttagataataattactataaataaataaaagtgccacgatatgtcacaaaattttttacttcagaaactaaccaagcctccaatagcccttttgccaacaaaaagaacacgttgcgaaatcgtgcagcggccagctcaaaacccactagcggcaggccggcagcggcgcacgcacgtccgggtccggcggaatccacctcatcacgtggacttggcagaatctccgtgcgcggcgcggtccaagattctgaccaccccgctcccaaacccacatagagtatacccacatcaacccaatggcgaaaggcccccacatactcgctgccccacacgtcagtcgcccctggacagctgcacggctcgacccacaccgtacgagccaaaatcaccagccgcctcgtggtgggggcgccactagagccaccaactaacacagatccgacggccgagatgccgtgattagcctgcaaagccctaattagattccccttccctgcctaaacctcccccatttcgccgtccgtgacgcgagagacctcttcgcaccccgaggcggcgcttttggggtcggaagcgacacgggcgggtggtggtgctagcaggcagcagcaggcgacgacgacgctaggcgagagccccagccggagcaggccaccatgtgcggcatcctcgccgtcctcggcgtcgccgaggtctccctcgccaagcgctcccgcatcattgagctctcgcgcaggtatggcgcggcaccccgccgtctcgccgtcccatctccatctgtgccttttgtgtggcttaacgcagccccgggcgggttattgcggccgtttgaggagatggcggaggaaatttggtggcgggttgggatagtagagcacctttttctgaccctctatagtccacttgtcgtttcaatttatttatattaacagctgaaaagggccagcgatatgtggttaacttttgcaaaacgtagtatttgtctccgagaatttgggagtgagctgtggtgaatgatagatgtttgatttttttttggagggcccctgtagcgcgacagggcgtgtctatgtcgtgagagaaattgggaggaccagattttcaaaatgcaaactgctatctgcctgcatatatagatggatttttgtgaggttacagtcctttaagtgtttgcttcgaagttcgaaatgaatacttgtttattcaagaatagtaatgactgtatacatgtacatttcatctgcagaaaatgcacgttgatggctttaaatgtaaattatttgaatttgaataaaatgtagcatgtgtatagatatacttggggctcgtttggatgacgacctggcctgggggctcccgcccaggcaagtcgatccagccccaggcgctggaaatcgacggcctgggtgaggtgcctgggccaggcaaacattccagtcttcaaatcaaacagccccttgatgtccagcaacaggcttctggggtttatctgctagtgcttgtggtggcaagcatggaggttttggttcacggttcctcttgtggagattatgatttcaaacacaaaacttgctctttccagttgcaaattaaaatattgtaaacttgcgtacataaattagaaatttagatgatatgactgggttacctaaaattatctttgtcaatgatttaatacgactcagttagcaagtcagaagaggagtaaaagagaaaaaaaagttgcctagaagtgccacagcagcctatgattagaaaaaaactgagtaagcagcagtttatagaatcaattactgttcatctttggtccagcttccagaagcgcacaattgtggagttactcctcgttgaatttgacttaatcttctaatagagtaaataggtgttgtttgcagaacacaaattagtgtcatcttattgaaatctgagatgagagctagatgtctcttgacttcaatgagtataatttctttgtgcctttttttttgtggcagcgttcttaagaattacagggtgcttgttatataatgttatagacatgcaccccactgaaatgaagttcatattttgtaggttacggcaccgagggcctgattggagcggtttgcactgtcatcaggattgctaccttgcacaccagcggttggctattattgatcctacatctggagaccagccattgtacaatgaggacaaaacagttgttgtaacggtctgtatctggattagaaatgcaatcactgtatccactcatttctttatggttactgcagagttcacaacaaaattgtttaattgttgtgcctttggtaactgccatttgttttcaaaagtccatcatgcccataagtagtgatcaaaggattcgatcccaggatcccaataccgtgaaagggaaacttcccaggtctagggaggcttagcaaatgccctcattgagctgagtgcgacttaatgtggcatgatattaggaaatatgcttctatttgtgtatagttacttcaccattttatcttctggttgtcatttccaggtgaatggagaaatatataaccatgaagaactgaaagctaagttgaaaactcatgaatttcaaactggcagtgactgtgaagttatagctcatcttgtaagttgcatatctatacccttttaacagtggcatagcttttgccaacaatttcattatatccatcgaagcatcatcctgggttataaagttatttaatcttggcactaagacattttaatatttcctttacacagtacgaagaatatggggaagaatttgtggatatgttggatggaatgttctccttcgttcttcttgatacacgtgataaaagcttcatggcagctcgtgatgctattggcatctgccctttatacatgggatggggtcttgatggtatgtaaagcaaatcagctgattgttttgtccttctaaagaaaatcaggcatgaattatgtctttgatttatttcacaaaataaaacttctagggcagtttcataaaactactacttgaggcatccatttcaaaacttacaacaatttgcatgggcctactatttctgtggctggcaggtgggtccatgaaggtttgtgaaactgaggacacaagtagttgtaccatgaaactgatcttaaaagttgtagttctttgatagtttgatgcaattagttgtaattttgtgaaatgaatcctatgcttttccttcacaaacataatgttctggaattcgtcagtggcttgctttgttaactactgttgcagtggtctgtcgtgcttgaagttatggtccacattcctagccagaactggccaattacttccaagaacctcctggggtgttctctagttccttttagggagaaaccacacagaacactcaatttaaatttgaatgctgatctcttagtaaaccacatagaaacaccattagcaagttgttaggcaacgatgaattatatgcacattgttgttcatgctggtatgagcctactttcttgatgtaatgaagatgtcagactggctcttttggaagttctggttttgattaccagtctggcagcaggattctcctgaatctgatatagaattcattctgtcgtccaaaagcaaaaacggaaaattactacgtcatttagtgggctatgtattatctggataagtgttcattcctctgatactatttcttccttttcttcatcttggaaaatatgcagtgtggtgttgccaccaactcaatttgtaactatttgtcttttctggattcagattagctgctacttgagattaattcatagtgtgctatgttatcaggatcagtctggtttgcttcagagatgaaggcattgagcgatgattgtgaacgcttcataaccttcccccctgggcatctctactccagcaaaacaggttgacttgtctagcagactgtctcatcctgacgataaaccagatcctgaagcaaaagtgcaatctaagctttttgtacccttcctaggtggtctaaggagatggtacaacccaccatggttttcagagacgatcccttcaaccccttacaatgctctcttcctccgggagatgtttgagaaggcacgtgtatttcctgataccatactttcatacccgttgatacataaagcatacttgatatctatctgtccactcgtctttttctctttgttttgttttacatcttttgacacatatagtaataatgcatttgatatatttatgtatgccatatttgttgtcaggataactatttgaattttgtttcgtcacttcatgcttatattctatgttaatgcctctgattaggtaatgcctaattgcttatccatgtattagttgattttgttgtgcaatgggaattccagttgctgtgttgtgctgtagtcacaatgatgattcgatgtgttcacttcagcagtaacagtacaattttatatagctgatatgttcaatgtctgtttgtttttctaaattattttgattactggtattatctttcacttctgcaggctgttattaagaggctgatgactgatgtgccatttggtgtgcttttatctggtggacttgactcttctttggttgcatctgttgcttcacggcacttaaacgaaacaaaggttgccaggcagtggggaaataaattgcatacattctgtataggcttgaaggtaagtttcttgtttaccctcatcacagagcatcgtgttcacttcagccattattccagttctaacttgttttcttggtgctatgagtattttgacaagataaggaatatctactggaagtgatataagcagtagggacaatgtgatgaaattcttctgtttttgtcgtttgtagggttctcctgatcttaaagctgctaaggaagttgctgattacctcggcactgtacatcatgagttccacttcacagtgcaggttttcaatttgattttctgtacattacagggaaaaaaccttttgaattgtatatttattgtttttttttttaaaaaaaccaggaggggatagatgccttggaggaagtcatctatcatgttgagacatatgatgttacaacaatcagagcgagtaccccaatgtttttgatgtcacgcaaaatcaaatctttgggggtgaagatggttatttctggagaaggttcagatgaaatttttggcggttacctttattttcacaaggcaccaaacaagaaagaattccatgaggaaacatgtcggaaggtaaagatattttttactggtgatgttatgtccaatgtttttggccaatcatttaaagcagagtagcacaggcatgttgtctcttttgggtcagctgcttagtcattcaatcttgctcacaagatgtcttttgaatgctctttagataaaagcactacatctgtatgattgcttgagagctaacaaatcaacttctgcctggggtgttgaggctcgtgttccattccttgacaaaagtttcatcaatgtagcaatggacattgatccggaatggaagatggtatgttgccatgtgttacaataatatcaagacatctaattccactgtaattcatttctttgattctaaccagcatgattgctttcttgtgactattgccttgtaaattttagataaaacgtgatctcggtcgaattgagaaatgggttatccgtaatgcatttgatgacgaggagcggccctatttacctaaggttggagaagttgctcttgttatttttgcaatgttacttgaatactttctaaatcccatatgctgtaacttatataggttctattttctgtaaatagcacattctttacaggcaaaaggaacagttcagtgatggtgtcggctatagttggatcgatggattgaaagaccatgccaaccaacatgtatgccaaattttctttgctgaacctctcaggaagttggcccttgttgaacgtgcagttgatgtttattattgctttcaggtcacggattccatgatgatgaatgctagctttgtttacccagagaacacacccacaacaaaagaagggtattactacagaacaatattcgagaaattcttccccaaggtttgtaagctacattgcacttgtaaagctattttggtctgcgttaaaaaaaaaaaccttttgcctggaataatccatgccttgccaaaaaaagaaaatacaccttgctatttaggtctggaataatctttaccacgaaacaatgcatgtgcccacctacataattcttttgattattacagcctgcagcaaggtctactgttcctggaggtcctagcgtggcatgcagcaccgccaaagctgttgaatgggacgcatcctggtccaagaaccttgatccatctggtcgtgctgctctgggtgttcacgatgctgcgtatgaagatactccaggggaagctcctgcctctgctgatccggtctcagacaagggccttcgtccagctattggcgaaagtttagtgacaccagttgcttcagccacagctgtctaaccttctgtttatcacacagcaatgctcgaccagcaaagtttgtgcatttcttgtgtcagtttccttcagatcatgtttgttccatcagcaagcaatgaagacatgcttgtgcttcatgcttgatagcatcatgtttgggttttcactgagcaataatactgtttgttttttatggactgaaaagactcgacagctttgtaaatatttgtcactggccaatttcctttggttgtttatgtgatttgcagattgcagtggttagtgtatcttcacgatctgtactcccaacacttgggattgtttgtgacgtgtgcgcagatttatcttttcttttcttcaatcaaggtttttaatttcctaatctgtagcggtgataggaaactgcccaagaacagaacataggtagaatatgaatattctgtagatagacgtatcaatactactaggaggctgtttagtttttctattttgccaaaacatttggtgttttggcttcattttttttttacaaaatggatctcagcatcattgtcaaagaatacaaaaacttgctcttgtaaagttttggcatttaggactctttgaggcctaaaactatacaaaattgtcttgggccgcgagccggaatgtctctactttgatatggtgctaaagaataccaaaacttttggtgcatctaaatacttcatctaaaattcacaatgtcaaaacttttggtgcaaaatatctggtgccaaatcttttggtatgacttggggtggg

SEQ ID NO: 3624 - DNA, 6439 bp, Sorghum bicolor
ctttactgcatgggtttttattggcttcaggatggtgtgcacaaaaagatggatagcattagagccaacttcttatggcgggggactgaggacaaatttaaataccatatggcaaaatgggaaatggtctctaggcctaaagatcaggggggtttaggcataattaatactagactgatgaatgattgtttgctggtcaaatggatttggaaaatccttctggaaccggatgatctatggttcaaattgttgaaagccaaatatatggcaaacactaattttttctcttctaagtccaaaaaaggttctcagttttggcaggggcttcacaaagtcaaagatttcttcaaatggggggctacttttacaattggcaatgggaataattgtcttttttggcaggattgttggttgcatagtgtgcctttgaaaatctattatgaagatctttataaaatggttagacaccctgattgttctgttgctgattgttgggttaaccaagattggtttgttgagtttagaagacctctttcaaatgttgagttccaaagatggactctcctttatgaggaactccaacacatcaggatagatgggtccaatcctgataaagtctactgggccttggagaaaactaaaatgttcactactaaatcgttatacagattcttatccagtaggggcatgccaaatagagttgcgggggtaatttggaaaggcagggttccattaaaaataaaattttttctttggcaaatctttaataacaaactgccagtgggttcggagctgatgaaaaggggttggaaaggagatggcaaatgctgtctatgtggggtgttggaaacgataaatcacctgctctttgaatgtgtccttgctaaatggttttgggctgtcataaaggaagtgttttatatgatggatattcctcactcaatacaggagttgtctgaggggtgcctgtggggtaaggggcccttgcaaacacgaaatattatgtttctttttgcaggctttgcttggaccttgtgggtaacaagaaacaagatggcgattgagaagtgttatcctaaggcacctgctaacattctgtatgacgccttgtctttgttacagaggtggtctttgctcttgaaggcggtggacaaggaaaaggtggaccaggcgaatgctatgcttctaagttggatgaggagttttgagccaagcttggtcatgcctacagacattgttgagatttgagtcccttctgggcttcattttacatatctttgtaataggtttagtttgatgtttgcttgcttgagacactggtttccccagtcgatgtatcccaaacgtggtgctttcttaaaagcagagatattctcttaaaaaaaaacagtacgagccctgctgagtacaactgcaaatgcaatcttgttgttaccttattacctaaaaagatgactctatatatggcgtagctatttaattcaatgtatgtgcacaatgtagctatagaaacacttattagtttggtccgatgggtaatttaaatttggaccggctctaatttaaattaccacgacattcttataccacgacacgacgacggtaacttttgttcgatgcttttcaaacatacatttcttttccagttggatttcttttctttttctttttgaatataaataaactctcagttggacttctttaccggcattgttccccaagaaaggaagcggggaatatgcctttctacttcttgcgtcgcgcggacaacaccaagcagccaaaagcacccactggagcggtcgtggctttcaatgacacgtgggccatagcattgactgggcctacacgtcatcgacgacacctcacctggcctgcgccttctagagaaaggcgaacggacaggtcacccccgcacctcattccagaagtatttgccgccgtagtttatttttcttcaaatcactttctctagttgcatttcgctttctctcctttatttatttatttattgcaatagataaatctgcctttgctctcatctctcccgtcccgtgtatcgtcggctttaaaaggacgaagagctaaaaccctctccaccacccatatccgcttccttcatctcgagcatcccctatctccgtcgtcgtcgctcctcaactcgccatgggtacttcctcgctcccggatcccgcgtcgagttgctgctgctccctcctgctccgtgctcagatctgaccaaaggggttttgctgacttttttttttgattttttctggacggatttctggatgcaggcaaaattaagatcggaatcaacggtgagtttataacccccccgcccccccaatctagttcttcctgctcggtttattgggtctggaagtcttctgactggttgtccctgcgtctgtgtgtgtggtttcgctcaggtttcggaaggatcggcaggctcgtggccagggtcgcgcttcagagcgaggatgtcgagctggtcgccgtcaacgaccccttcatcaccacggactacatggtatgcgccctcgatctgttgcgtttgttccgtgccacatgagtagatctggtggtttacaatgtgttagggtgggtttagcaacgatccgtcagccaagcatgctcgattcagttaatcgtggcgttcggagtcgtttgacttcaattctttactgggtctctccgtagatctgggggttctactggctctgttgctctattacaatatattatactgtcagtatcagtatcagcttgaggtgttgtggatttggtgcttacttcattttctgaattttgaaatctgtgtgccgtgctcatggtttatctgctccccatcttgcgtagacctacatgttcaagtatgacacggtgcacggccactggaagcacagtgacatcaccctcaaggactccaagacccttctcttcggtcagaagccggtcaccgtctttggcatcaggtactaactaccctctcctgcttctatcatggatgggtttgagtttgtcttcaagctgtgagctaatgtttcaactgctgcaattctacaggaaccctgaggagatcccgtggggcgaggctggtgctgactatgtcgtggagtccactggtgtcttcactgacaaggataaggctgcggctcacttgaaggtataattgctgcttcatgatcctatggctgtttcagaatgtgtgcaggttgtttgcgtatcattattcctgactataagcatttgtttgatcatttacatgcggtggacaaattgagtgatggctatctagtgtttgggcttagcacattgtgtcctatttttcaccagaaaactttcttattagtatagctggcaaactcacaatctgcaaccaggcagagctgggattactagtacactaacctttagtaaattcaattggttctacgcttctgataagctgtaacaactcgatgtcttggtttttcgtagtagggccttgtttagttcaccctgaaaaccaaaaagttttcaagattttccgtcacatcaaatcttgtggcacatgcatgaaacattaaatatagacgaaaacaaaaactaattacacagtttagctgtaaatcatgagacaaaccttttgatcctagttagtacataattggataatatttgtcacaaacaaacgaaagtgctacagtaccgaaaagttttcacttttcgggactaaacaaggcagttgtctaatgttagttttgttatataagagttactggagtctttatagagaatctagaaattgacagacaggatgatttagtgtcgtgactaggaatacacccatgtactatgctttcttggcagattgccttgatccttgtaaatttccctgttaatttggatgttgctgatagctgtattttcctttttttgaattattatatagggtggtgccaagaaagttgttatctctgccccaagcaaagatgcgcccatgttcgttgttggtgtcaacgaggacaagtacacctcagatattaacattgtttccaatgctagctgcacaacaaactgcctggctccccttgccaaggtgtgttttcccccctcttatttgggtgttctttttagttgtctggtcttctgatgcagtttgatttactaatggtgtctaatgccattaattaggtcatccatgacaactttggtatcatcgagggtctgatgacaactgttcatgccatcactggtaagttttctttggctgtcgagctatctcccctcttagtattattgagaagatacatttagatggctgtataatgactgtgtggtacttatctgtcagccacccagaagactgttgatggaccctcagccaaggactggagaggtggcagggctgctagctttaacatcatccccagcagcactggagctgccaaggtatataataaattcagtaattcacaatgttggatggagtgagttaatatttgttatttctgtaagtgttgatcattttttcatactgacttgggcctgctgattgtactaaattattgttctgctgtgttttggtttcatgtagcttcatgaataaatttttaatgccaatgtatgtgcattttatgtagcttcctgttgctacatgagttattatatagctaatttacataggcatatgagcatatacacagctaaatgagcattaagcattaacaggcctggttgattgccattttagttctagctgaacctatacttcctctttagtttgggttgttgttcacctcatttttctagtgtaaagtcgacatctgtatattgacttcggtattgatgaattgcaggctgttggtaaggttcttcctgatttgaatggcaagctcactggtatgtccttccgggttcccaccgtggatgtgtcagttgttgaccttactgtcagaatcgagaagggtgcctcctatgaggatatcaagaaagctattaagtaagtgattagtccatttttttttaatattcagtgaatgtgagtattgttcttttttaaaccaatgcatatgaatgtagtatcactcattgttggaattatctcttactatcacatttgatgttcactttttatgtttcctgcatctatcttgatcttatagtagtttattatccatccatcttttttggtaaggattgatggcaacatttacttaattgatattgctttacagggctgcttctgagggcccactcaagggtatcatgggctacgtggaggaggatttggtttccacagacttcgttggtgacagcaggtatgcctttgctttgtaccaattattaggagccaacataacattattatggcacactgttatgttgaattttgatggtgttctctgattcatctgtttgtgtaatctccgtattcatgtcactttgctgcttcccacttaggtcgagcatctttgatgccaaggctggtattgccctgaacgacaacttcatcaagcttgtctcgtggtacgacaacgagtggggctacagcaaccgtgttgtcgacctgatccgccacatgttcaagacccagtagagatttttctgctttccatagcatcccaatggccttggtcgctgtccatcccgctgcttgtctatgctgagaataaatgtgaatggtgcctctggacgcccgctccatgctgggtctgaacatgttttgtgtttccatttctgctaccatcctgtaacaaattcactaatatgggacctgagtttagttttttgcttgtgaagaatataaacagtggggttgcaattttgctgtgctggtttggttgcatagatgagctggtctttgggaataatagtttcttgattcgtcatgtttctgtgttcttaagtccttcgtgtgttcaatgttattcgccgtgtattctcatttatgttatcagttggtctttttatttacttttggtggttctttttacaagcttctcttaaactttaatccctatcatcggcgacgacggcttcatatagcatgcactagtggacgccgatgggtggaaccctaagaagattttaaaaaacttaaaagaagattttttaactaactatagtatgtgaatcatacaccttaactatactatttaaaatattatttttataattataaatttacccttttatctttcattaaaaacagaaatatgaaaaaagaaattaccatttctatatttagagttctaatgacgtttatggtccacttattatagacacacctatcacttcccattgtcttgctccaatcgctttcattctaccgactatagacacatgaatcacttttcatcgtctctccaaccattgtaaaaatattttaataaccaagcaattatactaaaaatgtttaccttaccagaactttatcattgttttctagcag

SEQ ID NO: 3625 - DNA, 7751 bp, Sorghum bicolor
catgtactaataattataatattgcttggaaacaagtctaatcaattattaataaaggactattataagtctatcagaatgtaaattgataaaattgtcttctttcgaatagttccttttgtttccatttaccctttccccttttcttagggaaatgttgatgacaaattttgtatggatcttgtatagtggtcaatcgacatcttgtccaataacaaaatgctgatgcaaaatcgttgtgttttaaatcttggggcgtgtttagttcttaaaatttttccaaaactacgaggattccccgcgcgttgccgcgggtataaagaaagaatataaaaagataaaatgttaattactaagtattaagatatgtatatatatggtgtcgtaaattccatcataaccttaaacactgagaaatcagtcatcacctagctgtcattcacatgctgacatggagatggctaggtggcctccacttgaataaataaaaaaaacacaatctatcgatgatgttcgcaaattgaataaagaaaactactgtcttatctcttgtgcggagaggcttcttggctttttaactgctcaaagaacttcacagtatggatcagcgcaaggtttctcagcttctctcagaagctttggagaacagcacaaaagcagatcgagcgacagcgcaaggcttgtcggcttctctcagtggcttggaggacgacacaaaactacaaaagtggattgggccggcaccaaagcagggtggccacacgtagacatggggcagccgacgtggatgcagagttgccaggcgccccgacagagtgaccggagccgaagcgaagagggccagcgctgaggcggacccgtccgccgccgatgcaaaggtagagaggggcaggacggaggtggagtagccaacgcggagaggaccacgtctgcgaaggtctcctttctcttgtcgtcaacgtcgatgagcacggtggagataagaaaggaaataacatacacacaactattaaagacgaaggtagcgcgatggttgagtttcttccgtaggcgtttgtagggatgtggctgatgaatcgatgtggaaataaatgcttgtgcctgttcgtttggtgcgccgggccgccgacactcatgtgatgtgttggtgcattgagggggaagccgaagagatgatggcagctggttaacgatgtggagaggattgatatgtttttattgccgagtggaggtggaggtgggatttgttttcgttagttaaaggtgtgttgccttcttcgtgtgctagaggagatggcgggcactgtagggggcaggagaaaaagtggatgacgtggctaaaggagatgctagagaattagactagtgaggtttatatttatataagagatatagatttttttaagatttttcgtcacatcaaatctttagatgcatgcatgaaacattaaatatagacaaaaaataaccaattgttcagtttaactgtaatttatgagacaaatttttaagtctagttagttcataattgaataataattatcgaatacaaacataaaaaatactactccatctcaaattataagtcattccaagaattttgaagagtcaaaggatctcaagtttgatcaaaatttatatggtaggataataatatttatgatatcaactaactatcattagattatttattaattatatttttttatagtttatctatttgatgccataaaactttataattttttctataattttgatcaaacttgagatgctttaactctacatgattcttggaatgacttataatttatgacgaagggagtacaaccaaactcaaaattttcacaactaaggccttgtttagacccgaaaagtttttggattttgataccgtagcaatttcgtttttatttgataaatattgtccaatcatggagtaactaggcttaaaatatctgtcacacacgcccacacacgcccacatatttgacaaatatttccgtttttctcagggtttcgtgccgtccggccacacacgcccacatagcaaccgggggctgccaaaccggaccgcgtcgggccaccctttccggccagagcctcgttccactcactactccgtgctcccccacgcgctcgcacccgagcccccgatccaccaccgcggccgcgatgagcaccgcctccggcgacggcgcggacgccggcggcgacggggcctcctctgcagcggccggcgcgtcggcgcccgcggggaggcggatcccgcccgcctcgtccatgccgtgggtccgcaacctccgccgcttcgtcggcacgggcgccggcctcggatccgaggccctcatgggtcagtgcctctcgcctctgctccttccttagccgccccggcctccctcatgccgctaggctaggctcggtcggagctccgcgctttgggatttcgaggcggtggtggttaggtgctaggactagggtttacctgcgccccagtttgaaatgtgtgtggtaggaggatgggatctgtgcaccgtagaatttatcttgatgtaatgcagccccacggttacctgaaaaggttggatactgatttgcagctgttaattttggtggtgattcattgggggaagagaatggtgcttcctgaagagatagtgatgttcaggaatactagagatttttgatatgtgctgtttgagcttgaacctatactgatttggtgatagggggatacctggcctcaggacagtgggcttgactggctgagtgctaagtacttctctgtcactgcacctgtacggggaactaggaccctttttcttttgtaatttatcacaattattgggttaaagtagtttggtagttccttgatcatgggtgcaggaaagtgatacaaaaaactagcatgttctctttggaaacaagcttcaaaatgaaatgctagactctagtggttgctttgttaatcaacatatatatttcgcaccacactcataaattgttctatacgcacaatttgcagaactggagactaaaaggatattgcttgagattttcaaggagcggcagcggaagagtgccgaagctggttccatcccaagtttttacaagaaggtgcatgattcagtttgctgactgttcttgtccttttttttttatttttactcttaaggtgaaacctacatcttaacttaaaatataacagtagcggctctagctgcctgtatagagggtagaaatttcttttgggttccctcagtaactacacttggttctattttgtagaatctaacaccttagttctggatactaaactaatatccatcttgtgcccagaaacctgaagaaggatccattagctctagagttcagaggttggccaagtacaggtttctaaaggtaacatcaggcttttcttttgatttgtggatatgctaagctttattttgccttacgggagcttttcaataccaattacagaaacaatcagagcttctgctgaatgctgatgatcttgatgccatgtgggtttgtcttagagaaaattgtgttattgatgatgctactggtgctgaaaaggtaagattcttttttgatacatgtattttgcaccacatccagttgtaaagtcttagttcttgttgcatgtttgaatgtcagcatactagttttgttctgtttcaattgctcaccgctaacatcaacaggtcatcgctaacagctacatgtgtgatctccatttatgtcgctttagctgattatgtagcactctttttattattattatatctccctttcttatttctttctggaatgctgcagatgaattatgaagatttctgccatattgccacagtctgcacggagcagattggtcagaaatgcaaacgtttcttcagcccttcaaactttatgaagtttgagaaggatgattctgggaggattgctatcctaccattttatctttatgtcatgcgaacagtgagttattttctgcaagaaagagtagttaaaattgccagctagttttgtcccacatgcttcattttgtctctaatagattgtgggttagttaaaaccggcattgttagcaattctgttctctattcttatctgaagtaaattttttacttcattattaattattctgtttcattatttataccaagtttgtctaaataactgttaggctacaccttagaatctaattgtgcaaattatggtgctatatactgatcatttgcttactggtgtttctgcaggtttctcttactcaagcaagaattgatatgagtgagcttgatgaggattctgatggtttccttcagcctcatgtaaggacacctcaggacatgttgatgatactttgcaccttagaagtgtttttatgccttacttgttctcgtaggaaatggaagcatgtataaggggactcactcattttttttcataggaaatggaagcatatattagaggactcatccccaatttggcacaattgcgtgacatgcccactgcatttgtccagatgtactgccgtatagctgcacgcaagttctttttcttctgtgatccacacagacggggtataacaaaatactagatttatatagttgatttatatccaaaacaacattatgagattaactgcctatgtcgtattatactgtttatccttgcagggaaagcatgtataaagaaagtgttgctgagcaattgtcttcaagagctaatggaactacatcaggtacatttttaatatatttttgcactgttcaacgtggtaaacttgagaatattatagttctacagtgtaacgttgctgcatacttgtatttcacatgattttggggatttgtgcattttgatgattatatcatcacttgtattttcaggagagcgaggaagaggtaaccgataccgagcaggcagaaaattggttttccttaacttcagctcagcgcatatgtggtatgtcagctggaattctcataaatggttgttttccccatggatttgaaatgtaccattctagtgtggtgtatgatctgtgtttgatttttacctcaaccctgtgcagacatgtttcttgcactagataaggatactaatggtacactgagcaaacaagagctcaaggaatatgcagatggcacattgactgagattttcattgaaagaggttaaaatctgtcactattctgtatatacttttgttattgttgtgtcaaaacttgtctttaggcagagagtttattcatgaatacataacaacgatgcggttgtgtttttcagtttttgatgagcatgtccgccggagcaaagttggaggtggaaacagtcgtgagatggactttgaaagctttcttgattttgttttggctctagaaaacaaagatacccctgaaggcctgacatatttatttagatgccttgatcttaatggaagagggttccttacaactgcagatatccatactttatttaggtatgtaattatgtatggactaatttacactatatcgttactgggttcttatgatagttgctagtctgatgataaatctacttgttcatggtcatggacatgcagatgcaggccccctttttccgatggccaaattaaagtgttttagtaataccttttcaaatttaatttgaaaattgaacccttgtgatgaatctatttggcttgaaagcagtatcaaacttactttggtttgacttgctccattgcggtgctctactttgacatttgtatttttgcgaagtacctgcctataaaagtaaaagaggggtaaaaggactggactcttaaactacatgaggttggcttgaaacttactttcgttgattcagtcgcactacctatttctgctattccaagctggctagagtcagcctgtcatcattatggatttacatgtatatattacaataaaagaaattaaaatttgtgttcaataatactgtgagacaaaacttgggttctgttcaaatccaattttgagaagcacctgcattctggaagaaaagaaaggaggttgtttcgagttaacattcctacctgataccatcttcctagattgaatctgtcattttttgtgcttgctgaacttttagtctgttctgctggccttaacaggcagtatatcagttgctcatggccacaatgcatcctctattttgttttttctttttgatttaattttaatcaccagttgcaatcttgttagacgtggatgtgactgacaaatattgtcccagaaggctttcatagacagtatatcggtttgacaggcagtataccggtcgctgttttgcttttatggagtctcactagctacatttgtactttctaaatccagtaatattttaatgtaatttgttgattaaaaacagtttcaactattatagctgatactagaaaatgctcaatacaacaagttagtcaactcagatatttgatctcattttttgatacttctcatttctaagtagtcttcacgatatgttttcaattcgtgctctaaattcttacaacaccatgctagtggagtcttatgtattgaacttattctatgatgtgccccatgacatcagtaggctgctttctgtttaatttgatcattcatgtttctcatgcaacccttttcatgttttcagagacgtacaccagaaatggattgagggcgggaactatgagctttgcatcgaagatgtgagggatgaaatctgggacatggtgaagcccgcagatcctctcaggatctcgctgccagatcttctttcttgcaagcaaggcgggactatcgccagcatgcttatagatgtgcgtggcttctgggcccacgacaacagggagaaccttctccaggaagaggaagagcaagtggaagaggcatgagttctgttctccagctgtcaagtaaccgtatccggtgcctcaaagtcgcaacatcctacgaattgcctgtactgtggtatcagtcactgtaacttagctagcgtattagatccgtcgccacctcctgtttcctggagcttgttgtaagtgtgccatagtggtcttttgaacttgttgaggctagcgtggtttggccatgttgacatctgaacaatacagcctcggcagcctgtatgtacatctcgattgcaccaagcgcgcaatcctgactacggcattatgcctgtaagcctatatgtaatatacattgtgttcatttcgtgcatggcttgtggatcgttacttgattgcgtggattgtgccatttttgctacatcgcagaagcttctgctcgattagtggtgactggtgaagctctaaccttgtttgtttggctgataagccgtggcaaaaagtactgttggttgatttgttgtgagagaaaaatacatggctggcacatttggaaccgtttgtaaagctcaacgcctcaacttccatccatagtctaatttttttgcttggtcattgttgtgttgttgcttccaagtatgttattttaaaattaaattaaaatggtatgcttctccctgggtagggatgaaaacggtacggatatttttcgaccgtattcgagaccgaattcgtttagagaggtttagatatgtccgtatccgagtccgaatatttaacatctgataccgtatccgtattcgaatatttaaatcgtatatttatgatgtcgacatccaatcctatcttatccgacatgattgacattatctgtattcgaatccgaatc

SEQ ID NO: 3626 - DNA, 6032 bp, Sorghum bicolor; identical to SEQ ID NO: 3611

SEQ ID NO: 3627 - DNA, 4630 bp, Sorghum bicolor
taatttagtactattatactccctccatctcaaattgtaagtcatttcaaaaatcttggagagtcaaatttttctaagtttgactaaatttatattataaaataataattattatagtactaactaagtatcattagattctttcttaattatattttcataatatattcactttacgttacaaatcttagtatttttctctataattttggtcaaacgtgaaaatggtttgactctccaaaattcttggaatgacttacaatttgagatagagggagtaactaataataacacatatgtaatccttaatcctaattactatatggtgtggcattggcatgtggatgggccgtgttaattttcgagccatgcgtgtgcgggcctgctagtcaacggacgattgctggaatgagacccaaacgttggacctatatatagtcacttgtcaaaaaaaaaaaagttggacctatagtcgtttgatgcaactttccatttttgaaaagttataataaacttatatgcacacaatttggacgtataattttttgtgggacagaagttacatgtagggatctggctcttaaaacggctctccagcttcggctccagtttctcatatggagcaacatctctgcttgagctgaatgtcgtttggtaaaacatttgagaaaaacagttagggtttaggaggagggtggcaaggaacaccaatgtcttagcttagaagggggcttgggggcggtgaccataccggtggccgtggtggttcagcccatgttgagcaagactaaaaaggacatctgaaggtggttaggtgagggtggaggctgattgaaagacctaattggattttggtaattgactgataatacttgtgcactatcatgtttcatgtgatataaatggttaggcttagtctacaacctagagttgagcttcatgaagccataaagtggagatgtcaacttgtcaaggatcaaatggtacaaaggctcaacaagtgaagagtgaaggcgatggatgcttgctgtggcagataagctctttgaggagatgatggagaagcgcaaaggaggaaaaaaagtgcaaggccaaggtatagctataggactttgttttcgctggccatgtgtattagagaagaaaagacagttgtactatatataatgatgaaaaaaaatatttttttaaattctaactcattcctaaaggtgatggtcatctagattgatacttattgtagtcatttgaaaatgtttgaaaatggagcttggtggagtgtttttacactaatggctcccgtgagcactggggaggtggcaccgaagctttggcgcaataactaggtttgttatgagaatatgttccaaattaagctagtgatatctatcgtaaatattattagttatatatatttaggataaattaactgttttagaagttatttttttaaacagagggagttaagaaagaaagaaagagaagatggaggaagaagcagccgaactgcctgttctcggactcttggtggtcaaagggccacgtcaccgtggggaggagcatactcccttcacgtcagatttaagaattcgttttggacagcgacacggtcttcaaaacacaattttaaccttttatttttataaaaatatttataaaaaatgatatatacatatatttatgaaagtatttttcatgataaatctattcatattttttatttacaaactcaataatttaaaaattatttgatttttattctcaatatttgacctaaatcttgtctaaaacaacttctaattttgatacgaatagagagtacggagtatctgcttgtacatttttcagaaaaaaatgtatatgttgagaaaagcagctgagctgcctttactcaagtcacagtcgtccagcgccatgccatcattgactggaggaccaaatgaaatgatcctatcctgtatcagaccattggccattggcccattgctctttgtctgtactctatatatatgcgtctgcttcaacacaacacttcagtaaatcacacattttgtctctaatcagagatcaagaagtagcccttaagttaacgatggcttccgccgacctcgcagaggccatcgagcccacgaagaagagcaacgtcaagtatgcctccatctgtgctatcctcgcctccatggcctccgtcatactcggctatggtacccgttctttcatcgttgtcgaaatatttttcgttttgctttccaagagtttgtagacgaagtttgtgtactgtcaatcaactctgtagacattggggtgatgagtggagcggcgatgtacatcaagaaggacctgaagatcacggacgtgcagctggagatcatgataggaattctcagtgtctactcgctgatcggatccttcgctggcgcgcggacgtccgacaggatcggtcgccgcttgactgtcgtcttcgctgctgtcatcttcttcgtgggcgcgttgctcatgggtttcgccgtcaactacggcatgctcatggtgggacgcttcgtggccggagttggtgtgggcttcgggggtatgatcgcgcccgtgtacaccgccgagatctcgccggcggcatcccgcggcttcctcacgtccttcccggaagtgttcatcaacatcggtatcctgctcggctacttgtcgaacttcacgttcgctcgcctcccgctccacctcggctggcgtgtcatgctcggcatcggcgcagcgccgtccgccctgctcgcgctcatggtgttctgcatgcccgagtcgcctcggtggcttgtcatgaagggccgcctcgcggacgccagggctgtgctagagaagacctctgcctcgccagaggaggccgcagagcggctggctgacatcaaggtcgccgcggggattccaaaggacctcgacggagacgtggtcaccgtaccaaaggagcggaacggtggcgagatgcaggtgtggaaggcgctcatcttttccccaatcccggcgatccgacgcatactgctatcgggcgtcggcctgcacttcttccagcaggcttctggcagcgattccgtcgtcctgtacagcccgagcgtgttcaagagcgcggggatcaccgacgacaacaagctcctgggcgtcacctgcgcggtgggcgtcagcaagacgcttttcatcctggtggccacgttcctgctggaccgcgtcgggcgtcggcctctgctgctgaccagcgcgggtggaatgatcgtagctctcatcggcctcgggacggggctcaccgtcgtggggcatcacccggacgccaagatcccgtcggccgtagctctgtgcatcgcgtccacgctggcctacgtcgccttcttctcgatagggctcggccccatcacgggcgtgtacaactcggagatattcccactgcaggtgcgcgcgctaggcttcgcggtcggcatggcgtgcaaccgcgttaccagcgccgtgatctccatgaccttcctgtccctctcgaagggtatcaccatcggcggcagcttcttcctctactccggcatcgccgcggtggggtgggttttcttcttcacgtgccttccggagacccgcggtcgtacgctggaggagatgggcaagctgttcggcatgccagacatcgacatggctcaagcagacgacaccgctgccaaggagaaggtggtggaaatgcccaccatgtagatggaaggaaaaccaactaccctgcagtgctggcaatgagccaatgattgatgcagcgtcttttgccagagcagagctcaactcccacaaacaaaaagaaaaaaaaaaaacttgaagcagcgtggcaagattggcctcgtggactcgtggggcggcaggagagagagtgagagacggcgtggtccagcggttcagctagagacttctgcaagacaggctgaatttattggtgtcagcgtcgcgtgtgcttgtcatgccagcggtgaatcctcaatgtagcaacgggcacgtgcatattgtttattccaattatacaaataaatatcatgccagcgtcggtgtgcatgcaatgatgtcatttaacagtatttttgtttcataatagataaataaatagtactttttgttatagctaaaaatattattcactaatttgttagaaaaaatactaaataactgatagatctacactaaattaacctgagcagtgtccacctggtcgcaaatttataaggacactaagtgtagatcatgttagcgcaaagctgctgctctaagcaattcagctaatgaacaacacctactaataatttattagtgcacaggtcaacatcttcacaaatcaggccttatttagttccgaaaagtttttagattttgacactgtagcactttcgtttgtttgtggtaaatattatccaatcatagactaactagggttaaaagattcatctcgtaatttacagacaaactgtataattaatttttgttttcgtctatatttaatgcttcatgcatgtgccataagatttgatgtgacggagaatgttgaaaagtttttagtttttggagggaactaaacaaggcctcagtgcatatagtgatacggttgtacgctgcaacatgtagagag

SEQ ID NO: 3628 - DNA, 3508 bp, Sorghum bicolor; identical to SEQ ID NO: 3605

SEQ ID NO: 3629 - DNA, 4480 bp, Sorghum bicolor
tttatgtatgtgtcgtaagatttaatgtgatcaagaatctaaaaaattttagaaaataactaataaggccgcagaatacatgacgcaaaaaaggattaatttgttttttttttcttttctagtcctcgacgatattatgtgacactctggattcgatggagcgttttccaaagtcctatagatgtatcaagtttgcaagcaagtagcaccggtgaacggacttgccgtacaaaaacttgagcttgttcacttaaaattattagtcgaatttattagttatttagtagtgttttttttcttttataataaatcaatcaataacactttttgttatgatttatcagttaaatctatcgatcatttagcttatgttgatgtttacgttgaaacgtattattgaggcgaggcctggttcagttggcaaaaatttttgaatttcgttactgtagcattttcgtttgtttgtggtaaatattgtccaatcatagactaactagagtcaaaagattcgtctcacgatttacagacaaactgtgtaattaatttttgttttcgtctatatttaatacttcatgcatgtgccgtaagattcgatgtgacggagaatcttaaaaatttttgcgaactaaacaaggcctgaagcagggcgatctaaggcctttgtttagttcgcaaaaattttcaagatttctcgtcacatcaaatctttggtcgcatgcatggagcattaaatatagacgaaaataaaaactaagtgcacagtttatctgtaatttgtgagatgaatcttttgagcctagttacttcgtaattgtacaatgtttgtcaaataaaaataaaatgctacagtagttagaaacaaaaaaaaattgcgaactaaacaaggcctaaattcgatgtgagcagtagtacaccgtgggcgcatgaggaaatcacccaagactgtttggtgagaccgttcggttcaacgcctagaaatcggcctcacaagttgctgatgctgatgactgcaagttccaggcggagaaaaaaaaagatgctctagcatattcgatcgtacagctccacagctgcctgcctcgagcagcaaacaccggcgtaacaaacaggaacccgccacgtgtggtaccaccgacaccaagcggttgagccggaccataacgtgccagtgacacccagtacgtggcgccctgctagcggctcaatccgctgtggcagcagcacccccgtcgcagctccgacgcatccgatcccaactcgacggaaacgcccgtgcaattatgccaccgcgtggcgcccgcgggtccctggcccactcgtcagtgagtcactctctccttgctctgccatgccaccgatatcatcgctgacaggacacgccgcagtgaggaaaaagggcttttctcggagcaggagtaagcgcgaagtaatccctaaatcaggaatcaccgcggccaaaattacggcgaagacactgaggccttgtttagttcacaaaattttagtttttttttgctaccgtagcatgttcgtttttatttgacaaacacggagagattcatttcataaattttagataaactgtgtaattatttttatttttatctttatttaatgctccatgcatgagaccaaagattcgatgtgacggagaatcttgaaaatttttgcgaactaaacaaggccttagttggcaaaatttttgccttttgggtactgtagcactttcgtttgtttgtgacaaatattgtccaatcatagactaattaaggtcaaaagattcatctcgcgatttacaggcaaactgtataattagtttttgttttcgtctaaatttagtactccatgcatgcgctacaaaattcgatgggatagggatcttgaaattttttggaactaaacgaggctgagagaggattagggtgataatcaaatgcggtgacgccgcgtcgctataaaagagctcctttcgcccccctttgctcctccccgccccaccaacactcccacagccaccatcccgtcacccacccacccacccacccgtccacagccagccaaatccgcctccgatccagcgcccacccaccacggtttccagtgagtttgagcgaggtaagcttagatctgagcgagttctcgcgcgtcgcaggtaaagttcactcgaccctctcatctttttccctgctaatctcatctccttcttgctttggtttcgtcttcctcgagcagacagcgagagacccggggccttttagatcctgggcttcagatctgcgatttcttcttcttcttcttcttcggtttggttttagcagtctaggcttgttagtaggttggtagccaagaggggttctttttccacacctcccttgtgcaagtaagttcctgctgagcagatctacccaccagtgccatctgtttttactgtggctgttgggttgtgccagtttcttcattttgtgcttggtttgctatttgctagagagaaaaataaactaaaaaaactcagtctagatggccgccgctatagatctgtcaggggaggagctgatgagagcactcgagccttttatccgggatgcctcctctgctcctcacggatccagtccgctcctccacccccaccaccagcctctcagtccctcgtcgccgttctccttccagcacgccgccgcctacggcgggtacccgttcgccgccgccgcggccgagggggcgggccagctgagcccagcccagatgcagtacatccaggcccgcctccacctgcagcgccagtcgcagcagtcctccgtgctgggcccgcgggcccagcccatgaaggcgtccgcggcggcggccccgaccccgccgcgtccgcagaagctgtaccgcggcgtgcggcagcggcactggggcaagtgggtcgccgagatccgcctcccgcggaaccgcacccgcctctggctcggcaccttcgacaccgccgaggaagcggcgctcgcctacgaccaggccgcctaccgcctccgcggcgacgcggcgcgcctcaacttccccgacaacgccgcctcccggggcccgctccacgcctccgtcgacgccaagctccagacgctctgccagaacatcgccgcgtccaagaagggcgccaagaagcacgcctccgcctccgccgcagctgctgccgccacgtcgtcgtccgcccccaccagcaactgctcctcgtcgccgtcctccgacgacgcgtcctcgtcctgctgcctcgagtccgccgccgagtcctcgtgcccgtccccgtccccgtccgcctcccccgagtcgtcgacggtgccggagatgcagcagctggacttcagcgaggcgccgtgggacgaggccgccggcttcgcgctcaccaagtacccgtcgtacgagatcgactgggactccctcctcgccgccaattaaccaccgaccgacattgttctttccttcttggctccttccgactgctactactactgcaggctgcagcagagggttaaggttaacggccgtcgcgcagaatggtattttagacatcctgcgcgggcactagtggattattagtgctaatcccgttcgttcgttttgtgtagatgttcaattcgtttttgttgctgtcactggtcaagtcaggttgtagatctcttatgttatttagggtttggttcccggaggagagaaccacaaccgacgggaagccggcgtttttgtgtccggcgtctccggtggtcggtcggtcactggtcagtgaccccggctgttcaggtgtccattgttctggtagctgtttctcgctagaagatggtgctgctctacaggttgtaagaacagcacggtgtgatgtgatgttattaagttaagtagtggtactccgtatgttgtaaaatcagcttagctgtgtcccggacttgtaatctgaagaactgctattgttagtgctactattataaattattgttgtataaacagtctgtgcgagctgattgttgtccccagtttttcctcgcctcttgttcatctatctgtgagcaatgtctgaacctcgagatgagatgaactgatctgatggacaagatgagcatagctttgcactttctgcgctgtaaagatttattagtatcttgagcaatcttcattcatgagctcgaaagctcccttcattcatgagctcgaaagctccatgtttgttttattttagttttatcacgcggcgaccatcatgttgcggtggttgcgtatcatggactgaacatgggtgatggttgtacccaaccccaagtgaggcgttggttgcgtaatgcgtaccactacggagcatcgatgtttacccaggggacgcgagttgtgtgacctgatcacctgaacatcacggagcatgcatcgttcatgaacacgcagtatgcgtgatgctgtgatctgaccggtaacactacgggatagtacaccactgctggcacccagtagtacagtt

SEQ ID NO: 3630 - DNA, 4329 bp, Sorghum bicolor
gcaacttaatccactttataaaaataatgataaattataccttctagatgtggccatacaaggtttcttgagtagaaagtacagaatctaagtaatttgtagagtaattaatgtactaaattttttaaacgacacgtttttttccaattaaactagttcctaaaataatttccctttcagacttcagatctttttatttattttccaaaatctatagcaactaaactagttataaaaaataatgagaaattagaccttctagaaggggccttagaaggttccttgagtagagagtttacaatctaagtagatttatagagtaattaatgtactaaatttataaaaggccaggtactttttaaaatacgatgacaaaagatttgtcaaagatctttattatgagtaagcaaatcaatcttgatctagtttttaagaaaaaacgacccgaaggcatgccaatatgtcatgggacttgtccctaaaataatgttagccaaaccttagtatcctagaaacacaagggatatttatacatgacaaagaatctactaaatatgtaaaaagattatttctttttcaaaacccagatagaagcttcatcgtacgattttattaggagtaaaaaagagccaactttgatctagtttttaggcgaaattgaagccgagaattggctaatatgtcattggacttgtttataaaatgttagctaaacctatattacaagagaaagtaaaaatactaaattttaaataccctagaaacacaagaggtttctattaagacaaataatgtactaaatctataaaagattgtttattttcccaatacaatgacaagtttcatcgtaggtttttattaggagtaacaaagaaccaaatttgatccaggtttttagatgaaaccgagccccaaaataggctaatacaccattggacttttgtttatgaaatgttagccaaacctttattataagagcagatttagtactaaattgaaatatcctacaaacacaagggattttcctatacaacaaataatgtactaaatctaatgacagaagtttcgtcataggtttttattagtagtaaaaaggaaccaagattgatccaggtttgagatgaaagtgatcttgaaaactgtctaatacatcttaagcttgtgttatgaaacgttggcaaaaacctttcttacaaaagcaaatatagtactaaactaaacacatcctacaaacataaggggtcttatatgacaaataatgtactaaatgtttaaaaggttatttttttctgaaatggtgacaaaaacttcgtctcactaagagtaaaaaagagccaagcttgatctaggttttgagatgaaatcgagcccgaaatcaagctaaaacaacatgagacttgttaagaattgttagccaacctttattacacataagggcaaatatagcactaaatttaaaaatgctacaaatgcatagggtctttctctatgacaaataatgtactccatcgttccaaattataagttgttttgatctttagtacatcgaatttgttatgtatctagacataacattatttagatacacgttaacttataacggagggatactaaatcgctagtagtttcttccaaaatgatgacgaaagttttgtcgtatgcttttattataactgatagagaaacaatcgttgacccggttttttcctagtgtaaccaagcttgaaaacccgctaatgggctagatgcattggactatattttatcaaatgttagccaaaacttttttattattacatgtaagagtatatatagcactgaaaatatactacagacataaggggccttcctgcaaatattccaatggacgtgaaaactcgtgcttgttgattcctagattctaccactccatcttcagttttttttcctcctctgctcggctcccctataaatggagctcaccttccacgacctccctccgttcccatccgccgcccgcgcacttctcccttccggcacacaggacaccaccgtagacagattcatcgcgacgatggggctcgacgtcgtggagatcgggatgggcgccgatttgagcctggatctgaggcacttcgccaccaaggccgtgaggcagagcaaggacgacgcgcctgcgccggacatggacgcctgcatccgccgcctcgaggaggagcggggcaagatcgagatgttcaagcgggagctccccctctgcgcgcggctcctcgccgacggtgagcgcgcacctacctcttccccctttttttctcacctgtgattctttttcctttcgcttcttttccatttttggggggcggttttttcttacgcggcgatgcggtggcgtgtgcgcagtgattgatgtcatgaaggaggaggccggtaagaagacgacgaagagaagtgatcgcagcctgccggcggcggaggaggacgaggacggcgccgctggggacaagagcaagtggatgagcacggcgcagctctggacgggcgattccggccgggaggacgcggaatcagaggtacggcacgattcgatcaccgatacggcgacttgaatgctcaccggggacaggatctggggggtgtctggtgctcgattgtcggtagcctaaaagtttggagctttgcgatcgcagaagcaagacaaggggaggagtttgccggaggccaagtcccgcggcggcgctctcttgccgttcaaggctgctgtgggctccggcgcgccggcgttcgcgtcgctctgcttgagaacggacgacaaggctgcgcgcgtcgggatgccggatctgtccttgctgtcgccgccggcgaccaagagcgccgccgaggagagccggcgccaggtggtggggcttgcgcaggcagcagcgagggcggccgccatggcgccagctgcccctgcgcttggcctccagtcccaatcgcagcagcagacagctcagcagcagcagcagcaggcaaggaaggttcggcgttgctggtcgacggagctgcatcgccagttcgtcgccgccttgaatcaactcggtggcccccaaggtgagacttcttcttcagataccaaattcacaatttttcttgccagttttgggcaccaacatgttagtattgcctaattgctcgccatattagaaacataaatttggaattaatgagttcattcattcatgccgtgtctgcagttgccaccccgaagcaaatcagggagctgatgaaggtggatggcctaacaaacgacgaagtcaagagccatcttcaggttagcaatccagcagctccccttgacattcatccatctcatctctggtagatgaagattcattgcccttgtctgttgtgagaattgctgacatggattctctgattctgatgtttcttcagaaataccggctgcacaaccgaagggcgcctggatcaggcgtggtgagccagccgattatgctcgtgggagggctctggattccccaggagcaaagcagctctcagtctgggtctccccatgggcccctccacttctccaccgcctcaggcatcgccgtctcgtcggcggccaccgtcagctgcgaggaggaagatggccggtcagaaagctatggctggaaatgatgaagaggctgctgctggtgcatcatccgtgtctgttcagagaggggagggttttggcatggtggatcgccatgaccgaggccaccaattgcagcttcaggaatcaggaggggacttgggagtagtgtagctatctgtacacatacatagttacatacagggagatgagatgagatcgggccttgagcgctcgagatcaaactgatggtgcgtcgttgtcgggtttgtacatcccaaagagatgatactagttacagttttgaggcttgctaatccatgtttcgggcagagctacaattttcgccccgagagagtttacccatatccgtcgttgtcaattatcatcatctttgattcttcttttcgttgaataaaatgtttctgctgttcatcatggattgaacagttaagcttaatggctacagtcaatttctgattgtgctagttttttaataaaacttttttgctgttggtgctggaattgacatttaagttgaattgttgcaagtgcatgctactcaatttctggttgtgccatttttttctgaataaaatgtttttgctgttcgccgtggaatgaacagttaagtcgaattgtttgtaaacaaaatatttttgcctgttcgtcgccgagtgagttgaattgttgctggtacatgctatccagtttctggttgtgcctttttctgataa

SEQ ID NO: 3631 - DNA, 6103 bp, Sorghum bicolor
cctcttcggccgacaggtagagtagcttcttgtgatcctctagcatttggtcaaatttagccttctcctttgcactttcgcaatctctctgtacgtcgcaaatgacatcaccaagagcatcgtcatcatcaacgatactgtttcctgcatccccgtcttcatcaccttcgtcctctactgcgaagtcgcagtattgagcaaaaacatcgtcagggtacgcttgctcttcttcaccttcttccatcataaccccagactctccgtgtttggtccaacaaatatagtttggcatgaaaccattcgtgaacaagtgcaagtgaatttctcttgagtttgaaaattccttcaaattcttacaaacggcacatgggcagcacataaaaccatcccgcttattttgctccgccactctgcggaattctcgcacgccctcaatgaactcgttggagcggcgatcaccattgtacatccaatggcgtgccactatctgcattatcatggaattgtaatttttttattaaaagctataattttatcagtaaagaaaattaatttcaataatttttaaagtgaaaaacaattatttaacaattacaacaaaaattatattattaatattttaaaataagaacatgaacatattaaagtagaaaatatcctataatatctataatagaacttaacatgattcgtgtatacatagtagtaatgatttgtgtatactagtttttagcgggcacacacttagcatcgttcaaaaaaattcaaacatgagaatacgatgattggagagatggcaacatgaaataatcaaaatagacatatgtccaatatgaaattacatatggcggtgagaaacataggaggatgaagctagcaacctttcaaacaaatcgacgacggcgtagaagcgttgaaatggatcgatcgtgggagatgagagcactaacaagcaagaacattggaagaacaagcaagaacaaagcacctcgagctcgggcagggagaggaagaagggaggagggagattcaatttataccggagagggtttagtcccggttggtgttaccaaccgggagtaaatacctacctttagccccggttagtgccaacgaccgagacaaaagctttagtcccggttagtgtcacaaaccggggctaaaggtttgcatttactcctagttggtaacaccaaccgggactaaaggtccctctccgacagcgcgtgacaccagagccgttggggagggaccgttagttccggttggctttaccaaccgggactaaagatttcttttgtctcgggctccaaaaataccgggactaaagctcatttggcacatcgatgaaagttgctgttctctagcagtgatgatattgatcgatgccccacgccactgtattgtgtaacagcaggaaatggcacaagcatatgggtcttctgacacaccggatgtagatgcacaagcatatgctgggctgggtcttctcgcaaggccttgtttagtttcaagatttctggtcacatcaaatcttgtggcacatatgtatgaaccactaaatatagataaaaaagataactaattgtagtttatctgtaatttacgagacgaatcttttaagtctagttagtctataattaaataataattgttaaataaagccgaaagtgctacaacccaaaaaatttcacgaactaaacaaggccttaacttgtttccaaatgatactaccataatgcatgcgtgtgaagttgtgaacaacgtgttcgtccagaatctctttttttttaatcttgagcttcatgcaagagtgtaaaatttttccgcgtgcgctcttgatccaaataattaatgcatgctccgatccgatccgccgctagtaggcaggcgcgcagcacgtctctctcaaaggtcagatcatgtcgatcgatgccgcgccatgacaatctcgccaaactcgatgccgctactacaagtaccagtaacaaccctcctctatgcgccacacgcacgttctctctcatttctcaatggctcccttctcatcacgtcttcttcatggcgtgccccttctgctaatcctcgtcggcgccgccgccgcagtgacgaccgccgtccatgcggacaccggtggctaccgccggcggcacgcccgcttgttcgcgttcggcaactcgctcactgacaccggaaacgcggccatcttcccggcgactgcaggaggaccttccacctcgccgccgtacggggagacctactttggccatcccagcggccgagcttccgacggcaggctcatcgtcgacttcctcggttcgtactgttgtttgcatttttgccaaacgattcattcactggcggccaattatatattcctcagtgttcatcaagtttcttcaggcgcgcgcatcctctcgatcggtcgtcgttcgtgtgccgatttattgaggctcttacacgctttggctcatgcattcatcacgcagtggaggagctgaaggtgccagagccgacgccgtacctcgccggcggcaggacgacggccacggccgccgacttcgtcaacggggccaacttcgcgctgggtggtgcaacggcgctcgaccaggcgttcttagcgaccaaggggatacagtcgctcgtgcccatctctctgactaatgagacgacgtggtttcacaacgttttgcagctactcgacgcatcagactacggtgaatatatataaaactactactgattaattaatatcgttgtttcttgtggaaactgacttatataaaatatcgtttagctgattccataatacatcagtcacagtcagtggatcgattgatcgatctgagctaataaaactcgtgtaataacaacagatcagcataagatcttggcaagctcggtcttctaccttggcgagatcggtgtcaacgactacttcatcgccctaagcaacaacactgtggacgtcgcggtcagtctggtgccacacatcatcgacaccatccgttcagccctgaccgtaagcatctgagtccactcagcaaaggggtctcaagtctcagcttgattcaaccactactgaaaactacaatctctatgtgcaaaaaccgacagaaaaatctaataaatcctgattatctttttgtttctgatgatgatatcgacaaaaaataaccggcctgccaagctcaatagagagattcaattttccagttggttcgccgtcagaaatatttttttctatcggtcgaacacgcatagaacactagtacagaagtgcttaaagccagcagtggaacataatttttacaggcggtttcaattaaagaacgcctgtggaaagaaattggcttacccgactacaaaaccacctgtgaaaatcaatttttacaaccgcctgtagaaatcatatttctatacaggcggtttcttaagaaatccgcctgtagaaataatttgaacttgaattttttgagcttttcaaatgacctcgtttgaaaaaaccgtcaaaatgaaagttgtagatcttgaaaagttatgaaactttgtagttgataattttttcaattgaaatcatcttgtcatcgaaaactatgtttgaatttctgaaatttgaaattcaaattttgtaaatgacctcggatgaaggaactaccaatataaaagttgtagatcttaaaaagttataaaacttgtagttgacgacttttccatttgaatccgtttagggccacaaataatcaatttatgcttgatttatgatagtatgtggggaactaaactctaatacagacacaactgagtgataggtggagtggtagacaagggtacgcgcgagggcgagatttcaggttcgaatcccaccgactgcgtagcacgcgattttacgcgaaaaaatacgcgacttgcgatacgtgaaaaaatacgcaacttgcgacttggcataactgaaccgatttcatatttttccagaaaaagatttctacatgcggttggcataactgaaccgcgattttatatttttctagaaaaagatttctacaggcggttgacataactgaaccgcgattttacgcgacttgcgacttggcataactgaaccgatttcatattttctaaaaaaaagatttctacaagcggttggtgtggaaatgttctcacgcgattttacgcgaaaaaatacacaacttgcgacttggcataactgaaccgatttcatatttttctagaaaaagatttctacatgcggttggcataactgaaccgcgattttatatttttctagaaaaagatttctacaggcggttgacataagtgaaccgcgattttacgcgacttgcgacttggcataactgaaccaatttcatattttctaaaaaaagatttctacaggccgttggcataactgaaccacctgtagaaatgcatttccacaggcggttctcagttacccgcctgtatagtacctatacctctgtgtactagtggaaaaattgcttatgtccagttttctctcatgtgcagctatcccgacagaaaaatgtcaaaaaaaaaaaacccgacagaaattttttccctgtcaacaatgtatcattaagatctctcacatggaaattatatcggatcacaatcgactcatggctaaaagcttatgtgtagtttttcttatcttctttgtaactttttttgtttaatttcttgattttgtactcggaacttttttcaaattttgcaataaagcacagtagagggggctagggtctttcacccctcctgttttcagtcaaaaaaaaaagacttgatgtcaaaactgctctcctcgtcatctgttaatagtaaaacctgctgtgcagaccatgatctctgccggggcgaagacggtggtggtttcagggatgctaccaatcggctgtgagccgcagcagctggcgctgttccctggcggtccgggcgactacgacccgaccaccggctgcatcacccggttcaacgtgctcgccgagcaccacaaccacatgctgaggacgatgctgagggagctccggcggagcaactatggcaggacgtccctgacgaccctcctctacgccgacatctaccgccccgtgatcaaggccgtcgcgtccccggcgctgtacggtttcggcgacaggccgctggcggcgtgctgcggcggcggtggcggccccaacaacttcgacttcctcgcgttctgcggcacgccggcgtcgatggcgtgcgccgacccgtccaagttcatctcctgggacggcatccacttcaccgaggctgccaataggttcatcgcgcgtaacatgatcaagggactgctgccgctaagccgtgcggcggcgtacgttgcaacaagttaatttttctatgttaagttttgcgagtcatattatgaacgtatattatattcatgagtgtgaaacttctcgtgtaataaggatggtctgattgctcacttgcgaagagatatatataatatagagcaagctgtttttagcatttaggaaaaataaaatgtcttgggctgaaagaactattaattggaacatattgaattgtctatcaaagtcaaaatgaggcaaaatacgaaagaagaaacagtgtataggatgattgtttcgtgcctgcaggttttctcaacatctggtagctagcgacgcatgaaattgtcgattccaactgaacagggtagtgatcgagatgagcttagtagagtaaaaaccaccgtctctatcgtcatgactgtcgtcgctgctaccagccacaaaaagaatctgttgcaaaacatatatatgaaaccaggacgacgatacacgcgcttcgctgcgtgggaactgtgtcgctgcttggtaatgtgtttgactctttggttgaaggagtctatgttactatgctttttgcctaacgaaataattgtttttatttcaggaactcgtagactaccgtaatattctattttttttagacaaaagaagaattgtattagataaaagctaggtacatcaacacaatacaagcactcataaatagatttttatcaaaattatatccacgttgtgaacaactccaaatctcaaactcaaatctg

SEQ ID NO: 3632 - DNA, 4062 bp, Sorghum bicolor
tttttttcccctaatctaacgaatgattagatgaatagctagccaaactggagtgcggctgcctttacatgatttccagagttgtttttggtgcagtatcgcagccaggtggggtcgggggtggcgcggtgtgcggccagcgatgaagcagcggctgccgtccgtcccactcccacgccatcgctgtccacgccctcctcttcttccttgctctactctagtcctggtttgttttggtcggcttccttcacttggtcggcttccttcacttgttggttagtgccccttgatatgattctcatgatccacctcttttaattttttttttattgctgttaccctagtgggtcacgtttaatttcacccaccactagctagtccgatttgccgttataattatccaaataaagccagtataaataaaaagggtttaaaagacgttataatcaatccatacatgtgtgtccatgtgttccttaattcactcttaggggccgtcctttccttactaaggctagtctcaatacatgtttcatgagagtgtcatgcacattaaatagggtgtcacataagaaaaattgctgacttggcagcgtcattaaatgaaggagtttcatcagatgagagaggagttttatccccataaaactcatgtgactcggttacctagtgtataatcttggtaactgtgccgtgaaactatacattgagattggccaagagtagtagtagtagtagtatctgatgaattattatgtatttgagttctaattggtttattatcgtttctttcaccatgactcagaactcataactcatgcttgtgtgcatgagttagaatatcgcacgtcgtctaaccacaagatgtgataccaaaacatattagagcatatgacgcaacatgtaaattgcaaagaaaatgctgagaacatgttcgtgcgtctatatggctggaaactatatatatgtatgtatgtgatcagattgtttatttgtttgagatgtttgttagtccatatatacttagggtgtggtggctggtttgtggctatcattgatcaagggattattagcatacaaaatactagagtagtgacacaactagggacagctagatgagctcacaaaggataaagcacccctaactgaccacttatctgtccgtgtctaccaactggagtgaaggccacaactttccagagctaagccacatagtcacagtccacatttaaatacatatatagccttatttaattagttcctatccacaaacttttcaccacatcctatcaaatgtttagacacatgtatagagcattaaatatagataaaaaaataactaattgcacagtttacatgtattttacgagacgaattttttgagtctagttagtctttgatggacactaattgttatacttacaaatgtactacagtacctaaattttttttcttttcataaactaaacaaggcctatttggtttggttaaacctaaggccctactaatctaaagtagtatatatttgttaatttcctattctcttatcagcagtgtgtgtttatactgtgtaattttttatttttattttttcacttttgtcgaatttgtcagtcattcaacaatatttctctctcacaaagaatcaacgaacaatactttcagccaaacgatcagggggcctgccatgccacctcccacctcttgcgctgatcgatgaggccaccgaccaagactaaacaaatctaagtgtctcagcaatataggtctgcacaatgaactctgccagccactaattaagaaaaccaaccaaaaccctatcatcctcatcatccaccagcacccactaattgagaaattagtggcttggcagcaaaaacaaacaccactaattaatttaattatgtgcaggtatatagccgcgcggcgtttgattaatttcgttacattaggttgcctgccgcgcgctatatataagaagctgtggaaagccatcccctcgcctcacacagccagcagcagcaggtagctagctaggacggccatctcactcagctcagctcatacagcacacacccaataagcaagcaagcaatcaatggagggtaaggaggaggatgttcggcttggcgccaaccgttactcggagcgtcagcccatcggcacggcggcgcagggcacggaggagaattcgaaggactacaaggaacccccggcggcgcctctgtttgaggctgaggagctgacgtcgtggtccttgtaccgcgccgggatcgccgagttcgtggccaccttcctcttcctctacatcagcatcctgacggtgatgggggtgagcaagtcgggcagcaagtgcggcaccgtgggcatccagggcatcgcctggtccttcggcggcatgatcttcgcgctggtgtactgcacggcgggcatctccggcggccacatcaacccggccgtcaccttcgggctcttgctggcgcggaagctgtcgctcacccgggcgctcttgtacatggtgatgcagtgcctgggcgccatctgcggcgccggcgtcgtcaagggcttccagcagacgctgtacatgggcgccggcggaggcgccaactccgtcaaccccgggtacaccaagggcgacggcctgggcgccgagatcgtcggcacgttcgtgctcgtctacaccgtcttctccgccaccgacgccaagcgaagcgcgcgtgactcgcatgtccccatcctcgcgccgctccccatcggtttcgccgtcttcctcgtccacctcgcaaccatccccatcaccggcacaggcatcaacccagcacgcagcctcggcgccgccatcgtctacaacaggtccaacgcatggaacgaccacgtgagtagcagcttattagtcgtagtactacattactagtattgattattaataattaaatccatcatcatatcattgcgcatttagtttgcattccatctcaattaattaattaatctgttattaattaattgactgcatgcagtggatcttctgggttggccccttcatcggcgccgctctcgccgccatctaccacgtggtcattatcagggccatccccttcaagagccgcgactaattagcatacatgcaatgcaagagatcaggctccaatataatcaagtcttgttaattatatgtgctagtgctgcgtgctcgctccttcttcgctgtcgtctcatcgatctacctatgttcgtgtgagctagctacgtactagctagtgtgtgatatgatgccaataaggccgcccggtgtttcttgattattgcgccttcccatgcatctgcagtgtgcaatgcacttgtgagttgtgtttagttttctcacttggagtttggtgaagtaaactaagcatgcatgcatatgtaaatttatcgcctagctagctatttccctccttctatatgtatgctttgcgcaacatatatagacacagtctcgatcttcatcaactcaaattcaagtgtatgacaataataaaaaggaagaagaagactccctgtttatggtgttgcaccgatttcacgtgttccaatgttgctatatatgcatgtaataagggctgttttgttggctccatggatttattattagtcacctcgcctggtttagcaaggttagccttgccaatgtagatgagccaaattagctctcccaagcttgcttgcggcatggaaaatgaggcaagcggcctgcctcagtcctgaaatatactaaaatactctagggccgaaattctatgacaaattattgagtaagccaaatgatgtgtgtagccctcacctaactatagagaaatcttgtgcttatcatgttttgagtcgtctagtggtcaacacatatagtaggtacacatatggttggtgtttttgggagagttaatttacctagaataccttatgatttaggataaattttgaagagttctgctccggtgctccttttctaaaaatctttgtgaatcttaaagccaacgcagttaatacggttaagggtaaataccaggtaaactcgagattttg

SEQ ID NO: 3633 - DNA, 3913 bp, Sorghum bicolor
ttttgtttaatttgtccggccagcgtgatcactttcgtggacgggattcaaccaccggcacgacgaatacgatcgacagcactgcccaaccagcagctagcgtcattagctagtgtggctaagcttttctttgtccttgtttatttattactacgtacactctgtctgtgattgtgacctaattctgcgtattccatcgggaggctgcagcagggccacaggatgagccgaaatggcggctggtggtgtcgtcagtgtgcagggtgggagtggagggtcggtggagggcggctctatgcgccaaaaacacaagcaatcatgctacctttttttagtatttattttttgttttggtccatttattagcacggagccagctgagagctcatccatgaattactatactgcttctttattcgtttattttgttaggatgccataaccttatccaggcatggaacatatgagagggatattcttgaataatacgaccacataataactaacaaattatgttcggtcttgtcaataatctttcaccgaggatgttgcaatgattatagtagagaagaacaaaaaaaaacaggatttaagttagtgagaaagaattaaacacatgtgaagtttgaggttgaaattgtaacatgcatttcgtagaatcaaccgctagcaattagcaaatctatagcatcctttgctactacctgagtaatttcgtggccgtgggtacctaccaacccaagttatgacatatttggatgagctagacgtagttcaaagtaaaaattagttagagttggccagctagttaactagtctgaatagtctatccattagcccttttgtttggatgggctaaaactatttttagctagctaacaatatctcttggtatccagaccctcaatgtcatgggtttgaaacataatttctttttttttctagaaacaagaaaaaagaattcagtatagttacaagagtttacaacctaacaatggaatggaatactatgcggattatttggcacagtatggtattatttgacgccgtatttttaatattctgatcgagtgctctgttttttagactctaaatcatgtctgacttgctatattgaattggtataaactgcaaatatatagcctacttaacattctccatataaatgtaaaacactgtacaatcccatgtacatcatgtaaaagaaaataatagtgttacattcaaaatgggggattagagtttcatagtaaatgaaccatcaatatgggaatgctttccctccgctatacagtaaaaaaatccagaagtgaattattttttttattgtatcatcttgatgtaataatgatgaattaataaaatccttcataaaaaaacagtggaatccaaattcctgttgttttttatggaaagttgtgggaaaacaaaaatgagagatccattatgttcacattatatgacttatatatatgcatagttcacatactttatattccatatactgcgctcaagctcaacagtaaaaaatccagaagtgaattcttttttattgtatcatctcgatgtaataatgatgaattaataaaatccttcctccataaaaaacagtagaatccaaattcctgttgtttttatggaaagttgtgggaaaacaaaaatgagagattcattattttcacactatactgtatatatatgcatagttcacatactttatattccatatactgcgctgaagctcaaacaatgagttttgagatgggtccttacctcattcacatgtctagcgggaaatttgaacttgcaagacatgcacatgaaaatagctaaacaaggaaaccttctctgccccaagcagaacagctacccatgagcaccaaaaaaaatcccttttttatgcattagaacttattaaaccttcatggatgccctcctccataaacccctataaataccctccatggcagccctaaaacaacaacacaagcaagcaatcagagcttctcaaccacctcttgatctcttgcaagcagctcataactccaaagcttgtgcagcagctcagtcagatgggcaaggaggtggacgtgtccactctggaggccggcggtgtccgtgactatgcggaccctccgccggcgccgctgattgacatcgacgagctcggcaagtggtccctgtaccgcgccgtgatcgccgagttcgtggccacgctgctgtttctgtacattacggtggccacagtgatcgggtacaagcaccagactgacgcgacggcgtcgggcgccgacgcggcgtgcggcggcgtgggcatcctcggcatcgcgtgggcgttcggcggcatgatcttcatcctcgtctactgcaccgccggcatctccggtggccacattaatccggcagtcacgttcggcctcttcctggcgcggaaggtgtccctggtgcgcgcgatcctgtacatggccgcgcagagcctcggtgccatctgcggcgtcgcgcttgtcaaggggttccagagcggattctacgcacgctacggcggcggcgccaacgaggtcagtcccgggtactccaccggcacggggctcgccgccgagatcatcggcaccttcgtgctggtgtacaccgtcttctccgccaccgaccccaagcgcaacgcccgcgattcccacgttccggtaactgctgcacctgcacactcctttgagctgtgatcctctgcccattgcaagaacttgtgcggttgcattgcctgttgttgtattgatgaacgggatgatcaccaggtgttggcaccgcttccgattggattcgctgtgttcatggtgcacctggcgacgatcccaatcaccggcacggggatcaacccggcgaggagcctcggcgccgccgtcgtgtacaacaacagcaaggcctggagcgaccaggtatcacatatctcgatctgcctagtccctacacacattgtccaagattgcagcagtaattcacacatttgtgttggttgttcttgctgcagtggatcttctgggttggtccgttcatcggcgccgcaatcgcagcgctgtaccaccagatcgtcctccgcgccagcgccagggggtacggctccttccggagcaatgcctaggctcacctcgtcttggtcagcatccacggccagccaggccgtgactgagcgctccctcccgaagtttaagttgaacggagagggagaccaccggcgtggttaatgcagtagcagtagctttcagtcaggtcaagtgttgtagctgccggcaacggcagctagcgcaagtgtttgtgtgtttgtgtgctgtggaaagtgtggcttcatcagtgtctctgtgtaccctgttgtcttgcagtcaatttaatttaataaagatgaaagaatgcaagtgatgggtaaagttgagagcgccccgttcttatattaaataaaaattgattattacccttacactcaattcaagtctcattctatttggcaaaactttccctccaactttaagaatgagaagattgcttccagagaagttcagagctgccataggcttgtcttccatttcatcctttgctcctcaagcccaaatgattcggtattttaggtagtcattttgattatggtggacaaacatgacttcaaagcggaccaaataatacaacacatcttgactttaacatacacacaacaactcaaagggtacgaggtgtttcccaagcttctaaaggtatgtacaacctatagacagggggtcatccataagagtctcgaattggacatacagacaactaaaaagatggtcgtacaacctatgtgcgaacacacagttgaaatgtgcccttgatgttcgatttgtgatgagtgattgtcaacgtgatccacgacctaggttgagttggtgac

SEQ ID NO: 3634 - DNA, 3423 bp, Sorghum bicolor
cactgtgttaattcctcatgattgcgttaattcctcagaattaaacgcaggtaacactgcgtatgttaaggtaagccagacaatctgcccggcgtcccctttgatccaactactggaagtggacacttagggttcaagatttcttacagcttgcattgtactagtactgcaacttgtttctcttacatcgagatcgtctttaggtccatgcctgttgcgaaaaactcgaggtcgcctctgcaacgtcaaccactgcaggaggaaagaattcttctggtgatcagcggatgcctgtgttgatattcaaacatgaagtcaagacgtagtgcaggtcgtcgtttactagttccactctgagtagaatgctagaagctgatcacaaaaactagttaaaccatgagcctcattattatgggtgatctcgttatcttttgattgtcgtgtctgtcaccagctgtacaagtttcactgtgctggagagaattgtcaaacgcatatgtaagcaatgaaagtcatatacatgtatatttgaggatattgtagtatacatgatttttgtagttttttcaaccgaaacaatttattacaaacagaaagccaattaaaaaaacttacattaccacgaggacccataatccttgtggaagatgcaatttttcctgttgttctcaggtcgggtaacatggattctgtattagagcttggaatttgctaaccatattttttttttcagttttgtattgtatggtccttagtccaagaaccctatataagcacacaaggagacacgacgtctaagtgaactaaaagaataacccatacgttgcctcagattttcttagaaaaaaaaaactagatcatcattacatttgatattgtcaaaacagggcaagctaatgaaagaatctaataaaaagctaatgtgatattatattggaattataggaggatgggtcagtcaaataaatagtatgatgtgagtgcttactctctccatcctaaaaagaatagaaatctcatttcttgagaagtcagataattttaagtttaaacaaaaatatactaaaaaaagtactgatattttttatctgtaataactaataagtattactagattgatattgggatatatttgcataataaacatatttgaagatacaaatgttgatattattttttataaacctagtcaaacttaggatcgtttcactcaagcgagacttccattctatttcggacgaagggagtatattaatagattaaaaatagtactacctccgttctacaaaaatcaattcttacaatctattttgaattttttaatttggccaactttgtaggaaaggtaatagtacctccataacaccaaataggcatattagaaaaatatatttcatgatatgtctggtgatactaatttgttgtcgtaaatattggtgtatttccctataaggttgatcgaacttagggcttgtctagaatgctgtaaaatagtatgatataggacagctccttaagttattaatttgggagggagaggttaatcttacgttatggaggtggatgcatagagaatagtaattgtacttatcagaaggtgatgtagaatggtttaagcaaataaactgaattactcggagcaagagctaggtttagcttcaatgagtcttccaaacaccaaaaatggtagtatcaaatactaaaactttatgccatcgataatctatggagatgacttgaagctaggacttcagcatgtcatcgagagcctaaaaagatactagtgccaagacaaaacgtaaattgtaaccacttcgttacttgcatagttgcatgtacttaatggtcaagtcaagaagctccatccagtgaatattaaaagcctccacttggtcttctattgaaacaccactatcattaatgtgcatgctctattaagataaagaaccactgcatggcccaaagcactataaatacccaagcagacttcactggaactcatctcaactcaagtactactctctagcggtagctcacaatggcaggcacaaagctaatatcactggggctcattgttctcatgagcatgggattagcaaatgctgtgagggtggctagatactctagtgctgatgggtcaggacaaggagggggagggggtggcggatatgtgactggtgcgggatcagggggagggggcggcaccggattaggtgagagtggtccgaatggtgcccatgcaagtgctggagggggtggcgcaggtggtggaactagccaaaatgccgggtctgcatggggtgtagggttagggtcaggttcagggagtagtacatatagtggtagtggagaatcttccgatgctggtggtactggtgggggtggaggtggtggtcaagctggaggttcttgggactccaatgctcaaggttctggtagtggcatcggatcaggctctagctatgctaacaggtattggaacggaccaagttatgcaggtgcaaatgctaatggcaatggtggtggcacagggaacagctacaacggtggggctggcggcggtaaaggtgctggatctgggtatggcaatgcctacccctgaattttgtatcaagtcaatctaaagttggagcccatcgtcctttcttgtttgaagtcacagatttttttttttggttatccttttgttagaattgaattaataaagggcccaactgtgtctattgtaagcatgtaaggtgcagcttatgagaaaatgtaggcacgccagtttatgaaagaaatcatactctgtcatttggtcactacacctgaagaatttttttagaaaaaaaaaatctttggagttattaagttcatcagatgcctacaccatgcacatcacatggttgtgatctatcaatgaaattacttgagtagcttatgtcatatataatacagaagcacagatcacttacaatgagctcgctcttggcggtggtctgaagctgaagctcttgctttccttctcgtcgtaaatctggttcagtgtaattacaacctcgtgctcactgtcagtttcactgtcggttttagtttgtgctcgctcgggtgcggcggtaacctgggttaacttcgacgccgagtttgtaacagttctccttccttcttaatgaaaaacgtgctcatgcacgatcccctaaaaacttacaatagctctaactgggacaatccaggcttgaacctaaatagcaagaagtgcagccacaagcccaataacgttggtgataacatcaaaaaggtgatcctgtgcataggccttaactatttcattggtgaatgttaagcaatcattgtcccaggagaagcttcaccagtgtcactgagagcataatattgacaacccagttttcctgctcttttgtcaagcagaactcatctccc

SEQ ID NO: 3635 - DNA, 6603 bp, Sorghum bicolor
tactatatgtctattcacatgcaaggaagcatgtacgttggggtcttgtttagttccgaaaagtgaaaagttttcggtaatgtagcactttcgtttgtttgtgacaaatattatctaatcatagactaactaggattaaaagattcgtctcgtgatttactgctaaactgtgtaattagtttttgttttcgtctatatttaatgtttcatgcatgtgccacaagattcgatgtgacggggaatcttgaaaatgttttggttttcagagtgaactaaacaagacctgggtcccagcttcagaagaataatcaggtgcaacaagaggccaaatcggcaaagactactaacctcacttttgttgtgtgcaaatgtgatgccatcatcagctcatcacggctgttcagctgttgacctcttggcttagcataagagccgccggccggggggttcagcagcctccgctccagaggtcaaaactgtcctcagaccccccaaagggttcaccagctgtgatgccagtccacattgcagcatagaggttgaggagccctagttattagttacagcttcattggctccccaagaaaattggggacagtttcggaatatgctcgcaccaaactcttttttgttcagaggttttgcatgttagccctctaagatgcgagtaattgaacctggacctgtttgtgacaactggaccgtagattcacctgaaatggatggattgttttgttttatttttttttaaaagcaagtacggaatgtgttttctattgtaggtgtttgcaattttttagttcccggctgctcttcagatttgtacgctaatggtgcttttgctaactaaagatacggagaagcttcttcagtgcacacaggaattttgtatgtttgtattttattaattttctcccagggaatagaaagctagaccaaataattactcatccaaggctagaacatcgacgacaaatgaaaaaaaaacgagggagacgtgtaaacctagacaaatataggatgaagatgctagtgttttgtacagaaaatctgtgtttttttaaataataacacgacataccatacacaaaccttcactttgaaatgtttaagtaaatttctcacgaaaaagtaaatgtattttttagaggtgatatgtgatatttttgatgtattttgctaaagtgcatttcatgtaaatctaactaacgcagatatatacaagttgatggcattatttcactaatggttcacaaatatgcaaaaatatctcacaccaactataagtagtatgaaagaaagaaagaaaaggttgaaagcgatgtctgatgtatactaattgatatgatactccatccaatgagaaaaaaatatgccatgcaaattgaattgcaaccaaaccaccaattttggctatgctatgaatacctttttccaatgacaataaaaaaattcaaaatttatgcatacactttttgcatgacgtggacgtgatataggactgaggagagggtacaatattctctcgttggacatctgcagattttacatgactacctctcagcattcaaaaaaaaagagccacaaacatctcaagtaattgaaaaaaaaacttcaacctatttattttaagtaataagtaaatatactcctatatatatatagaataaagatgcaaacctaatgagatttgaactgtaagtactttttttatagaaacaatattcttctgataacttaagccataagctaactttattaaattactagtccataccagtatcataaaaatttgcaaacaggttcacatgaggtgcatgccccaccagccactgttccttgaaaccccaaaacccaaacccatgtgcagcccaaaccaatggtctggtctccctagaaaggacatttttaaaaaagccctcgcaaatattttcataaaagccctcgcacttctccagcccaagtgcccaacctaacccctccaaagggtcaaaaagacgaacgagaaaaaaaaagaagagacgcaccggcacctaccagccgccaccttcccctttatactcgccggaggcgaaccaaccagtgctcgtgccaccctcgtcctcctcttcttccttgtgatctccgaattcccatctcagattccaagggggcgcgccgtgcaatccccggctctccccgcccaccatatatccgaggctccgcccccgcgtctccaatccttcgctgttactagttgttgttgtttgtctgccgtgatttgagccgggcggacggacggacggattgatcccgggacgaggtgtctcagttcttgatcctgggaggcgttcctggttgatttggtgggaagcgaaggtgagatccgttcttttgatcccgcaaagtttttccttcgtttttgcaaatataatttgttattaggccgttgaatgatctttgggtaccccggggagtgccgtcggtcgctgttggaaccggtaccgctgccggtgaacgatctttacccacgttctcgcgccggtgaccaccacctgccggaaccggtcccctcgccgctgtttcagccaattgcacgagtgcaccacgtcaccgcacaagttcatcccttttttgtctgtttgtttttattactgcgatccaaaaccaatctttttggttttcctttcgcgtgtgggtattagtaactgaaaaaggtgggtgatttgcatgtgaaatctgcttgaatagatcacgggacttggggcccttgcacggagaaaggtgggcacccttacgtgtagattacaactcgaaagcgatgtgctggatgcaatttgtcctcatccagagttttagagttttagcctttatttctgttgggggattcatgtgcagaacttttgaaggtgcttgctttgccgtgtcgaattctgtagtattgtcttcgtgagaagcttatgacttgtggggtgaagcaagatttattgctttggatcattcggctacatgctgatatttctctgaagtagtcttcagaagaaattttccatatcgctttctgtgtactaaaagtgctggtgcattcttttgcaactcaaagcaatgttttattcagaggaacatcaaattttcttttaccaactctttaaggaaaagtccaagcttttgtgtcactttctatatgtacttcatatactgcaatctaaaacaaaacttcctttgttgatctgcagaagccatgataccttccgtgaggctctctcctggtcctgcagccttctcaggctccagcctacgctcaaaattaccgtcaattccatccatctctagtcttaaaccctccaaatatgtggtctcctcgctgaaaccactctacctagcaccgctagatggtccacgcactgcagagcttaagtctcggagacagccactcgagttccgttgcgctgcttctgctgccgatgacaaggagtcaaagactaaggcggtgccagttcagtcagaaggcgcgcagaggctaaagatttccatctatttcgcgacctggtgggcgcttaatgtgatatttaacatttataacaagaaggttctcaatgctttcccttacccttggctcacctccacactctccctcgcctgtggctctgcgatgatgcttttctcttgggccacccgccttgttgaggcccccaagactgatctagacttctggaaagtccttttcccggtgagttggttattttgtgccagtaattcttcttttattttatttatctgcctggaaaagtgtaactgaatttggtgattaaccgatgaaggtcgctgtggcacatacaattggccatgttgctgcgacagtgagcatgtctaaggtggcagtgtcatttacacacataattaaaagcgcagaacctgcattcagtgttttggtgtcaagattcatccttggggagacgtttccagtcccagtctatctttctctccttcctatcattggtggttgtgctctagctgctgtcacagagctgaactttaatatggttggtaagtaacaattgctttttccacctcctgttcagactcttgcttagaaattaatatatctttttctttgtactattagtgtaaagtaaaggttatgttttagaagcacatatttaactagagcttaatagattcagttccaattacttttggagaaaattgatttgtgagattattcttttacttaacctgtatttagatttctgcgctctcatgaacttatgtagatttgaaaaaaaatgaataataattgtttaagaatccatttgaagaaaattttataaatttatattctgatactcttctctaacagatgaagcatgttattgtcccttttcccctttttcttcctgaacttttatgcctagactagatttaaactagagacaaaataggagtcatatacatgtttgcaattgttttcaaaggtctctcacgtgttacatgaatgaactgttctcccttttctcaatgttgatgtttaccatttgccctcccaccaggatttatgggtgccatgatatccaaccttgcattcgttttccgcaacatcttctcgaagaggggcatgaaggggaagtctgtcagtggcatgaattactatgcttgcctgtcaataatgtccctggtcatactgactccatttgctatagctatggaaggccctcaaatgtgggctgctggttggcaaaaggctcttgcagaagttggacccaatgttatctggtaaacaacaatttaatatttacaattttccttacatagttgtcaagtgtggtccctacccacattacatgagatggcttgaaacacttgtcatgtttttttgctattctaagagagacctacttacgttgctatttcttttctgttgggaatattcatgttagactgtggagctgcccttatcatttatcgaggactgatatattatgttggatcaatgtccagatttatagtaatattatatcatgattgtatgtatattgatattttttcctaataatatgttactgttgaatttataggtggattgctgcacaaagcgtgttctaccacttatataaccaggtgtcctacatgtctctcgatcagatttctccattgacgtttagcattggcaatacaatgaagcgtatatcagtgattgtttcatcgatcattatcttccacacacctgtacgccctgtcaatgcactgggagctgccattgccatccttggcacattcctgtactctcaggtaacttggcttcaaatttttccatgtggttgtgtttttcctctatatactgaaatgatcactttcttctgaattggggaaggaaaatagaatttatatttagtgtctaattttcactagtcaatctgcattggcagatgtgtggtcgatgaaaaattagtgcaaaaattggcatagcttactttcttaatatgcttagttctaacctaattttcatcaatctcgaaaactatgattcaaacaagtaggatgggttgtgttgaggagtagcgacattatattagcacaactgtagttgattagaaagataaatcttattatattttttccccccacactgaaacacatagatggtatagggtgctaagaatatgtgcttgaaatctaaaacacgactgagaaaacttagaagagaatcactggtgggttgtgcatggattttgatgcatccagtgatgtgcgctaaactctgccaaaattgacattctgatgcaggcaaaggcgtgaggctaaagctctcgcaaagatgagagggggccatggatgacgaacgtctctgcagaatcagtagcaagcactgaatccaattttgcttgttccagtgtggcatgtagatatagggttaggtttccgtatgagagaggtaataatggatgaatggctctgctgtttcgttcttgtttgttgaccagactgaaatccataggccatgaactgcggtcgagtgagtgtacctgaataatactgtaacggaattcgccgatgctgtttctttctgggtatatatagtccaaccgaaatcgcggtttcaatactttgcactttattagtcgttatgcattcgagtattttaacagagttaagttgggaacacgagctcatgaacccctgcctttctgtcatttgagcaccatctgttcggctggctgaaggaaaggctgatgctgatttgttacgagataaaaatattgttccatgaatgaaaagtagtggtgataagttcaagcgaacagaccaagcagagtatgtgatgttttttgttttgctgcattgtgaatttgtgattccgttgccggtttagaagtaaaaattaaagatagtgcaaatgcgtggaaggtttgcaaccttgggtcgccccgtgctgttcctttctacagctctctctctctagccgttgctcaagactaggaatgaaaacggatcggatacggacggatatcactgatatcatatttgtttttatatttctggtcggattcggattcgaatacggataatgtcaatcatatcggataagatatgattgaatgtcgacatcataaatataagatttaa

SEQ ID NO: 3636 - DNA, 7594 bp, Sorghum bicolor
tactagctactgatcagactgctctccgcattcagagttcagaccgagacagagagggatgcgtctccgccattcgtgcctcgcgcggcttgccaagccagaggctgagcatgcatctcccgttactagcacggggctcatcggccatgaatgcaggtttccatcggtgcagcttggatcgagacttggagccggactgaacatgtggacaatgcgagaacaacgggtctgactctgacccgaccacacagagttcagagccacaagattgcaaagcaagtaggagtactcctggctagcatggatcattgcacggtcaggtacagtactcctgcaagaccaccacaccacacttgatagagaatgacgcaaaagagggaaaaaaaaaagggtcaggatcaagtggaggaagtactagggctcaaaatctacaggccactagtagtgccactgccatcggacggacgtaacggcactgaccaaaatgacagtagcactctgattaattgcagaaggagaggaacatcaaagtcctgttgacttcacaggcattagcagcaagctcacaacgaagctccgattcctccaaagatcttgcgagcaatcagtcaccgacacgcgggccctatgatgccctgagagtccagtccggtattactgcttctatacatgcagctctgtttattaccgacaacctgacaaacgaaattttctaagtagttgctaattagggtttagggttttactgcttctatacatgcagctctgtttattaccgacaacctgacaaacgaaattttctaagtagttgctatatagaacacgccccccgatgttcggaatcttcggatgggcttgttcctagttcccactttccatgccatgagatcatcttctattattttctcccagaaaaatatatcctttgcatcttcttccattattgcacatgagcccagtatgctaaacgaaggcttcttcgctgacactgaggtcttgtttagatacatccaaaaacccaaaactttacaagattctccatcacatcaaatcttgcggtacatgtatggaatattaaatatagataaaaataaaaactaattacacaatttgcctgtaaatcgcgagacgaatcttttaagcctagttactccatgattggacaatgtttgtcaaataaaaacgaaagtgctacagtgtcaaaatccaaaaagtttttgcatctaaacaagccctgacccgggctccaaatcactgatgagtgtgtaacgattagtccctgaactaatagaatagtgaattagtgatgagcccatgcggtcaacaaaataaggcatcagcgtattcaaatcgttctgctggttaggctcctcttccggtctattcctaggtagggttataggataactctataactagcccactatcaataatttacactatttttcagatgtttttatttcttagcttggcattttattttccaagaagaaacaatatctgttgaggccgcaaaccttgtcaatgctattaaaaaatttggcacattaatgctgccaagaatttcgcagggctcagtattattctgacctcctgccgtctgccttaaaaaaaaaactgaccctgcacacagagcgtcggacagctagtagcttatcggccgtttattttgtcacaagctttgcttaaacaaggtactttttttttgcgagcataaacaaggtacttcgaagcacaccttaactgagatgatgctcttccatttccactgctatcttttagtttgcattattatcgagagcagttgggagatgctactagctgcctcaagtggagggatgccattgacctcgatccatccccctcatgtgcgttcgcacagcctccctatatacacagccccacgcacccacaccacaccacctcgccctccaaaccccatcatcacccacctgcccttttccatttgctttgctagcttcttcctcctctcgtcacctcgccattgcatcccatcttgtgctcccagttcttgctgctgctagctcgatctttcgcatgcgtctaactccgttctcccaatcctagcaagccctgagagagactgttcttgtgagagagctggacaccatctccccacccattacgccttagccaaaccttgagaaaaacctgtggagcatgtaactccagtccctatcaaaaatccaaacccaacccccaaaaaaacacacaaaaaaaagaaatcaagatctccaaaagcatcggtgttgcgaagcgaggcgtaagttttggtaggctggatacttccccactaattccttagcacaaactcaacaaaagcctccggatcatgtaagtttcgccatcatctttgctcgccacccaactgacaaaaaaaccaaaaaaaaaaatagcaagaccatccagcatcatgcatcgctagttgtagccatacatcagtcgtagtctctgctagtgatcggcctgctggagcccatcatccggccattatcatagcatcacctcagcaaaaaccatcaaatcatgtaattagtacacttcagtgacctatttctgctgcactgccggcagtccaaaaaaccaaaaaaaaaagagattgtcttcgagagtgagagcgagagagcaagagagggagagaggaagcaagcaggtgctggggtagagctagcaattgcaaccgagcagcagctagcaatggcggagccggggtcgacgacgccgccgaacgggtctgcgccggcgacgcccggtacgccggcgccgctgttctccggcgggccgcgggtggactcgctgtcgtacgagcgcaagtcgatgccgcggtgcaagtgcctgccggcggtggaggggtggggcattgcgacgcacacctgcgtcgtcgagatccccgcgccggacgtctcgctcacccgcaaggtacgccaccaccgtccacatgcgcgtgcacatgcacgttcttgaactcgcattttcttcttaaagttcttctcgttcttgagagggccacggacatttcgtctctctctagctccggccgtgtgatgctttctcttcttcttctttttctgcctgcacggtttattttcttatatatccatacatacgtcggttctttgacgttatttttgtgtttgtatattctgctattattagtcgatgagggtacagacatgcatcctcttattttatactgtgtaggtcaaaactaacgttacaacagtcatgtgtctgaaagcctgtaacaacacggccctgacagtactacctttgtatacaaaaaaaaaaatgtagtaggcgcgatcgatgtgtcataagttgttgactgttgaaaattgattccttttgccgccaaagcttcaaactctaggcattattagtatgggcgccagttacagtagctaatcactgacaatttctgtgatcttatatatactgctcaaattggctctttatgacattgttcttgaaatccctcggttttgcatgatgatggcttgatgagggacactttgaactggaagcagttgtgcttgtgctccatatgtccgtaggacaaatcaattttcagaatctttctaggcatgcaccagctagttctttatttggcgccctttaaactaaggattacaagtggtcaggctaactgtatgagacaaaagatcacgatcacactaacatgcatggtctcaactgtttcgttcgcaagaggtagtgatgaatggtgatcgatcatccatttcaaattataagttattctaactgtttttatattcatacaaaatttggaatgatgggagtacataccaattaattttgacttaaaaattcaattaattttgatgatttataatttggaatggacataccagcttgtttagacgtccatgtatgtgctgaatctatgtgtgcatgtgtggtttcatgtgaaatttagactaaattttacgccaaaccactctcgcacacatgatttaagatggatatatgaccatccaaacaagcctaactatgaacgtactagtattagctactgtatgcgctagtggtagtacagtagcttcgcaagccatgccttgggattagcagcggctacaaaccgacgaggacgttggatctgacgcaggcggtcaggaagccagagcgccttgttcttgttcaggcatctaggaatatttcttcaaaaagcccacacatgaatctaaaagaaaatcatttaccatcatcaactctggtacgagcaaatttttgcggatcacaccttgctagcatgcgaacaagcacataataataagaagaaaacgccactaaaattcactagcaaatagtgtacctagaagtagcatagttggtggggtgtgatgggccggctgatcgatctccacgctgcctgaagcctgcataacgcgctcccctgttgtgagcccggaagtacacaaaaagtggctggaatttttggcttggctaggcggcgccaccctgcgacgaccacacgtaccaaacggggatgggtgtcgcttgtgcgacgccacaccatcgtgtcccctaaccgaccgccattcagcttgtttcctgtgctctccaggtataaccactcccgggaaatgatactgtgtacgcttgtttgaattttgtattgggttgatgaagttctatttgctggatttgggttccttgcattgatccccggggagaagctaagtccaaagaacaaatcaattaattggtcaaaaatcagtgaccccatacatataaatatttttctgtatttggctatgttgctttcatacttaattcctccatgctttaatgggtacagctgaggtcttacgtcttatcccccccaaaaaaaacatttagttcaataatggaaatggttttgacctataaactactcaatctatttcaaattataagacatttgatttttttaccctaaatttgaccattcatcttatttaaaacatttatacaaaatatcatttttttatcgtggcttgatttattaataaaaattttttaacaataacttaaatttaactatgtttgtataatggatggagtactttggtaactttcgaccattattgtagcaccgccacaattgagtactgcttgttttttaggcaataaatagagtgtactgtcaaaaagtgacgtttctcaaacgtgacaataaactgcgtctactccatgtacttctaaactaaagctcatgtggaagaattgtacatgtgtactaaatcggccagcttgtcacgttcctcagctttgaattgaaaacacacgggcctagttacgttgtcgataaggagctacgtatagtgtttttggaacaaagaaaatggtacccccaactccaattatttcgtgataaggtacggttcttggacgtgacacgtcaaaaagggctatactatgtcccaaactcaagttgacccgggcacccggccggcgatggatccaggcgtccgtgaccggagtggttgcatgcgttgttttggctcgcgcgccggtcacgtccattccagtctcaatctgtccatgggttgacaagatcgctgaattattggcccccggctataatatcgattgggtgttgttttggtcaattctagctagattatgcatgttgttttgaaacaaacaaaattcaaataaatttcggcaaacaaacacacacacgcattggaaactgtaaataataatgtggttcctgtatctgatgatggggcatgcatgcatgtgcgcgcgcgtacgtgttgctcctacgtacactacagctcggcgcggagttcgtgggcacgttcatcctcatcttcttcgcgacggcggcgccgatcgtgaaccagaagtacggcggcgcgatcagcccgttcgggaacgcggcgtgcgcggggctggcggtgaccatcatcatcctgtcgacgggccacatctccggggcgcacctgaacccgtcgctcaccatcgcgttcgcggcgctgcgccacttcccctggctgcaggtgcccgcgtacgtgtccgtccaggtgctgggctccatctgcgccagcttcgcgctcaagggcgtcttccaccctttcctctccggcggcgtcaccgtccccgacgtcaccatctccaccgcccaggccttcttcaccgagttcatcatctccttcaacctcctcttcgtcgtcaccgccgtcgccaccgacacacgcgccgtacgtatatacatacatacatggtgcttgcatatcggtatatatataaagcaccatcgtcgatgatcaggttcagctctgaatgaacctctgtttgttgcgtgcaggtgggtgaactcgccgggatcgcggtgggagcggccgtgacgctgaacatcctcgtcgccgggtaagtctccttgcattgcttgcttatgtattgtagtagcacgcacgtacgtgaggtgatgagcatgcatgcaggccgacgacgggcgggtccatgaacccggtgaggacgctggggccggcggtggcggcggggaactacaggcagctgtggatctacctgctggccccgacgctgggcgcgttggcgggggcaggcgtgtacacggcggtgaagctcagggacgagaacggcgagacgccgcgcacgcagcgcagtttccgccgctgatcatgacgacgcgcgagacattattgtccggccggccgtgcacgtcacgcgccctcgtcgtcctcctccgcgtaacgcacggccacgccgcgcgcgcgtccgtggtgtccgtctcgtaccgtgtcaagtgtatcgtgtcggtgtcgagtcggtacgtactgtgtccgtgtctgtgttgcaataagccccgttctgcttcgtccagaacggccggcggcgtccagtgctatgtgtggtctgtgttgtgacttgtgagtcggattattctgggtcgtcattcgtcaaagagtcgtgtgttttgaacgagtctctcggtgtcgggtttgatgcgatccatcatcgtgtgtcttgaataaaagccacgctgatgcaccggctgacgggcatctggatgtgtggtttctgaagtaggactgatttgctttactttccgggtccttaagtccttggagccctctcgcctctcgggcagtttttgcttgagctaaacgcaccgaatgttcataaaatttcgcaaaaaaaaaagaagaagaatgttcataaacttacggattttttgctttaaaaaaacatatacggatttttttagtcagattaattaacttcaaaagatggtttttttagatttatacaaaaaaacaagttattcatcgcaattctaaatttcaaaataactgtcaaatctagacaaccacggcttaagatctcaccattaaggtgaggaaaagtgagcttagctaacttccgactcagattaatactacctgcaattaaggatgaaaacggtcggaaacgtcgaaaaactcctaaattgttttctacttttatatttgaaatacgaaaacgaaaacgaaaacggtaaagtcgaacatgaaaacgaacgcgaacttacgaaatatcaggaatttcgaaaacgaaccaattc

SEQ ID NO: 3637 - DNA, 4648 bp, Sorghum bicolor
ccgtgtccggaaaacagatatgggtcttgtttagctttcaaaatattttgtaaaattttttacgttttcatcacatcgaatcttgcggcaaatgcatatagtactaaatatatataaaataaataactaattatataatttatctgtaatttacgagacgaatttttttatcttaattagtctatgattgtataatatttgtcaaatataaacaaaaatactactaatttctattttgtaaaaaaaattaaaagtaaacaaggccatgaaccactgcctgccctcactggctgtagagatctgcagcagcgtggagcacatgttgtgatagtaaccgggacccagggccagcagcgatcgacgacgacgactccagcgtccagccacgctcacgcacaggcgggaagcgcggggccccgtcagctaatcccggcggcccaattagcggcgaggggtcacgtcgccggcgcctcctaatccacacgagccacgagtccccgccaccctgcacgcgtggctcgcggacagctccccggccggcgctttgcctgagctggcgccgcaagcgacccgctccacgtcgctgtctccaagcagcgctggaatcttgcaagaatcccccagcatcccgccgagcttattacgaggtggttaaaacactcgtattgacaacgttgttaccgaccatgactctccagggaaaaataacaagattttagcatttttcatgcaagacgaaaacacaggacaatggagagacatggccgaaattttcgtctggaaactgactcggactcggatagcccagtattttatttaattgctctggttctgatgactcgccttgtgcgtggcttaaaaaataatagtggcacctacacaagaagctgtaccgagtttttcttatacattttctagtgatgatcgatgattctttatattatcgtatatcgtagccattcattccgatctgtaccattccctcgttgatctcccatactacagagaaacatattgttacatgtaatatttttttttgttatcacttggagtttattaatggagtttccacattaccgtcccaagacacatttaaaaagggataaataaattacatataaagtcgttttagacaagatttaatccaaacattggaaataaaaatcataaataatttttaagttttttagtttgaaaatgtgaaaaccacgtgaatagatttgtcttaaaaatatttttataaaaatatacatataccactttttgataaatttttttttataaaaataagaagtcaaaattagactttaaatattgtgtcgttgtcttaaatgactttctttataagtatggagggagtaattcataaaaaaaattatttaaaagatctagccatctattcaatacggtctataatgacgattgaatgattaatagaattagctagatgatatatttttttcctagaagaattactagactcgttacaataaatcaatataaagtaatccctaaatttacatctatttaccgacatatgctattttgaaaacataatctcctacaaacttgcatgtagcttatgacttcttccctccatccaaaattagattaaaaaatacactacaaaagattattttatattggtggtacatataaacaccaacttataatgtttgtgtcgcttaaatttctagtctgtgtaaggctaatacaataattttaaagaaacacaatattcacttgacctctctagaaacttcaccaaggaaaagcaagttggagtgcggcaaatccgccaactccggctgcagatgtcacgactcacgacagtgtcacactcaaacagctcattttcgccgctaaagaaatatagccctcgcgttccaacccgataggcgcggagagaccggccgctgccggtgcccggccccagtcccagagccccatgcctgctctgctcggctgtatatataccacctccatggcatctcttcctcaccaccgcatctcacacccctaagattgagcttagcttagctccacactccagctccaagcacacagtcgtggttagagggccgtgaaaatgccgatcagcaggatcgccgtggggacccaccatgaggtgtaccacccgggcgccctcaaggcggcgttggctgagttcatctccaccctcatcttcgtcttcgccggccagggttccggcatggccttcagtgagtcctccactcctactcttgcaacacaagctcgatcggcagctctcgtatggccttcagtagtttgtatttttcattggctttccactgacattaaacgagcagctacagaacatgagtacagagtagagagtagtactgtatctatttaagttcagcttatctgtcatgctctagcacaaagtcatggtcggctcttttgagttcgtcactgaaatgaaaggaaaaatgaaaagtcattttcgtcataagtactagctatcaggctttcagtagattttttttttaatacaaagccaatgttaactagaagctcagagaaatgtcttttttagaaagtcaaaagtgatgaaagcgaagtgttttatgtgaaagtactgatgcaaatgacagatttaggcctcacatgattttagagctgcagaagataggaatccttggcagcatctgtagtaccttctgttcgggttttgtttgtgatgtcaagacccacccaaggatagttcccatgtgctgctcctccccagaactagcaaaatgccccacctccactgacacgaacgcctcttgtatcctggaaaagaaacatgcagtagttttttcttaatgatatgaggaaaattaaaggagaatattacagacagtgcttaacactagttcaaactgctccagttaactgataaaaacctgctgaaacctcatctttatacctggatgaatctccttttaattagctagcgcggtattgaacaaatctgttttatcaacatgataatgctactagctaggactagtagatacggagtatacttgttgaagcctcagcagtaaacatcttcagatactgtcgagtgttgagtagttaaagactcaacagtagcagtaaaatcacagcagaaggcagaaaaaaaaaatcctgaacatgacgaaacagctacctgatgagatttgactgtgtcagttttactgattccttgctggtgctccggcctcctcgcgcaggcaagctgacgagcggcggcgcgacgaccccctcgggcctgatcgcggcggctgtggcgcacgccttcgcgctgttcgtggcggtgtccgtgggcgccaacatctccggcggtcacgtgaaccctgccgtgaccttcggcgcgttcgtgggcggcaacatcaccctgttccgcggcctcctgtactgggtggcgcagctgctgggctccacggtggcgtgcttcctgctccgcttctccacgggcgggctggccacgggcaccttcggcctgaccggcgtctccgtgtgggaggcggtggtgatggagatcgtgatgaccttcgggctggtgtacacggtgtacgccaccgccgttgaccccaagaagggcagcctgggcaccatcgcccccatcgccatcggcttcatcgtcggcgccaacatcctggtcggcggcgccttcaccggcgcgtccatgaaccccgccgtgtccttcggccctgccctcgtcagctgggagtggggataccagtgggtgtactgggtcggcccactcatcggcggcggcctcgctggcgtcatctacgagctgctcttcatctcccaaacccacgagcagctccccaccaccgactactaagccggccgccggcgaccccccaccaagcttgggttccgttccgtgcgcagctagcagatcatcaattctctcgatctctggatctccccctcgccgtttagtttctctcgtgcatgtgcatgcatcgtcgaacatctcaagctgctactgctgctgctgcgccggccgccgctcgatcgtcgcatcgtttgctttcttggacaagtctgtaaccgtgaattccggacccgtttgcttctgtaaaatttgtgcatttgcctgagtattcaccgagttccacgtagtagcagtagctctctttatgatcgtggagtacctgaccatgtgatgaaaatccgggatgcttgtactgctggatcgcgatgatttcgacggggatcgtcgtccgtcgtctactcgatcgtcgccgcgcggcgggcgtgcagtgcagcgccaataatgcagcgccatgtgcggacaagcggggtggtacgcgcgccacgtcggaatggtgtggcatagcgataaggctgacctgtagctgtcggctcgtgttgcatgcatcgcgatgcggagtgtgcgcagtcctccggacctggtggtcgctcgtagtacccgtgtacccgtgctcatgaaaattgaaatgacgaccgatcgatggcgagtggtacggtggtgccagtaggtatcaatgcgttgtgggcaccgatggtcctccatctccatggatggcaatggcatctactccgagcagtagctacaaggacggtgtggttggcaacttgaacttgacaaaggcaatggcattgctatgacccgatc

SEQ ID NO: 3638 - DNA, 6163 bp, Sorghum bicolor
cggcaacgcgaacgcatggcatgttgtacagcgcgcggcgggcggggggtaccgtgtgtgtgtgtgtggggcggctcactgattgcgatgtgcgatccgatattccgatgcgatgacgagtcatatatggctgttgttgctactaccatgcatggaggacggctagtgcgggttgttcttcgcggctctggtgccggtggtctgccacatggtcaggagattttccagtatccggcgccggttatggtcgttgcatgataacagcttcttttatttatattatcactatcactatatatatacactacactctctgtctatcaataatcaatcaaccaatcaatacgtagtatatatagtagtaatgtcgagctgttgaaaaatcaaaataaaatgtagatgcccgtttcgtcgtcggtcagttgcacttgcacgctccttcgctccatgccgttgttgccgatgaaagccgatggtgtaccggaattttgaatacgcaaggcgcctcctagtgacgtacaaccacggagtacagtatgtggggaggaagatcaacgaagcaatgtttaaatgagcaaaaccaaaggctgacaacagcacgtacgtctgcgtatagttgacaacagtgttatgggctccccttgtatcgggtgcaaaatctctttgctttctgctattgcacgttgtaaggacagttaggccttgtttggtatagtttttcttttttgctttgttttttttcttttctaaatttccgaggtgaaaaataaactgagaagaagagcagttggcgaaaccatgattttccagctccaacagctctatatacgctacagtgttgctatagtaattagcaatgtgagagccgtaaaaatgttcattagttaccctagattgaattaggagttattggttacttctcccggctactacgtactctttaccacgccatacctaaggttgttacattttttcataccgaatgaactcatagaaagctcaaccgcctgtaatttaaagttaagacgtcccatcccatgtttaaacaggagaatatagggccttgtttagttccaaaaaattttgtaaaattttcagattccctgtcacatcgaatctttagacgcatgcatggagtattaaatatagacaaaaataaaaactaattgcacagtttggtcgaaattgacgagacgaatattttaaccctggttagtctataattggataatatttatcaaatacaaacgaaagcgtcactatttatattttgtaaaaaaaaattagaagtaaacaaggcctagatgtaagcaaattgccgcccaacgccttacacacgctgcctcctgtttctggtagaagcttgcattctttttctcggtggttctcgtttgcttcatcgatagagactagagagggggggtcaatacatgtagccgtttgattttctgacagcgaagggaaaccaaaataatccacatatcttgccacatttcttaaagtttattatcttgtcacattttcgtttcccgggattccatccatccctggaaacttctgtgcccattttttctccctccctgaaaacaaaacccccaccagcatgtggggatccttggctttacagcacaaacctccatagcttatccagccagcatcattggattggagcacgcaaacaaaaccacataaaaaggcagagcgagagacagagagcgcgtcaggaaatatactactcctacacataagaaagaaaaaaacagaacagagagacaaaagaaaaggccattcaatcttatcaacacaaagttaaagcaatataaaaaaaaaccagaaattggtactacacaagctgctgaattttgtgttccattccatcaagcaataatcaagcggggggcatggccccgccccccagccttgcagcactattgtgctgtgttgtcacttacctactctccactctctccataaatagcaccaccaccctctccctccctctcactccccccacctcacgctctcatccattcccattccttgcaagcgtagccacctctcccactcactctctcgcagctgctaagcgaagccatgggcaaggacgacgtgatcgagagcggcgccggcggcggcgagttcgctgccaaggactacacggacccaccgccagctccactgatcgacgcggcggagctgggttcctggtcgctgtaccgcgccgtgatcgccgagttcatcgcgacgctgctgttcctgtacatcaccgtcgccaccgtgatcgggtacaagcaccagacggacgcgacggcgtcgggcgccgacgccgcgtgcggcggcgtgggcgtgctgggcatcgcgtgggcgttcggcggcatgatcttcgtcctcgtctactgcacggcggggatctccggcggccacatcaacccggccgtcaccttcggcctgttcctggcgcgcaaggtctccctggtgcgcgcgctgctctacatcgtggcgcagtgcctgggcgccatctgcggcgtcggcctcgtcaaggcgttccagagcgcctacttcgacaggtacggcggcggcgccaactcgctcgcctccggctactcacgcggcaccgggctcggcgccgagatcatcggcaccttcgtgctcgtctacaccgtcttctccgccaccgaccccaagcgcaacgcccgcgactcccacgtcccggtgagcacccgaccaacgccaccgcctcgtccttttttttttcttttcctttctgatttgatttgtgtctcgatctgctgctaccatctgcgtaggagtacgtacacacggtattttattttagatataccttaaaagttcgcaacatgctcaaatcttaatcttggcatcactcgtgaagttcgagtacgtcaaacgtcataggggagcttgattagagctcaagtcatggtagctaatcacaagctcaaatcttggccaacgtacatgctggcgcgcatgtgagtgagtgagtgaacaaaaagagaaattcgttccggggcagagtgggaaattaaaggggtgtatatagtagcacaacagatacaaaaaggcaggagaatatccggtttatctttctctttggaaagtccaggggaagaatatgaatattatcattgctccagagcatgccgtagactaaagtgttcttattttttcaaagattctcctgctgtctgttttgttcttccatgcttctactctagccccagtagttgttagctaaaggtttgttcgctggtggtgtgagaattaaaatcttcaagtcttgagttaaaacggggtggaagacaggtgaatcgatcaggtgcgtgtctggatgcgtgagctccaaatcttctaaaacagtagcagagtacataaccaccgtgcgtaattaaggcttttcatagtcgtgataatgacccgttattaacgcacacttgctggaacattcgagtaggagtcatcgtcagtcatggcccggccatcacccccggacataattaaaagagctccgaccttatctttctgtgcatgcatgccatctccagaggaaaaagatgctccactgcaaattttttaccgccacccatcccctggctgactcccattgaccggcacagtaaacactcggggaccggtagtggagtgggcccctcatcgtgtaaaaagctgagctgggtctggtccggcccctgtaggggtacatggtccgccgggccgggtccatccgctccttgtcgcgatgagctggtccgtggtgcacgcccgccctcccccccgcccttgtgtcccatgccatgtgaccctctccatgcatgaccatgatgaattattggcgcctctcgcaccgtacccctcttcggatttactccaagcatttttcaaacgatttcgcatgttgtttttgaaaaaaaaaagctttcgttgaccgtatatatggtacggttgaactaacttaaggccttcacaggacaaggaccaccgtacgtatggtgcgtactagtgtatgtccaaccaaccacacacgaaaacacacacagagagagagggaattcctgcacagtaataatcgtatggtacaacatacatatattcagcattcgtgaatccaaaggcaacacgcatgcactagtgtgtagctagggcactgcacggcagcactagtggcctagtgggcagtccccttccgtgcgtgaggggaggatctgggacagtggcgacgaggtgacaaaacgtgatgcctttgcgcgacctgggggccggtcgagtcgtgtcaaaaaaaaaaaaacgatgccgtggccgtggtgactttggtggatcggcgagatgcacactagaaaagtcgccaaggccactaacggtgtttggtgtgtggccattggccgaagcatgcatggcatgccaattgccgtatggttccggttcggtcctttccgttgacagagcggcatgcatgacgacacggcctttttagccactaatcgcttcccggcggtgccgtctagtccccctgatggtgacagaccgcggcacggaaaattgcctgcccactccaaggaaggggtgacagggcacacgcagtagcgtgtgtggccttttgtttagtagttcagtttggcaaccattaattttttttgtcttaaataaaaagtttggcaaccattgggcgccgcctttcgtttggttgataagtcatgacagaaagtatgtattgttggttgatttgttgtgagagaaaaacactaacgaatagctggtagtttcggctgataaacttaccgtaagtacctgacatgaccgtccgtgttttttttctgcaggttctggctcccctccccatcggcttcgccgtgttcatggtgcacctggccaccatccccgtcaccggcaccggcatcaacccggccaggagccttggcgcagccgtcatctacaacaaggacaagccctgggatgaccacgtatgttgtcttgtttaatttctcttgtggtttattatctactgtattttgacacttggtcttgcactgcatatgtaatgtaagtactgattacgacgatgcttatcccgttaaccctttttttttttgcagtggatcttctgggtgggcccattcgtgggcgctgccatcgcggcgttctaccaccagtacatcctccgggcgggcgccatcaaggcactcggctccttcaggagcaacgcgtgagcgcaggagccacccgtgtgtcccgtcgtccaaggctttcaatctgcaaagggctttgcttctgctggagcaatggcgatcgatcttagggggggagaggctggagaataaagttgcatcaacttgtagtgccggtggtttggtcgctcttgtttcagcagctgcgttgcgcgtgcgtggaatttggtttcgtttccctgtaatgatcaaccatcatcatcatcatgtgtcgtaatctgctgtccaagggattccgtctcctcctttcctctcctgctcttctagcctctactatttttctatttaattattgttattattatgtagcgacaagcatcatcaatcatcatcagtgagaacctcttgcttctgtctaaatcaaccgacatgtggagtggatgggattattcagtcttgattgatcatctgtgctctttccttcggctgtcttgtttgaattgtgaacttttttttgggcatttcaacctaatcagatcacgagctagctgcaaggtgcatacctgtctgtggctctgtgcattggatttggatgcacgctagtgccctttgcttttggcctgctccaaccttcaagaaaccaaacctatcagataaactaacccagcaaaccatgcatgatgccatggcgacgagacccatcagcgaagcagagctcaatttgcttgatctccgttggatcttcgctgcatgtgtcgtcttgcaatccttgtgattccaccttcctaccttgctgtcactttgtcactgttgcagtttccagctgtcctgagctgcctggccgttgttgtccccttctcttcacccccctcccctggcttctagctctagcggtggtggtggtggtggtacgtgcctacgtggggctgccgtgccactttagcagttacgggtagagtaggtaggtaaaggagcagcat

SEQ ID NO: 3639 - DNA, 8454 bp, Sorghum bicolor; identical to SEQ ID NO: 3540

SEQ ID NO: 3640 - DNA, 5929 bp, Sorghum bicolor
ttgataagaaacagagtgtctttgagcaatctaattttttctagtgtctgctggcaaatggccaccattttacatgttccacagtcaattctccctttactttatgtagaatcactttcttctttgaattagtaagtttatcctttttgagcgattttgtcaagcaagtggtgggtatccttggcgagcatggtcatagaaggatgagctcgccgcaggtgtagtgtgcaccctgcccaccccgtgcatcgcacactccttgccatggaaaacccctaccgcggcacatgcccctagccaccgagtaccgcatgaatgcgctattgcgcgagactgcgagagccccctgctgtcgcactcagcgagcctagctatcgtcgaagagcatcggtgctatgctgctagtgctagatgagatcgagcccgaggttgaagggaacaacgaggagggtggtgaggtccttgatgtcggcggcgatgtcggtctcgcggacagctcgtcgccggagtctggcatgtcgaaggctgtgcggtgtcctcgtgcgcggcttcgcatgacagcacgatgacatcatcagcaaagcgagcaagtggcgcgcgcgcaacagttcatcagcgcccgcgtgcgcgacagcgacgggcgtggaagtcgcggccaccgcggcctcgtcacgggagcccagcggcagcgaggtcgagcgagtccgcgaggcaggcggttgtggcagcggtgacattgcttccttcgctgcttgtcgggtcgcaactcaggtgcaccctccgttgcctatcccaaccatgtcggtgctaacgctgctgaggcggctagccatgtccggcgcaacatggccgtgtagctagcccggaggtttggaatgacagtgacgtagctcataaattctatatttggacggttctagtcttcgacttttggtgaacgatgatagctgaaaggagggtttctgttttagttatgcaattagactatgcattctaaaattttattaaaaattttaaaaattgatgtccaacaattatgcatttgacttatgcattttggtaaacttaacatttgatggaccaaacttggcatttttgcataggcacaatgacttgacaattttaatatccggagtttcctggactccttgtcgtgcgcgacctccccacgcgctacggtagtttcccgcgaggactccttctccctgcgcgaactcttctttcccgcgcgacgtgaactctgcgacctgtgacttcgtggactactggcacgcgacggaactctggcgaaccgctacttcgtggactggcggaccgggaggccgtgattcacagaaactgtggtgacttgcgacttcgtggactggcggcgacgggcgacggaaattcccgcgcagaggaaaaatctcgcgcgaagcgcgccaaacaaaagaagatctcggacaaaaatagttgggtccactattttataaaatgtcaagtcaaaaatgccaaacacttggagatggacttatttttttctttgacaaaacgtttagggacttgataattccaacaaatggcaaattccaattgcataattgttggagatactcttaagaacataggctcccactctcttatttattggattcttattgagaagtgtgtaaacctacatcttaaatttttaatatagttttatattaaaatatatatttatatacttcttaatatgaataatatgaatgaatataataagtgagaaagagggagagcatacaccgtcaggacagaaaaaaacttaggccctggcccggaacggcgtagaataattcctgttttgtacaaatttgtgaacggattgtacaggcaggaatcgttcccgtaaaaacgaacggggccttaccgatgatagggcgcggatcaacgatgacctgggcgactccgtgttcttaatgggccaaggcctagcccgttaaggacttaagaggtggagcgcgtgggagcatggagagctcgcagtcgttggatggagcggacggtgaagattagctgactgcagaaggcagtcgtcgccgcctcgcctatccagtcgaggtctcgaggatgcccgcgcctgcgccgccgccgcgtctgcttactttgtcgcggagataggggagaaggagcaagtgagattgacggggaactcgagtatcgccctaagtacaagccggtccaatcagactaggttctgcctccgcgctcgcactcccgcacccatccgcctcactgccaccgcgccccagtcacacgcgcgccactcgcgatgacgccggcggcggcgatctccggctccagcggccacctcgtcgtctcctccccctgcctcaggcagccgctcccgccatctccgcgcaccgctcgcccaatcgcggccaacgccgcctcgcccgtggcccgccgcggggtcgcggccgccgccgtgtccagccccgctgtgtcggccgccgcggggaaggatggttagttattctaacgccgcattgaagcaatctgattcgttgctgggttggggctggttggtatcgagggttctgctgaggggtatggctgtttgtctgtggtctcggtatggctgtttctctgtggtctcggtgtggttttgggattcgatgatgaactagaatagaagtaaaaatgctgtgagatgcgataaactataagctgagctgcgatggttggttgatttcgttgatttgggacagtcatcaaatgtgatcaagtccttttgtttgtagccaactctgggtgctcatctgggtgtaggttgtttacttgttagtacctcttaaaattcagctgtattttcctctttgaactagaaaagtttcccatgccaaatttcaggctcgtttctataattctgttctggtgaagtgtagccactagaccaattaggaacgcttattttgagtgagatatacatgtgatatgtgaactactaaacctttcatttttcttgaatttcaaatttatcagcacttgtgaattccgcattgtgtaatttgattttcttagcttcaccattgagctattccagctttttgatgtgtagaacatcaaatgcactcaattctgacttttatttgtttctaaatgttttaggcatatcgatgtgagctttcattctataggaagtactgtgtcaggcttagcaaactttctatctaactctagcaatttcttgcagccaaacaggctcctaaggatttccttcatatcaatgattttgacaaggatacaataatgaatatccttaatcgagcgattgaggttaaggcagcgataaagtctggggacaggagcttccaaccgttcaaagggaaatcaatggcgatgatttttgccaagccatcaatgaggacccgtgtttcatttgagacgggattcttcttacttggcgggcatgctatttatttgggtccagatgatatccagatgggcaagcgtgaggagactcgtgatgttgctcgagtactttctggctataatgacatcattatggctagggtctttgctcaccaggtatggtcatgagttgcatgattaagatttctttttgtggtatttttaccaacataaccaacaaggagacataatctggatcatttctttttacatatttgatctgtcttctccatgctgcttatgcacaacaattagatatgtacctcaaagcaacaagtacatagtcgtcagttaaagtaaaattttgccagtcagaattatatctattaatataaaataccaacttcgatttagtatagatttaattgaaacggtaagtttgtttaattctaactaataatataagagccaacatgggtcctggtatgtatatggatgcattgtggttttgaactgatatcattatcttggcagttttcttctgtggtttctttgtctgtttgtgtcctttgataattatgtatcaaacttgttccgtctgatgtagacaaataagtgatattttgggttgatctcttgctttgagatcatctttgtttagttgcctttgttactcagatactttatctgcataattgaccgttgtcgtttgtccttattgtattgttcttgaggtagttccactcaatgctgattcctttttgtttccatccaagcactatctcctaacttcatatggtttttgcaggatattctggacttggcaaattatgcacctgtacctgtcataaatggtctcactgactataaccatccatgccagataatggctgatgcacttactatgcttgagcacattggtcgtattgaaaacaccaaggtagatcatcataccactgaagtaattgcatgtgctctatgtgtctaattttgagctgggttgtgaccaattgtcttcaattgtgtaggttgtctatgttggagatgggaacaacattgtgcactcatggcttctattggctgctgtacttccttttcactttgtatgtgcttgtcccaagggatttgagcctgatgcgaagacagtggagatcgctaggagtgctggaatcagtaagattgaaataacaaacgatcccagggaagcagttaagggagcagatgttgtgtatacagatgtttgggccagcatgggccaaaaggaagaagctgattatagaaaacagaagtttcagggattcacggtttgtctgtttttcacactttctagaatttttgtgtcttactggactccaactacatatactttgcataagcccatgaagcgaaactagagaaataatcatttatgttccaaccttcatatggttcaagatactagtttttatctcaatcataattgtggtgttcaagtgacagtgaaactgtacaagcaactgttgtgcaatgccgcaatgtcttatttcattgtttttgctcagtaatgacagcttggctctcagctaacacttttgctttttaccctatattgcaggtcgatgaagccctgatggagattgctggctcccaagcctaccttatgcactgtttgcctgctgagagaggagtggaggtgacagacggtgccatcgaggctcccaactcaatcgtgttcccccaggctgaaaacagaatgcacgctcagaatgccatcatgctccacgtgctcggtgcttaactcccctattgcacaccagtgtcacacttttcttaaattcttaggcatcgctgagggattgaggttgtttggctttagggcatatatgaaagcttaattcagacgaactgtttggtaatgtgatgactgttcttcagggaggagtttgttgtactgtaaaagtttggtaataaaaaataaacttctgtgctagtttcgcttgcaaatcatgccagttctaagggcacgtttcgtttgcaaatcatatcagttttaagggcacgtttggctgagaccatggatcagttttgcctggctccactggtccatccttgtctgtcccactgcaccctgcctttgcttttgctgcatctgattggagtcctctaaagtttcttggaaaaaggcgggcatcctgcgtcctcccatcctgggcagctgctacttccacagaaacaaggggaactcaaccaaacggtgtatttctgcgatcgctctggctagtaggcagaagccatgactgaactgaagcattttctcgccaactaatagctatattcggcacaagcacaagttatgccaaatagtgcctcagagtcataacagtaatgcttcagatgagtcctaggcatctcttgaacacgcaccaaaagataagatatactaagctcacggtaaataggatgcatctcagaataagaaatgaagtacagcaaatgggcatttatgtaacagtaatccaggcatccagcaatcgttctgtcaaagtgctggtttgacttgaccacaaagatttcaggg

SEQ ID NO: 3641 - DNA, 4068 bp, Sorghum bicolor
tctggatgagagtatgagacgcaccttcttttatttggagccttctttactttactttggtagtgcgagttaaaacagccaaacgtcattgttctccatccacttgtggcagcagtcatctaaacagtaaagagagacctgctatttgggtctactaatgaatgataaggagaagaaacatgaagtccataaaaaacacaggataatgccactaccaaaagttggaatttacagtacagaagtgcctagtagaccgatagagtaatactctatccagttcatattataagtcatccgaaaacgaaatacaaggagatggggtagagaagaacccccttaaaaaaatactagtctgagagactctgaccttttccttcactgaatcaatccataaacaaatgaacaatgttagtgggtaacagatatagtaaaaaagaaaaccggtatgatttttctacaagctatgtatgacaagtctactagaaggtacagagtactagatatctccctgttgtggttgttatggtgatgacctttttgtcgattgtgtaccttggcacctaaccttgataacaatgcttgcttgcatagtaagggctcctttacttctctattcctttggccacttatttggccaatgctggtaatctttggtacaacagaagccagaggactatatatatcgacacatgatatcttcagtcaccgaacaccaacaactttatattgtcgttttgtttatcacatcctatcacactacatttcttatcgttgtgttcatccaatttcttatcgttgaactataatattcaagtccaaactctgcacacacttgcagtatctagcttgtttaacataggtttcaaatgaatctcgttttactattctttttttcggagttgttgggttagttgagatgtactggttagtgaactagtgtctagtgagtcactgattcaaaaacttgacgtcataataaattctgttttaactactaattttccactcgatttcaaatggagcttgaacattctgttaaatattaatttacatgggaattcaaaaatatacttgattattatcctgcttagtatctaccatatatttattatattttcattcgtctggaaccactttaagggcagtttgctattgctgatggctctgttgtccctgctgatacagtttcatctcctgcctgtctgaaaaaagaaggaaccatggaatgaatttaccccttttttgtagcaagactagatgatgcatcagcaacagcccaaaacactgtaatagtccttcaagtacaacagctacatcatcctaaaacgggactcaatcaagtacaacaggaggaaaattaaccctcagataatgacacttattcaccgtatccggaccaacaactggtccgttccaccttgtgtggtgtacacgttttaccttgctgtttgcacatcatgatatacttaatatatatagtagatagacagatagagaatatatcttgtccagttctgtctatcttatctatttcctttttttatatatatgccacaataatgggtaaacaggaaaacatgcgcacacagccttttcccattcagttgaccctgtcggaataaaaatcagcggcaactatgcccgcaagattgcaacgagattcctgatatgagccacacaataaacatatgtacagactgacagcgactgcaacattattggagcagcacgcagcagcagcacaccccaggttgggtttgcagattcctgtggattctaagcgcagtttaactaggccagcatctgggagggattgaattgtcaataccataaccgggggcatgatcatgatgccatgccaatgcgtcgccgtcatggggtgtccaggtgtgcgctccccagcgattcgctagtcccagccaaaggccacatctttctccctcccccattcccattttaagcagagccgaggcccagatgcagtgcaaacatccatccatcttcttcttcccccctcacaaacatcttatccctccatccaggtcgggaccgatcgaggccatagaattccagtccgttcctcgtccgtttcctcctccggggccaggcttcaccgcacctagctagctttctttcttgtcgttcgccgccgtgtgccgtgccgtgccgtccatggctaggaagtgctctagctgtgggaacaatggccacaactcgaggacctgcagcgggcacggcaggacgacggtcttcgtaggccacggcggcatcggcggcggcggcgtgaggctgttcggggtgcagctgcacgtggccgggtcctcgcccatggccatgaagaagtgcttcagcatggagtgcctgtcgtcgtcgacgttgtcgtccgccgtgacgccgacgtactacgctgccgctctcgccgccaccaccaacagcaactcgccgtcggcgtcgtcctcgtcgtcgctcgtgtcggtggaggaggctcctgagaagatgaccaacgggtacctctccgacgggctcatgggcagggcgcaggagcggaagaagggtgagttccacggccccgaatttcattcatctagttgtttcagaattttgcaacctgctactgtactatagctgtctcactcgtttactccgtacttgtaattcatcatcagaggattaatgagacttcgcagcatattatatacgtactgtatatgtcatagatagattatgatagaataatactcctatttcggcagcttgtttgagttgagctaagtaagtctgaaaaaactctgtttgatcttcttcttgtctgggttccaaccaaccatcaccaggcgttccatggacggaggacgagcaccggcgattcctggcgggcctggagaagctcgggaagggcgactggcgaggcatctcccgtcacttcgtgacgacgcggacaccgacgcaggtggccagccacgcccagaagtacttcctccggcagagcagcctgacgcacaagaagcgcaggtccagcctcttcgacgtggtacggtcccgtccatcgccatgcttccatctatatatgtaccagcactgctggcgtgtctgaatcgcaacaagtgttccgtttcaggtggagaacgctgacagggcggcgacgagctccattaaggacagggagcaggagcagcgcctgaggctcaaggatgctgcgatcgcgacgaccgcctctgcagcagcacccggaacgacgacgccgacagagctcccggcgctgtcgctcggcatcatcagccggccagcaaggaggcctgagcacgtcgtcctgcctccgaccagcctgtcgctgcagctgccgcggtgctcggcggcaatgggcagcctggccctggccgcgccgaaacacacacacccttcgtcgaccctgacgccggcggcaacggctagtagtagccaggcgctgccggacctggagctgaagatctcgatcgcccggccgcagagcgacgtccaccaggtccagactgggtcgtcgccgccgccgccgaggacgccctttctgggcaccatcagggtcacataaccgaaaagacgtcgccgacgacgacgcgggaatatcctgctggtagatgaagagcagcttttgctcatctgaagaagggttggttcaacgacgggacgaggtttgggaaaactgaaaaggaggagcttttggcagtggtgtatgagcgtgtgtgttggtggcagccgtgacgacgacgacgatggcgtcgtttatcatgtgggtgtagtgtaatatcatcatcagaaagatggaaactttactggcctaatttagtctatgttgatttgtttgtttttcttgcaaataaagaacggctgccattgccatgcactactctactctctctcccgtctcgctcgatacctttatgttgacacaaaggtaggtcgatggtgagagatgagctcaccatattcagctcagttttttgaaagaatatattcagctcagttgcttgcctctattaatatcaatcagtactatgatagtacgtagtataaaagtttagtttgcaggtg

SEQ ID NO: 3642 - DNA, 4900 bp, Sorghum bicolor
agacttgtacatcatcatactcatgtaagtggaacccctgggctatatatgatgatgacctggccttcctattttttatttatgctaaagctgccacaattttaactagaattcaaatgtccagcttctagtgccacatctgactcttatatgaaaaaggtgccatcatgatgcagctacctcaagaaactcaaggcaacttttgttcaaataatctgttgccatcttatgctacacacaaacgtgcaaattaaaagaataccacactatcacgttcacggctaccacaaagaaaaaaaatcaccagggccttgtttagttcaacccaaaaaccaaaatcttttcaagattccccgtcacatcgaatcttacgccacatatatggagtattaaatatagacgaaaataaaaactaattgcacagtttacctgtaaatcacgagatgaatcttttaagcctagttactccataattagataatgtttgtcaaataaaaacgaaagtgctacagtttcgaaaacttttcagttttttgaactaacaagccccagttcacgatccgtacgtggcgctatcatgagtgcgcatagcaacaaacccagagctgtgctggccttgtcggtgatgtaacacaagcaaacggaatatgtgtacatatttgattgatgtagatggccatgagccagcaggaaacacacatttgtcaaacacatgcctgcattttggtcaccaaatcatgctataatgtcagcctttatggccaaacaaaaggctaggatatataagataagcatttcaagctagatccatgcaggggccatgatgattgattgacagaatatatgtcctaaattaataatgccctttctttgttcctctttccttggatcacactattcttaatcaagtgcaatgatttgttcgatatagggattaccaaagaaccatagacagcacatgtttgaaatttcaaatttaaataaggtgtatgatggtaaatctgttgattatgtaataaaatagagatcaagttaactgcagctggcgctgtctggatttgggagagactgctcagtttaaaagcagacatttatgtttaggagtatcttaaaaaaaacgattcaagcagaaaccaagcaggagtacagattacattaatataaagaagagtccaaatggaacaaattaagtttgcgaactagaaatccaaacacaaaagttagaactgatgttgcaaatttattcatcatgctcctttccgatagcacattcataaccaatacacagaccacctgcacttatactcctgcatcccaaaaataaattaatgcctagaatcaccataattcaaattatctttagttcggtcaactttataggaaaaagtaacatgtctttgacactaaataaatatattttgaaaatgtattttataatgtgtagtgatacaaatttgatgtcataaatattgatgttctttttcacaaatttgattaaaattaaaatagtttaacttaaaactactttaaaagttgatttaatttaaaacaagagagtagacactaatcaaattggagtaagttaaggaatgcgtttattaatcctctctctctttttttgcgattagcagttgtgaatttaaaaattaaaagttcaccagaaaggtaaaatacataaggatatatagctagactagaagaaaagaaaaggcgcgcgtaggtggccgcaagccgacctacaaaaccatccgtatgtgcatgggacaagcacaaacatctacacaaacacatcaccgtgaaccttttacggttttgcccctacactttcggtgggacccacatgccagccggtactaattggtctctctccacccataccactctgccccctctcccttcagttcattcactcctctgagctcctctgaataacctcattcgccctgcagactgcagctagagctagaaataaaccccggcaaacgcgaacacccgacgccatggccaggccgctctcttccttctgcctccaccggatcaggtccggcggtactgcgtccactgccgcaccgctgtcgatatgcgccaacaagaagacctccttcgacgacgacggcggcggtggcatatgcaagtcgctgaaggatggcaagcaggaagacgaggaggctaacaagaagggtggcgtggaggccgtcgtcgtggggaggaaggtgatggtggcggcggacggcggcagcgaggaggcccggacggcgctgcagtgggcgctgtcgcacgccgtccggccctgcgacacggtggtcctgctcgacgtcgtcaggggcggcgccggcggcggcaacggcaagaaccgtgcgtaagctgcgtaatcatctagtgtttgcgtcctgattaattacaaacttcgatcattacgtgtttgaagaacgagggagatgggtcttttcttgtttggtgcataataatcatctgaattaaattaggacgcgatccaagagggagtagtcagcacctggaggcaatgaggagcatctgccaggccaagagaccagaggtaacaactgcaataatcacaaatgatacagagaaaagagggcatgatttttctttctgatagtagtagtattagcttcaagaagcattaatttagcaagtggaattatatggacaaagaaatgaaaagtaaacttgatgatgtattaaaagaacatcaagatttgcaaggcgacactaattgcaatactaatttcgtctcgcaactaactaacttactgcaagatcaaagattaagattggcattgatgttgtggtgttccaaagctagaactggtatgcattcaatgtcttattagtgacggtgtataaagaggagtccctgatctgatgccatccattgctgatagctcataactattcctggtccttcctcctaaataattgacatctttggatggtacagaaagtatctgttgagcaggtcatctcctgcagtcctgctctgttctctttggtacgtacatgcaacagaatacattgaatgtacaatagtaggattcaattgttcacgaagatccatttttctgttgtttgcgccatagttttgtgtctgccgaaatgcatagcgcaacagcacaccccataatccccaaatttggctcaaaaaatggaaatctagcatgtgtatgcccctatgataattagtagtcttagcagagatctttactctattacctaaccagtagcgtggctttgactgatgacgcctgcttggaacacaagaattttataccgtcggtacattcttcttctttttccccataaattcaacttctctccaaatctactgtcgaattcagtgttccagacaaggaccaatgtttattgattcgtgcaattcatgaaaatgacctagattgtaccttccgttgctagaataatgtgaagtgacatcacagatttctgatgctgtaaaagtctttgccgacaccctagtcctcaggtggtcactccatggcatatttttacctttggtagcatagaagaaaaactgtccctcaatcagtgaatgtctcgcttctgccagtttttctctcataacaaatcagcgaacaatatttttagccatgtcaaccaaatgaacaaaacagcactccaataagacatggctccaatagtacaactggtagataatcagacaactaaaaacagttccctggctacttaaaaaaagtcttccactccaactgtccagccagcatgcccacgagacgacgatggcattctatgccaaacagtatgcaaagaaaagagggccccattaccgtcagatcaaagggaaagaacgaaaaagatgccaacagcacagagctgcaattgcaagcaaagatcacacacatctaaacagcacagagcagcatgcatgtgctgagcatcatcatcatgcatgcatgtcgtcccagacaggatcatggcccctccatttccagcttgactttgatgcccaatgcaagcagctgactgacgcgcgtgtactaatgtgtttgttctgccatgtcatgccgtgccaggtgcgcgtggaggtttccctggcggagggcggcggcggcggcggcaaggaccgcgggccggcgatagtggaggcggcgaggaagcagggcgtgtcgctcctcgtcgtggggcagaagaggcggtcctctgtcacatggcggctgctgtccatgtggatcgccggcgtcaagggcggcggtggcggtgccggaggcggctgcgccagcgccgccgactactgcgtgcagcacgcggcgtgcacggcgctggccgtccggcgcaagagccggcgaggcggcggatacctcatcaccaccaggcggcagagggatttctggctcctggcttgaggtcctcagtcttgtaggtgtgttggtgagtggtgacaatagtggaatactgaaggtttagacatatttattaggggaaataatggagtaaaatggtgatgcggattgccgtggtctgtgtgttttgttgctgttttagaactgacatggaatcatggattgcaataagaatcaagaggcagcatttggagttgtgtgccatccataagactttcctgctacttgctcagtataagagatctgatagcgtcccggcagtcaagggacgaagaattggataccttgatgaacagcttgctagctaggtgtagacgggctgagaagaacagacgatggattgttcaacgaccaagattaagtgggagtttgcatgaatgaaacacagataattctatattgttcaacttaccaaaataaattacatagtaacttccaggatccagctaagatgaactaatgccgaaataatatcatcatgattcttgcagaccacaagggcg

SEQ ID NO: 3643 - DNA, 12748 bp, Sorghum bicolor
  misc_feature (6316)..(6458): n is a, c, g, or t
cgagttctcgtttgagctaggtagcagcctagctgctactcttgcagccacagccctgctgctgctgctgctggtttccagcagcaggtttcctttgttggttgaacagtagctaccggaagggggtaccgcagctgcagccctgtgcctgctgctgctggttttctttggctctgtttagattggagatgaaattttttttggtgtcatattggatgtgtcggaaagatgtcgggagggtttttagaaactaataaaaaaacaaattacatagctcgtcagaaactgcaagacaaatctattaagcataattaatctatcattagcacatgtgggttactgtatcacttaaggctaatcatagagtaactaattagtttatttttttatgtacatttaatgttcaatgcatgtgtccaaagattcgatgggatgaatgaaaaaaatttaggtgggaaactaaacagggcctgattgaacagtaagagtagcaacagcgagcacagacagagaggtgccagccaccattttgatgatcgtcctctttttctaagctttgtatggtgtaaggggtcatcaagatatttaaaggagaagtctgttcttttgcagcaaaaaatattatagaacacatgggcttcatcgtcagagaggtcaatgatcataaggtcacatttagcataattaattctctcatgcttgacatgttttcaaaacaagccatagccatttaaattttttggctttaccaaaattgttctcaaggaacaagatcgtatcatctgcgtattgcagaaatataacaccacctgcgcagggcagtagtgagtaggccaataataagatcacagttgattgaattccggtatagacatctgccactaagttgaagagaaggggtgctaaaggatcccctgctaagtcatttcccccatttaaaataggtactattttggtcattggtaatccaaaaaatatcactaatccgaaaaatccactatatatctcgaaaacctctggaaagtgttgatagaatttataatataaaagaggagccatcagggctcggcgagactcgaactcgaaaacagcctctttaatcacgttttcagaaaaaggcctctccaggaggtctttctccaagttagcgagcttttcttcgttgccccaaaaatcactatctatagtaatctctgagtcgggttctttgccaaaaaggtttttgtaaaaatccacagcaatgttaagcatgtcctcagtcttacttggccattcggaccttcaagggtggtaatgccttttttttttccccctctggttagcgacagcttaaaaacaagctgcatttctatctcctttttaattttaatctccctatcgtggcggtcccgtcgctgaatcagtggggtacaagtaccactagcgaggaatataccattatttatcccgaggatcagaaatccaaacaaattttatctgcagatcaaagcccagccccagagagattcagggcttgtagtttggctttggcagttggccctctttggctttgcctcgtcccctccgccgccgctggccgaaacaagcgagaggatcagaggagggggcaacaagcaaaacaaacaaaaagggatcccaaaacaaaactggcccttggccttaacaccgggcgccagggccagcgagtgagctcgcctcgcctcgcctcgcctccctcgcgcagacctgtcgtatcgtaggaatggaatgaggccgaggcccctccacccttcctcctcctcgtcggcggcgcttctcccgtgacaagcctcccttcctccggtccagtcgccgtccgacccaatccgtatccacccaccagtacgtgagcactcactcctccgtctctgtctctgtcttccgctttttgtttctctcgtcccaacctctccttttccgcgggtttgatttgggtttccgattgtcctcgtgtgttcggctacgatacaggatagggtacgatggatttgtccaggttcgcctccggcgtcgggcccagccgcgcggcccctcgggcgggcctgcagatcggcgccgccgggaatggcttccggccctgcacccagcggcgagcgcggcaccgcggcggcggcggcgggtacgggagcctcacgtccaccgccgccgccgccgccctccgcggccgcggcgggctcttctacctggctcccacgcgcgggagccctcctctcagtctccgcgccagagggcggccgccgcggtgccagggcaacgactcattggcctacgtcgacggccccttggaggccgccaaggactccggcgaggtcaccgacgaggaggccaccagctcggggtccgacgacgagaggggccccggccccgccgacgtcgaccgtctcagggagatgctgcaccggtccaggaacgagctggaggtggccaggctcaacagcaccatgttcgaggagaaggcgcagcggatatccgagtcggccatcgcgctcaaggaccgcgccgacggcgcccagagggacgtgtctgcggccgttgccactgtgcaggagattatcggcaaggaggcggacgccaaggaggccgttcaaaaggctaccatggcactgtcgatggccgaggcgaggctgcagctggcagcggaggcgctggaggcgaagcggggctcggtcgggccaatggaggttagcatcgaaggcgtggaggaggaggcccttgtgtctgcgcaggaagagattaaggattgccggatggccctgtcacggtgcgaggaggagctgggacgtgtccaggacaagaagatggagctgcagaaggaggttgataggctgacggagctcgcagagaaggcccagttggacgcgtccaaggccgaagaagatgttgccaatataatggtgttggctgagcaggcggtggctcttgagatggaagctgcacagcgtgtcaacgatgcggaaatgttgctggggaaagcggagaaggccatatcctcagttgacactgtggtggagctaacgtcatctgctgaagagcagaaaagcactgaagaagatagcatttctgaagggtacgagtatagcagtgatgccaccgatgatgtttctgtgagggatgaggtgtcaagtatcgagcgtctaatggttggtgacttgactgttgagggcattgagcagcttgaaccatcccgtgagatatatgatgaagcaagcagtgataagacgtctgttgagcctcagaaagaggctgagcctgattcagataagtcaaagcaagggaagaagcaggaaatggaacgaaaggaggtcaccaaggaaccactgagtgctccaaaagcactggtgaagagatcatcccgcttcttcccggcatctttcttctcctccaaagttgatggagagtttacgcctacatcagtctttcgggggttaatgaaatcagtgcaaaaacaggttccgaagcttgttgttgggatattgcttcttggttcagggtgagtcacatgacaactgctgtgtgttttttaggttttgcattttgcagtaacgatttgatttcagataactgcactccaccaatttaccttgttggctgttatttgtgtacagataaaagcatactgcattctgtatagtcacctcttctttgcactgaaaattagaaatgggaatggaagtgttttccttattatatctggtggacatcattttcattcatgtcagttaggcaatacctgaaagggttttttgttttatgggtcctgtagggcattcttcttaaatagagctgagaagagtcaactatttcagcagcaaggcattgccacaagcattggaaaggtaacctccacaacaaagcccatagttcgtgagatacggcaaattccacagagagtaaagaagctaatagagctcttacctcatcaagaggtacgatttcctcatctgaacccactcatcttctgatttcattttgtgtacgtctatgatattcaactgttatagtaaaacttagcttgcatgtaaattccttatgatcttcatttccctattcaggtaaatgaggaagaagcttcgctttttgacatactgtatttgcttctggccagtgttatttttgtaccattatttcagaaaatccctggaggtgagatacatattataatattgtttgtgcacggcatggttcagcagcatctgtagctttttgcattattttggtcacccaaggaagtttgcaattgaaccaaacgtggtctcatcaatttgtactgttttagtgacaactgtgcaccatgcttttcctgaattgaaatgcctgacttctgaagttaggagctagaatgcatgaactcatgcatacaaaagttggaaacatttgtgattaaaatcatcagttttcatgaaagttttatgaccttctgcaaataaattttaccttgataccttaggcagtcctgttcttggatatcttgctgctggtgtcctcattggtccatatgggctctccatcatccgtaatgtgcacgggacaaaggcaattgcggaattcggagtcgtgttcttactatttaacattggacttgaggtacacagctaagtgcctttggatgctatttcttctttcagcatatactggcttaatatcctggacctgcagctttctgtggaaaggctaagctcgatgaagaagtatgtcttcggcttgggatctgctcaggttctgttcatgctaacacaaccatcaaacagttatcattactcaattactccgtggtaaatttgaacaattggcaggtgctggctactactgcagctgttggtatgatagctcatcgttttgctgcactaccagggccagcagcaatcgttgttgggagtgggttggctctgtcatccacagctgttgtcttacaagtacttcccttgaaatcacacgtgtttatcaaactcttgtttctttgttactgatcgaacatacgagcagaaacatatacccctatttaatattctcagctaatatgagttgccatttagtatttaataagctactagggaaatttgttttcttgccatgcttcaaaatgccatgttcaggcataaactaggtttcatttaggcaagtacaaagttctactccctccggtcaaagacactttgacatgttggacaaaaggcgaggtctccattttgtcgctttgatcactatttactttctgtaatgcaatcaaattgatatattatgaaagttcttccaacccatggtttttatgtttcaaattcaaatgtttgactggaaccatgcctgattcatcatgttctcatgactgggaattatatgtttatctgtacttcccaagttttgtgatgatcatttgttgcttttctaggtattgcaagagcgtggtgaaagtacgtcacgtcatgggcgcgctacattttctgtgttattgttccaggtataacctcactgtgctcagatatgttccctgtttttgaaataacacagcttatgtttcagctttccatttgttcatttcttgctaatgtactaaagcacatcactttcacaacttttagatcacacctcacagttgcatatctttatgcatcttttgctgtttacatctgtgatgcatatgtgctagtattgacttgcatgacatactcattctgaagcattgagagccttcaatcctttagtaatgttaatctagcttgcctttttaatacattttcttgtgttgtccccaggatttggctgtggtggttctgttgatattaatacctctcatatcacctaattcttcaaaaggaggggtaaccattttatctttatgctcttttccttgcctgtcctaggaccttttgcttattggtacacgtttatgtgcttgatagcccaatgagattatgagtctaatgtagcatgataaactagtctgtgaagaccaatggtagtatgatttttagtgactaggagcacttcaaaactcatgttgaatcaaaattcccattgaattcttgttgctattcaggaccattagagtttgactgtggcaatagacatttctatatttcagatgacataggtgaaatgcaaatttgtagcatgttattaagtaagaaaatttgttcaatagtcctacgatatgtaaattttggaaatagcatccaacttgaggttgatatatggagcctggggccatgtgtgagtgatgcagtcaatgccttccccagtttcatggtttttgaggtgtcacctaggcgttgaggtgtaccctccaccccccccccccccnnnnnnnnnnnnnnnnnnnnnnnnnnnnnnnnnnnnnnnnnnnnnnnnnnnnnnnnnnnnnnnnnnnnnnnnnnnnnnnnnnnnnnnnnnnnnnnnnnnnnnnnnnnnnnnnnnnnnnnnnnnnnnnnnnnnnnnnnnnnnnnttttgtaggttggtttccaagcaatagcagaagccatgggaatggctgcagtcaaagcagtagctgctataactgccataatgtctggaggccgtctggtgagttgactgttcatttacattatttttcttatcctttctgggacccttttgtatgccactctgggcccagctggacatgggcttgtttccttgcatgcatacatgtttctgttttttctccttgcagctgcatttatctgcaattatttaacgagcaatttccatttgtatcaaacagttgctccgtcctatttacaaaataattgctgaaaatcggaatgccgagatattttcagcgaatacactccttgttatttttggcacaagtcttcttacagcccgggttcgtattctatatgtttatatctatagcctttgcattgcttaaaactacttttgattctatggtactactattcacaggctgggttatcaatggcacttggagcttttttggctggcctgttactagcagaaacggagttctccttgcaggttgagtcagatatagctccgtatcgtggtcttctgttaggacttttctttatgacggtgagtactgggaatataatttcattaagaattatttctttaacactgatatgctgctagtgttatgtttcaagtgttcctaaccttataccataatcatgggcatcaacttaagttaccatggacttgctactctattagttactacgagtacctccataatcttttataaagcacagcttgacataacatggtctcccaaattatactttgaccatttgtttattttatattatattgtttgttataaacttatgataattggatagtatatttgattacgaaaaattgttaactaaattattagtcaaagattttaaagtttgaatcttgatatgtgtgtatagttgagaagtgtagatagaaccattttcacaagctcagactacaaatatttttcttattggaacaatcatgccagtaaatgttatcagtgtagcatcatacattacagtctagccccgcgtgctattcctcctcctctgcactctattccctgtctgctgcgcaccttcttcctctccagtgaagttgtcaagccgccgccgccctctgccagttcaagtcgccgttgctcttcatgatgagtcctccaacagtgtttgccctttccctcctccatccctcactccgcaacctctctgctagtctgcttgcttgctgtgctgcacctcttctactcacttgctgattctccatcctgagatagagttctggacaatgcagaaattaactctcacaagtctcccattaaccactaatatagttttgatgcttgctttattgtgtatactatatactatatataggtatatccatagtatgtatatgtcctgaaatatataggacggctatatgaacgacggactgattaggctcgattaatcggtctggtctaattgcgattagtcacctggtcggttccatggccactaggttcgactatatgatttgtaaacattgtatgttacccaaataaagtatctttcagtgtcctctttcatcagcttgtcaaataaatgcatttctttgtgtgtgtacattatcatctttaggtagaatcaaacgtatgccaataatcaatgctcgagcacttatttatctctcgattttgcttgtccaaaatcaaggtatttttatcactttctttaggatgatgagaattcattgcttaattcttacattgaggtttggttttccaggttggaatgtctattgacccaaagctgcttctgtcaaacttcccagcaatctctgtgatattgggtctcttgatatttggaaaaacattgttggttacatttgtcggcagggtgtttggggtttctactatagctgctattcgtgttggcctcttgcttgcacctggtggtgagtttgcttttgttgcctttggagaagctgtcaatcaggtaacatatgttgttttcattttcttttttttttctcgaacaatgcaggagagcctgacacagtacaggactcttagctccacacaggcacacactaggaaaaaacacacgatcactgcccaacaagcgcctaagcagccataggtagcaacctactaagaagctgttgcagagccttagctccagcccaactctacaatacacattcttcagaaactacagctagaactctttctgtgtcataggtatctagtactctagacctacttctcatgtacacaataaatatttgatcataggaacatctatagttgttttatgtaacgaaccatatgattgttgtgctatggatggatgttatagagcagagggataactaatgaatacactattttacagggtcttctatcacctcaattatcatcgttgctatttttagtcgttggcatttcaatggctctgacaccatggttagctgctggggggcagtttctcgcatcaaaatttgagcagcatgatgtgaggagtttattgcccgtggaaagtgaggtatttatttgttcccacttttgcttcttgctccggttacaatattacattttatgtaatcttggccacatgcatgcaaaagcactgtcagtctgccatatctcacctagtttaacctgccatgtagaatacaagtttcaattgaatgcctgtttgtgtagccaagtgtgttccctgtgtgaaatgtagctagactcatttgccatttgatatttatgtgattcagtggtcctgacagtgttaggaaatcaaacaactcagtagccttatttacttttttgtgtgtgtttcagtactttggattatagtagtttcttgtggccagccctaaaattatttccattatgctgattgacaattgtaatatccagtgggagattctaattatgaaccagctaaaactcagaactaggtgattctatcttcttcagatggttacggagatactgaggatgattgacgagcacagtgggtgtattgttctgtttcagtttagtagccatgtcccacccaagaactggcagtaaattgatgagtgagagttacatttttttttggtacaagaataatgtggatattgcatatgcagaaacaatgctgaagtttggctagaattgttggtagttgtaactttagctgcagcatctgtccctatctcagataatgatcaaagatgagaaaagaaaaatctaaaatccaatcagttcaggtatcagctagtgcagtagtcattttagatgagcaattaaccaaagagcttatgccagacaaaaaaaacacatggtggtgggataatattgcttcttgttactataatctgccaagtttgtagtcaaatagcatgccagctctttaatatcctttattcctttaacatatcaattttcacctaatgttgctgtcttctgtttttctgcctatgtatgtagactgacgatttgcaagaccatattattatattaggctttggacgtgttgggcaggttgtattgcaatcctcacacactactattttttacatgtttgactgatcctaataaagctgtttcccccttactagatcattgcgcaactcctgtcagagcggttaatcccttttgttgcacttgatgttagaaggtatggtgcatcttgcaataacctgaattttaaagaaactatggatagcaattcagaaccttaatgtttgttctgaagtaatgtttaatcatgaagtatgactgcatgaacctatgcagatttaagtctataagttactgtgtagagttgagatggttgatgccatattttagactaatgtgggaccacagttggaatgtattaaatccagaaaataaaacaaactttcaggcagactcttccaggaattcaggaaaatgctggcaagacccgcaatctgatagttgcatgtcttaaccttcctttggaaccaaatcacccgtgttcaatttatccaccttagtggttaagtcatccaaattttcttttttctgatgcatattttctttgacagcgatcgggtagcagttgggcgtgcacttgaccttccagtgtattttggggatgctggaagcagagaggtagggagagttcggttatattttagtaacacatatagcttgttgagactactgttctaaattgaattttaataggtactgcacaaagttggagctgaaagagcttgtgctgctgcaattactttggatactcctggtgcaaactacagagctgtctgggcattgagcaaatatttcccaaatgtgaagacatttgttagagcacatgacgttgatcatggtgttaatttggagaaagctggtgcaatggcggtacgtggatgttacagagcattcttggtgataatggtttcctgatgcaacttttattgaccatatacactttacaatttttatttgctaagagagttctattgctttgatcataatgggaccaaagcatgcacctgatgtactgtgtaacttttgttgctatattatgcaatatcggtagtttcccttatatgagatactttatcttctgatggaattgtgtgaccaatttgaaggttgtccctgagaccttggagccaagccttcagctagctgctgctgttcttgcacaagtaagctcttatttgattatatcatccactgtgcttattagtaatgtatggaatttgatgcataggcttcatttcaggcaaaacttccaatgtcagagattcaggaaaccatcagcgagttccggaatcgacatctgtcagagcttacagaggtgtgtaattatgtcatcattcagtggtctgctaaacttattgatgatatttgcaacagaaagcttctgacaaacaaaaagataagcagtaaaccaaggcaaatcaaatttccaaatggtagtaattcaaggatagttggtaaccgtagaatctgtagatgtgtgttgaattaaacttgtgatgacggtctcatgttagtaactagttacattgctaatttgttacatgattaaacactagccattttctaactggaacggtgatggtatacactatagggtttttttgaactgtgccattacaatataatgatccttctgacttttagctcggtgaagccaaagcccaaaaatcgaaatagtagactatcaattaccaaaggaacaaatgggtgcagttggcctaataatacatgtagtgtaatggacatccaagttttttaaatatagcaagtcttagatgattttttttaatgttcttgagttttgaggttttctgaagtccatgtaacatgacaccatgtgggaaaaattctttttctttcaggttcatataatctttgctgctttcatgcaatatatattgagcaatatcatgaaatttgtgtaactagctgatggccttttgttgttccctttacagttgtgtgctacgacaggaagttctcttggctatgggttttccagagttacgtccaaatcgaagtctgtcacccccgatgatgaaagcgaaacagtggatggtgcactagctatttgatgccgattagataaaatgggaccccttgatagtactagattgattgcactgttcagtagataatcttgttgcatgtagaaagagtggaataataattcatgcaagagctgtcataaaagttggcgtgcaattttgtatgttagaatatacttatatatacccttctgttgccagctatttagcctaaaaaattgtttgcataaaactcttcacaaagaaaaataacacactctagtcgtgcaggtgaaaatgaggcccttgaacgcgaaaacggatggaaaaaactctcatttccgtttgtatatttttcggtgaaaacaaggcgggttcggttaggatgagaagcagaattgagatatgtgggtatatgaaaacggacaagtgaggatgaaaagctaaaaaattaagttagaattatgcaatgtataaagtcacacaataatatatatatgtataaatatctgcctaatatttaattacttgcatgtcatgtatattaacacgttaacatgcataattggtgattagtagatataccagcgtaacataggagcatctctaagagtttgctacactaaatagagatttagcaagttaacgtcctctaatgtctcctgtaatagctttttaaatgattttgtattaggaactctaaactatttttaatgaacgaaatcttgttttatagtttatctttct

SEQ ID NO: 3644 - DNA, 3329 bp, Sorghum bicolor
  misc_feature (722)..(821): n is a, c, g, or t
aaaagaagaccagccggaggcgttgattggtcaaggcttttggtgccaccgaacctgagattgtgagatatggcgattttttttttgagagagagtgtgtgagatatggtaataatgatataaacaaatgaaagagtggcacaacttcctttatgattttttaggtggacagtcgctatcttttgatggcctagactcgatgataccgcctcgtatggttgattggaagtttttcccctttattttagcttaatgccctctactgaggagaagagattgatgtctatcccgttgattagtgcattcccaaccccaaaacaacattttttccatgttcattaactaaaatgccaacgaaggtcagtcttagtggtgtttcatcagaattttatagacattaaatatgctgatgtggcactgtattaataaagagagaggtgaaaagtatttcatgggagcagaaagagtttcatgggggataaaactcttctacacttttctaaaatatagatgcgttgaaaactaggtcataaaatccccactaaggatggcctaaggaaaagatgatgtgtcattgcaattaaaaatagagaggaggaaatcatttcttgacaaggatctatatagattggtagataaggaaaagagaagatatataatgaacacctagtattgttctgtagaaactatatatatatatatatatatatatatatatatgnnnnnnnnnnnnnnnnnnnnnnnnnnnnnnnnnnnnnnnnnnnnnnnnnnnnnnnnnnnnnnnnnnnnnnnnnnnnnnnnnnnnnnnnnnnnnnnnnnnntatatatatatatataaagtctacgtaaataataagcatacatgtgatttctggcattgtgaatgtccttagacaccctacttaagtattccctctgtcttgtaatatactttattctagtattcaaaatttgtcttcaaatataatacattctagacaaccaaaaaagttttgcattatcactattaattatgttgatgatagcatctgattagaaaataaaataagggtatatgtgtgttttattttctcctcttaatttatcttaaaatttctagaatacactatatttcaggacatagaaattacttaacttttaaatttttgttgaaaccgcgctctaccaatggagaagtagcaagccacgaactgttagatgaaaactgatggggcaactttctatccccaaaagacagcgacagaaaactgccggatcaccatgtgatgcacacttttagccttcgggctcaagccggtggccaccaccgttcctccttgttgatcctatctatataggatgttttcagcaagaatcacttattcaagagaaaataaacaagctgtacaacatgcagtaacctttgtagtattaaggtcatcctcaatgaatacatcaatattttgaaaacagtgcataggagttttatagggatgaaactctctctaaactcttgtcatctctatcttcaataatatagtgtcacgtcaacatatttaatgtgcataaaactctaatgaaactccattgagactcgcctaagagatacaacactaattttgacacttataatttatattaattaacatgttgtttaataatctattgttatcacgaacaaagcctaaccaatttggcaagtttattttagtgagaattgagtatccaaatttgagttttccactcacatggatagttgtttttagctaattataattcctccagatatggacaaagtgtcaaatgacaatgagtttgatatgcatgtgtttgaactttattaatttcagaaaaaaaaatataaaaggaaaaacgtcgattatttttttttgacaggaaaagaaaaaaaaagattaaaacttaacggtcgtgtcgcattgcatcacccgtcgtttcgttttccacattatgtaggagtcctcgcctgagcctgtttctgcacaggcataaatcccaatcaccccttggagctcccggtcacggctgctcaagctcaattgtactgtgtcagcgggaagaaagaggagacacctccagcctccggggctccagagatcgagcgagcaagatgaaggagggcacggcgaactgcgtcgacatcctcatcgccatcatcctcccccctctcggcgtcttcctcaagttcggctgcaaggtactcctacgtaattctccatcgatctaggatcttgcacctcaacaaaatcagttactgctatgtcagtacgtgccaccgatctgattgatcgagaggggcggttgagtttgagttggcttgtgcttgctaaaagaattcgatccatggcaggtcgagttctggctctgcctcttgctcaccttcctcgcctatcttccggggatcatctacgcgatctacgccatcaccaaggactagcatggtaccagttgtggacaatcaacatcccgtcagtttctgtcagtttctttctcctcagcaacagtcgagtgagcgcttgatcaacaagcggagtaatggaaatgaactagctagtacctcgctgccatcgtaataatcgctgcttgccctgctgctcgatgtttgtggatgcaggaactgcgccgcaggatgtaaaattcattactacgtacaattgtcctttggagatcggttgaatctcagctgctgtgaagccactactagtctactactgattgagcctgaatttgtcgcttctcgttcgtgtattccgtcgatcgctctggttgttggtcgtggatcttagtaccagtttgtttaacatcacagagtaacttgtgctgttctgtttctgtattcgattcagtggtctgcgtaaaatttgtctccaacttgtgactgtgatatactagtgtgatgcatatatattgcttggtgaatttggatggacctcaacgacaaggccctcttggttgaattgggacttggtacttgggaggccgccagcccgccacgccagttgcttgatgtttgcgtggagcttgaaagcttcggcacatccgcatatgttgtcttgtttgtttgtctcataaaccataacagaaagaaaatagaaagaaaatactgttggttgatttgttatgagagagaaatacttctgattgaccgataaatttgtttgatatgctgcggcttccacagttgctgagggacggattggagagggccagcttccgcacagccggcggcttccacagttgctgagggatggattggagttccgactatgagtagccacgtagatggtcctcactagactgctgactgttatggctcggccttatcttcccgg

SEQ ID NO: 3645 - DNA, 3719 bp, Sorghum bicolor
ccctaagttaaggtggatctagagttttgcaggaagtgtgaagaaggcactaacagtaacggttccactcacgaggagcaataagctggatctagagtttttgcaggaagtgtgaagaaggtagtaacagtaacagttccattcacgagcagcaattaggcaagctagacagtcagatagacagggcctcttcggccaactggaccttgatgtgccagtcatgtgcagaaagattccaaatcctcaattgcagacgtgccttgtcaatcattttgcataaagcgataaggtaaacaaccattggagtattgttaacagcagcctggcacggccggatgcgtcatctgaataatactgagggcaggacattaggacaggaaacctaacctctggaaattgtagtggctaggagccactgatcatggcctctaaaagtgctaaccactgcattacaaaaaaacgtgtgggtgttgtgggttccaagttggctgttgtcacggaatggtatgaaaatgccaaagattctctctgttctgttaaatttattgatgacttgagcatgacaaaagcagaaaccttacataatccgtaaatggtaagacggcttacaggacacattagatgttaacaaaaagaaaaagggaaggatctcgaggatcttcatgtttgaactcagaacatcaaagctgttgttgatggtcagaaaaccatctagtcaagttttctggttattaaggtataaataaatcgcccttttactgcaaactcccaactctgctattacacatcatgcacgctaatgctattttactttggctcatcagtcacaggtttcatcttttcagtttttcactatctgaagtttagaagcctccttgaattcaaaaggggaatactacttatataatttcatatatagttataaagaatactaaaagagggtaccaaaaggcttagtcctaatcatttgatgaagtcgttgccaccgatggcagcatgcagtactatcatattgtcgaggttttcaattgctgtactgatgcaaacgtaatgggtttactaaccttgcactcaccgacttcaaaatgaagagtgctcatttggtccacgtcaccatcatcgtcccgaagtgtctagaatggcaggcaaagctgattggataggcaggctgggaaaagagcaccgatgacgatggatgggagctcccaccattggagagcaatgattatcagccacatatgacttgctacagaacaaaagtcttcgagctaaccactgtcatgcatgcctctcagaaagagcgataaagcctatggttaagcatgagtatacaacgaagtgaatggaacaataaatcatgctaaagtgctaaaactttttatctctcatgttgcacttcttgcacgaacagagaaacgggactgcatttgaaatgaatctcttgtgctttgttctcctgattgaccaactgacaaattaaattcacaagcatctgcaagcacattacttccaaatttcagaagaaaaacaaagaatacagtgcccaactacatagactttgagataacatatcctccaaatgacagcccatctctgaccgacacttgcagccgttcaaatgtaccattaacaaaatatttaagcgttacacatgagataacatatcctccaattagcggctttgccctttagtattgtcatcactggctgattgccttggtgtaccctcacatggacgctccctaaaaagttcataataatagcaacagacatctgaatgaagcttggtgcgcctactcggccgggctagctatagctaggtaccaatcatggaataagccagtatattcctatagttttttttttgtaattaaaatgtttgtgacgattatccgcaccgtccagaatactctaatccacaagttgaggccgcccatgaagccttgagctccaggacgtgtgtataaaaggggcctgagctgactggactccaagcatcagtgaagcagagctagcaatctctcaagctcacagcgccaagccttccctgccgtgacgaagagctagctaagagcgaaagcaagatggtgaagctcgcgttcggaagtgtcggcgactccttcagcgccacctccatcaaggcctacgtgtccgagttcatcgccaccctcctcttcgtcttcgccggcgtcggttccgccatcgccttcggtgagtatatatatatatatatatatatatatatatatatatctatatctagatatatagattgactttaattcgtctgtgtgcctatctcaatgcatggaacgatgctaaacaattacctgtccagatgtccacatgcaggtaaacagatcaatgaccgcgctctggaccctgccggtctggtggcgatcgcgatcgcacgcgcgctggcgctctttgtgtgtgtctctatctctctctatatctctggcgggcacctgaacccggccgtgaccttcgggctggccgtgggcggccacatcaccatcctgacgggcatcttctactgggtggcgcagctgctgggtgcctccgtggcgtgcctgctcctcaagttcgtgacccacggcaaggccatcccgacgcacggcgtgtccgggatcagcgagctcgagggcgtggtgttcgagatcatcatcaccttcgcgctcgtgtacaccgtgtacgccaccgccgccgaccccaagaagggctccctcggcaccatcgcgcccatcgccatcggcttcatcgtcggcgccaacatcctcgccgcggggcccttcagcggcggctccatgaaccccgcacgctccttcggccccgccgtcgccgcgggcaacttcgccggcaactgggtctactgggtcggcccgctcatcggcggtggcctcgctggcctcatctacggcgacgtcttcatcggcggcaactaccagcaggtcgccgaccaggactacgcctaagtgctccggccgtctgggctgtttggatttgaattgaacgcagcgtttggatctgcgtcgtcgtttgctttgctcttcgccacgttaaatggtttgtatgtaatgtgtgtcgatgatatctcgtccatgcatatggtcctttgtattcagttccctttttttttcggggtaaaatcgatgtaaagatctcgtccgatctgcggttcttgaagtgaaaaaacaaatgtgatttacgtttcgagttagtttatgcatggatttcttgggtcgtttatggtttccattcatccacgtctgcccccaaatcctgacggttgcaatcccgcccgtgcaatggttactacgtacccgtacaatcgccattttaaaacgaacaagcagcacgcgtttcctctggaattcttaaccgcgcaggtacaagagggggagaaaaaacatcgagactagtttgcagccatggcgtccggcatgatgtatggtctgctcgcagcagtgcatctcgccgtcgccccccagcggtcgtacctctcgccggccggtttcatctccacttccctcttcgtgttccggtgtttgccaccgcttgctcggtcgtaccgtcgtagtctcgccctcacgccggacgtgacatccgacgcctcgccgctggtactacggtggccaccgccaagtcgccaaccccgccgtacgtcacgttcgtcttcgccgtcaatggccacactgccgtgccgaccgctaccctgt

SEQ ID NO: 3646 - DNA, 3913 bp, Sorghum bicolor; identical to SEQ ID NO: 3633

SEQ ID NO: 3647 - DNA, 9587 bp, Sorghum bicolor
gaggaagccgagcagttacgaccgagcctaaatattctacgatttgcattcttttaggttgatcctatatttcaaccctctaatcatgtcttaattgaagattaatctatgtgggtattaaaccattgaaagaagaattataacacacccaccgcgcaatgcatagtatttcgtgaatcgagcctacaagattatcgaatgcatttgtggctccgatagttttgttttggtttgccaaacaacatccacaaaaaagattggacatccgttaccttatcccttgtcaccttcacttcttcagcggcctcctgcacatcgtctgcacctacaacatacatcgctaacatcttttcgaaaggataaatattgctttacattattggtgcatgatgttacatgttggtaagttgaggcggtaacattaattccagtccatcttgttcctggttctccgactcttggaagaattaggggctattttgttctagtttttttgtgctgactttttcgtcaaaagccataagatgaaacaaatactagcaaactaaaaaaactagaaagctaacttctgaggtaataagacaggattctagattctcgtttcttaaacaaattctcttcagaaacgtttctttgcaaaattattttgtgaaactgtttggctagcttgctggattattgaaactagctaaaaaatcagggtaaaacaaattttttggatgtttctcactggtacaaaaatgtgattctccctgaaatgtttttctattcatggtgtttggcagcaattatagtgattctattgagatttgagaatttcaaaaaatgtttctcgctaccaaacacatcttaaaagttgaaaagcacgctgagataagatttcctagcttttcatgtgccgagaagctacgattttgttaaaaactcaatagcaaaagtcaacaaccagaagccaaataataatttattgcaaagatcattagctaaaagtcaacagatagaagacgaaagtgagaaagctagctttttttttttaatacaaatgtccaaaaactgcagttcaaacaataaggcccaaagttgttacgacctgccacaatgttctacaatttgcattcttgctatcaatccaaaaggctgatcctatacttccaccctctaaccatgctctaagtgaaacaatgatcaatctcatcttcatgtcatatgtcctcgaaaaattacaacacaaccaacacgaattcacaaatgcatagtatctgtagaaccgcacatacatactactgacatacaagatcatctagttagtcgtggctccaaccctcaaataggccttttctctggttcgccgaacaccgtcccaaaaacattgaattgtctctacgtctgccttacaacatccccgtgtcgtcttcacttgttcaacgcccctctccacgtcacttggaatatggccacggtccacaatacgtcgctagcattttttttttccgaaaaaaaaaggaaaaacacacacacacacacacgtacccgggccgtgaaaggcagccggacatgtccaagcggacggccaggatcagataaggcatatatggccttaggcctcgccgtgggccccacgtcccggccgcgccgcacggcatgcgtcccaaggtcgggtccggggtggggggttgtacttgtacggtgacgcgagcgacgctgctgccaccgtccgtcccagcaggccagcagccccggcggaccggccggtgggtggcgctgggcgctggcgcgcgcggcccgcccggtccgacccccccgtaggccgcaggcttagcagcgtaaaagcgacccggcccttgtgccttaactaaccgcaattcaacctcgacgccggatccgcgcccccgctaggcccccgactcgccgccacgtcacccccgccccgcctggggctggccacgggcgcacccgccgaggtatttatacgagcgccccgggcgagccagcgccccacaccgtccgtcgtcccgtcctctgttttgcccagggccaacaacgggtcgagtggaaccaacgcccgccattagaagagagaagagagaatagagataggtgtggggaggaggcagacgagaggcgtagggaattcggccgacgggggtgtgtggagggagtgagtgagtgcgagagggagaggggcggggctgtgacgagcgagcgtgggctgctggcgatcgcgggagcgatgacgacggcggccggcatgccggggtcgtcgccggtgggctcggcggcggccgcggctggcggtcccgcggcgcccgaggtggcggcaagggacgcggtgatcgggtggttccgcggcgagttcgccgcggccaacgcgatgatcgacgcgctgtgcggccacctggcgcagatcggcggcggcggcgccgagtacgaccccgtcttcgccgcgctccaccgacgccgcgccaactggttccccgtcctccacatgcagaagttctaccccgtcaccgacgtcaccgccgagctgcgccgcgtcgcggacgcccgcgccgccgccgcagccgccgccgtcgcggggtcctgctgctactcggaggaggccacgtccacggtgatccaggagcccatggaagacctccccgctgaggctgaggctgaggctgagcctgagcccgaactggagccggagcacgagcaggatcctgtactacaggatccggcaccggcggccgaggaggctgacggcaccgtcatcgaccccgccgtggagtaccacgagcaggacgcggaggtggattcctccggggattcgtcggagcggaaggccccctccacggaagacgacaccgtagcagacggacgtaagtacaatcactaccaacccgcgaattaaatcctcccgtgctcacgtcaattaattaccctgcctgctgagtgctgcatcccgttcatgttccgacctccgattcgaatttgccgaatccatcgtcgtttccgttagcttttcgtccgcactagtagagcactgcagagtttctaaaattgtcgaatcagtttaggccgcttcgtaacttttggatctggtagccaggtgtggcttcctccgcaagtattttttcttattactaatctcctattttctgggttttaactaaaacgggatgaggactactctactcgtagtataatgcctttttttggaaattatatttatatttatatttttcgatttacgagattaacaggtttccagattacgcttaatcatggcactattgcttaaagttgtacaggagcgttggttcatgggaaatgggaatggagatggctggcgcacgggtccatttcttctggtggttagtggaaaaatagagcgaggtccaataattcttcttcgtgtccatgtccaacgagtcaccatcctctcggtcaatcctggccgtcggccgtggcggcggcggagaaggtagtacccgtgaaaagggggatcacgaggttgcgagggtagaaaaaccctaccgcttttcctcctaggctccgacggccttctttttcattttatcggcttgctccgcctccacgcggccacctcggccacccttttggtctgccctggtcccgcggaaaagtaccggtggcagtacggcggcctcttgcaattacgcgatgcgtttactgtagctccgcgtcgccacctaatggtgttggagtaggagcagtttatttaattaaacgtgcagtgcagctacgggcgctcgggcgtctccgcccgacccgtctggccgagggcggcagcggcctcgaatccaccgttgcagttgggcacaccagcctggttgggcctggttcgtgcaagtgcgcagcggtgctgcgattggctgttgccgtgtctgcaaattgcgcgtggctttagaatattgctgcccatgtgtcgctctcagatcgatcggcgtaggagcacggttggcctcgacggaacttgtgactcctcacttgatggaacgagcgggcggtcggtgagtgccacactgccacacccacactgacgccagccttgaactcgagctccccagcggcgtgcgtgcctctgacgctagttaatggacccacatgaacgcaccaagagagaccgaccacctggcccccagatcggtttttggcgggtgccagaggctggatctggtgccgctgccgcgccgatcggatcggccgcaccgggcagcccgggccgcacacgtggtcgcccgtgggccactgtctcgtgggaccctggccaatcagccgaatgtactgtgacgggtcccgtctgctgggtttcgcgaatgaacttattgtctccgtacgccatgttgctgaaggccagtggaccgtggcggctcccgtcgagtcttcaggggtaggtgtggcgtacggtggagactggagagctttttggagcttcttgaatttctttgcacatgcacgattgagctgtgccatggaattgattaatgggtttacaacagcgttgctggtgtatgcgctgtccattgatgatgccatcatgttctaagctttgtccagatgctgctgttgttagtcagcttaccttttggcaacccgtctcgattttagaagatttcagtcgatctcccccaaaattcacaaccgatggactataactttattttttaaaaaggaagttgatggaaaacaattcttgggtttcttgtgcgtgcgatggaccattgcgaaagctagaaagaaaaggagagagtgatataagtagagcgggttactggagtatcatcttttatacccgtccttgcccaataaggacatgtatgctgctgctggtccctgctttcattcggttcgtgcgcctacaggctacagacacactagcaatgcccgcgttcacttctttcaactttggcgaatctcttgtctacgccctctcctctttattactatatcatggaacgcacttttttttctctccattcatgctgtagtccgtagaaagtgacaccaaaagggtgcagcagcttgagattcaaccaaaaacgaaatcatttcttcctgggttatgatgaatattttgaagatccaacgagtgataaaaacagcacaggacagaacaatatgtgagaatctgaacgggtgatagactggacctgttggtggtgatcgagggaccttgccctctaacaaattcccaagtgaacatttggcatgccatgcgtgaaaagtgaagattattttgctttactgaaatgtttgtgttctcttggatctgtttttttctccctcgaatacttgtgtaagcgttttaatttaatttacttgctttctccaaagctaaaagttttgatacccagtaataaggatgttatgtccttaaatgagatagcttcgttgacgaatttggtgtctatttccttttatttttgttgttgcaagccctagtatatatccaacaatggttgggtagcctctgagatatatattacttagcagatcatactgatcaaggatctcaaggggaacacagcctaccagagagctatcccatctgctctgaccacgaggagtgcattgcccgtcctgagaggatcaagatccagaaaggtttcgtggccaaggaatccgtgaaggggcacatggcgagttccaactttacaccactcggcaatctttctgtacagaaggactaggagatgctgtaggaagtagtagcacttctattcatcttaaaattcatttcttctgattacactctttttttactgatgttcatgatcttgtgctacaaccaggttaatgtcgtcaaaggcttgaagatatatgaagacgtctttacaacatcggagatcgtgaaagttgcagatttcatcaatgaaattcgtcaggctggcagaaatggagaactttcaggtaagtcgtgttcctattgcttcagaagttcttgttcatggagtttacctatatgtctaaaagatttagtattatttctttgttgttgtttccataactgacatgtggttatttctccgaaagaaaaaaaaatctgctgtatcatccattgatgctttaagataccaaaatgctttatacaatatgcatagcatctatgtggtcctagttcaggctatcattcattaccttttctatcattgctgatttttttttgtcttatatatttttgtgctaattggctcatagatctagggtcctaggtcctactaattgtcgcccccatattatagaaacagaaaaatataagatgctgatatttataactagattactattactgatctatcttcctaggtacagtagaacttgaatctaacaatcaaaagtaatcaacctagtgactaacatgctgactgatttgacatgtctttccctttagctaacttgaagtttacctctcttaatgaaaaagaaacacctttgaactgaatatataatttaatactagtaacgtattagatcgcttctgtttcattggaataggtcgtgccaagccatggtaacgtccgtccaaagtcgtgcacaacaaaatgttgatccaagtaagacctcaactgacctcttaagttcctgactatgctgacccctccttaagaattgacatagaacccacaacctgggtatgctcccattgggttttggctgaaatcatcacatccaagtaagctacctgaacttggaaaccactaatttttttcttagctctggtcagtgtgttctattgtgtcccttttaaatgtgactgtatgtttacgtgctcaatgaaacgagtatcttgtagtattgccttggtgcaaattccttgttcagtccggtgcttattatatatctttttcttttttcaaatttaggtgagactttcatattcttcaacaagcagatcaaaggaaacaagagggagatcatacagctcggtgtcccgttatttcaacctaccacagaggaagctaattgtatgttccgaagactcaggaccttgttttcttcaacttgcttacactggcaagcatgtgcatagcatatttgcatgactatggcatctgaagacatttgaaatgccttgtgaatgatgtcacaaatatcctcttttttctccttgtccacaggtcacacagaaccaatcccccttgtcctgcaggctgtcattgaccaccttgttctttggcgtttaataccagaaagcaggaagccaaacagtgtcatcatcaacttcttcgatgaggtagatgttgatgttttattaatatataaataaacatgacagcacactcgatgaaatcaaatgctctttcgcttctattagtcataatatctgtgcagatcttgtacctttcacccgagttgaataaagttggcctctttcagaactacggccattcaccctctgtatagaataataaagaattttagaattataacacactgagagtggtttaaatttgaattttattttatgtatctcttaaaacactctgttaactatcctctagtgaacctacaattggccaattgtggggccgggtaaaaacagaattgaaaaacatttgtctgactgtcaactttacatttgatttagtgagtaacaaaaactggggttgagattacagggctcacaaactgaagaaaaaagatgttaccttactgacacaaatttgttattaaccctaagaaattgttactacctggacatctgtgttctctacggggcgtggatagatagctcagttttacaaacagcaaatatcccttccttgagcaagtgttattttaggttctcacaagtcagttaatctgtttcgcaggatgaacattcgcagccctacttcaagcctccccatctggacaaccccatttgcactcttctgctgtctgaaactacgatggcatttggcaggtcactcgtcactgacagcaacggcaactacaagggacctctcacactctcactaaagcaagggtaagcttaacaattgcgttatctatttaatcatactatctaagatgaaacataaggctcatgtgccatggaattgcgctccgaaaacctgcaggtccctattagtgatgcgtgggaacagtgccgacatggcgcgccatgtggtgtgtccgtcgtccaaccggcgcgtgagcatcacgttcgcaagggtgaggccatccacgccggtggacctgagcccactcccgtcccccaccaaggctatgacgccctggcagccgcagccggccactggctcccaggtggcggcgcccgcgtgcatgacgcagaagcccccggtcagcggtgccatcatcggttatgccccgacaccgcaggccgtgctggcgcccgcggcctggggcatggccatgcgcgcgcccgtcatgatggtggccgcagcgcctgcgaggcccatggtgatggcctcgtcgggcaccggcggcggcaacatcagcaagcggatgggccgcagcggcaccggcgtgttcctgccgtggacggtcgggccgaagcggtacaacaagcaccttccgccgcgcatccagaagcgccggttctcggcgatgatgtcgcccatcgaggcgcagggctgaggacccgcccgacgtcacgtcgccgtcgaaccaagtaggacccgatgcaatgagccaccgtttaattcgtagggttattggagtgttttttctctcgtcgtcgaggcaaaaaaaaaaggaaaaaaaagaaaagaaaagaagaagaagaagaagaagaagaagaagaagaagaagaagaagaagaagaagaaatggtcaaaacgcgcgggcagttgagtttgaacgtctgtgtattttggtgacctgtgtgtgtgtgtttttttttcttttctcgagggcttttggtccgcctgtaatttagccgggtttgtgacttgtgactttgtgagtgagtagcggagttcagaagcggtagaagagtatgggtctactagggataggtgaattcagaatcaggacagggttttccttttgttttcatcctttcccccctttttttccgttccgggaagaacctgatggatgttgccatgcatgcatctcatgctgagtttggagtcctatatatatataggtaaaagatgcatcttgtgttgctcacttgttggatgtcaatcttagctatatcttagagcgtgtttggtacatgagttttaccaagttagtctcgggatatcatacatgtcctggactattagggcagtcccaatggtgtatttatagtggtttctatatctattaattaggctgtaacataaatgttttgctgatgtggcaagtgaattaatgaggaaagagagggcaaaagagagaaacggtttctccaccacgaaaccgagtcttccctggaatcgagacgtgaagaaatcgcccaaatcccgttggggagaaaccagtcgagtctatgcagatccgctgcgtcgccgccgccggcacacgcgctctccactctagtttcccgcgtgactctttcccctcgcgtcagtgctcctgctgcacatggatccacctctgacgccggtaatcctgccgtcctggcagcagcagcatctccacct

SEQ ID NO: 3648 - DNA, 8280 bp, Sorghum bicolor
aaccaaaaaattttcaagatttcccgttacatcaaatcttgtggcacatgcatgaaacattaaatatagacgaaaacaaaaactaattatacagtttagctgtaaatcacgagacgaatcttttgatcctagttagtccatgattggataatatttgtcacaaacaaacgaaagtgctacaataccgaaaacttttcacttttcggaactaaacaaagcctagttcctttccgtgaagtcgtgaacacaggatagcagcgtccgaaaacaaataaaacacagggtagccagccgccagatccaatagctacatttgaggcctgtttggttcttattactaaattagtcagttaaatttgagttattttagtagataaattttcaaacgccctgactaaaaataaactaaaatagtttagtctcattagttatctaggagtagcaaaaataattttagtagctaaattttagtgaaaggaaactaaacagacccttgttataatttctgacaatagaggcacatgtggagactttatcaataatcttaagatctaccagctcaggtttttaaattttgcatagggtgttgtattcatatgggtgggtgtatgtgtttacccgtgttaattatagagtgattactagtaataaaaatatacaattctagtaaagtttgacactattgatgtgtttctaattgtagaaggatactttcttcttgctatatttattattgcaattaataatgcctttttaagtattacggtctaggagatcatttagcatgaaaagggctgaccttttggcgattatttaatattttttggatagatggctaatatttaaccgtgtcatccaccatttcctttcaaggacacggcgaaaaaaaagcaaaatgaaccctttatatgacacaactttcttagatggcattaatgtctagaaatttttttaattcattgagaagttgtttgcattaatttttttatttgtgtgaaaattgatagcttcataagatgcttagaccctaaatgattttataccttgtcgtggaagttaacaaagggaaaccttacatgattataagctttgactttgaaaagtcacatagagcttttcgaatcttgcaccctaagcagggttccactcctagctttttaattagtttactaagtaacatgaatttgaggacagaaaaaaaacataaacgaaactcactatgaacctaacatcaacaattgactataataaaggtatacaagcctggttagagggtgagagggagtttaacgggtaaggacaatgagtgagagaggtaattaaactaagctctcctacttccaccttatccccgttatccctaccatccatcatctctctctcatcaaattaacaacgttgtctttgaccctatcgaagagcgcctagcttcaaaagcaccaccatctacaaacacaggccaaatcacatatgctctcaaagtgtagaggctttggatttaagcttgaaacctcgatttagattttaggaagcgataaatagtaaaagataaccatcatgcctcttcactctcgcatatctcccctttattttctcaattactgcctttctattctaaaaaaaaggtttatcaactatcatttctacgtataaaagtggattgttttgtagcagtaaaatcgatcacataaagtcattgtaaagttagtactacgctactatagtattgtacagatagcatggcacaatgtacggtaatactaaatggtactacataaaagaaaacaaacttttgtgcctatacaaaaaccggagcgcaaggttcaaaaaaaaaaaaaaacagagcgcaggaacgaccgcgccacgcgggggagaatattctgcagccggtccacgctggactggggcagccgccgcagcccccgccccgcgtgcggctctctgttcctccgtcccgttctcctcgctgctttcatccgccaacgctgcaactgcaacgcacgcaataatcacctgctgctttgctactggtggagggctcgctcccttctcccccgccctcgcttcgcttgctcggggcgccaccgtggggtcctcctgctcctccacccacatccaccctgtccctgtcgtccgctctgctcaaccaaaccggcgaaaccgctcccctccccctctcctcctccagatccatccacctctcctcgaaaccgtccgagtccggagcagcaaggcggagaggtggcggcgggggagatggagagcctggcgcagcgcgccgcgctgctgcgggagtcgctgcagaagagccagcaggtcaccgacgccgtcgtctccatcctaggctccttcgacagccgcctcaccgcgctcgactccgccatgcgccccatccaggtgcgcctcgcctagcctgctcgcccgctcgctcgctcgctcggcgccgcccctctctcttgattttatcgttagggctccccgcgtgccggctgctggagtgttgctctgactgatgccgctgcttgctttgggcgcaggtgaggacgcacgccgtgcgcaccgcgcacgagaacatcgaccgcacgctgcgctccgcggatgtgatccttacccagttcgaccgaactcgagaggtgattgctcctaacttcagtcccatatccatatggtcgtcccgtggtcgtcgctcccttttcacagtatttgcatcctcgcggacttggaactgcagcttaatgccttaatttagcctataataataagggtagggagcgtgcagttagatgtgatcctctacctcagcgtatttggacattgggtgtattatgtgagcagtcaaagtttttgaacttgaccactagcccctccgtttatcgctgtgaagcattgttgtattcaaaaaataaaaaaaattcaaccttgcaaattttgatcgacatagttactacattatatacacgcttaccgtatgaaagttgtatcaatagattcttattcaaattatgtttaagtcgatgttcatttttgtaataattgacaatgcactattggagaaatcaatgctcaaaatatacttctgaagaatttctcgttaattatgccttaaatttatgggcggagtgagtaatacacaaaagcattattggatttgtcatgaaaaatgctaaaagctatcaaaattttaacaacttttacaaagtagtggtgaaaattaatggtcaaacatgcttgttcgaggccctgtccatcacctaaatgacaatttaaaaagaatggaggtggtattttatctatttattaattttgtgatgggttgttttttagggagcacagccttacttcacctgttttatgtacaggcagagcgtgaaatacagaagggtccgcatgagaaccttcaaggcttcctagatgcggttgatcggttgagaagtattgagcgtttctttagttcaaatcggagttaccgtagtagtgatggggtgctcaaccatgtaaacgccctcctttctaaggcccttgtcaagatggagggtgaattccagaatcaattgtcccagcgcaggtttgtgtctcattattaatttacaatgatcgttttgctacctatacctcatctaacccttgcactgtgcaccctccatactgatttcagcaaaccgatggagcctgatcgtctttttgattgtcttccaagtacactaagaccatcatctgaatctcagcccgaaggtgggaaaaacccatctgaaaatcaccaaaactcagaggctgctgtatatagtcctcctgctcttattgagccaaagtttgttccactactctctaaattagcacaacagttggttcaagctggatgccaacagcaatgctcagaaatatacaggtacaagcatttacactgataattttgcagtttctcttgttatcagtatgtaaaaaacttttcttgtttctgtgggcctctgttgtgtgtgctaagactctaagagatgcagtacagttgtatgtgatggagtgacttagtgaagcgtattctcttttatgtgcagtgaagctcgctcttcagctttagaatcaagtctgaagaacttgggtgttgaaaaactgagcaaagatgaagtgcagaaaatgccgtgggaaattttggagtctaaaattgggaattggattcatttcatgcgaattgctgtaagtaatttccctccctcagatcttctgttatggtatagcgttgctctggtgacatttgcctcttcttgagacaggtcaaacttctttttgctggggagcgccagctttgcgaccaagtttttgagtgcagtcaatctttgagggataagtgttttgctgcaataacaaagaacagtttggctacactactcagttttggagaggctattgctatgagtaaacgatcaccagagaaactctttgttctgctagacatgtatgagataatgtgtgagcttcaaacagaggtaaatatctgattctgatcatagctacagtggtggccctgtttggttgggcgggtaaagtttaactcctgtcacatcgaatgtttggacacatgcatggactactaaatatagattatttacgaaactaaaaacacagttagagagtaatttgcgagacgaatttttaagcctaattagtccatgattagacactaattgccaaaaaagacgaaaatgctacagtacatgttaagctttaacacgcccagccaaacaccccgcaaccatttctcttttgtgcacatcgatatcagcacactttgcatgctgcccttacagtctatgttcatttaggctaaactgaatgttaaaatcctttagccgtttctaaaacttttggttgtcagaaatcctgcagttcctgttttgagtgtttggtccacttgtattgatgacatttcagctgacttaattaatgtaaaaacactgctgcatatgcttaccctaatctacaacttccttgttgtatacattcaagtaacaggagtgtccgtatgccatagttaggggtgtgaattgctgcttctattggtctccgccaaccctgatcgaacatacagttcgctaccatccgttagccatctgttggaccatgggattcccccccaccaaattgatcttaagttttaactcagtctcacacatggcaaaattcttgtctctgagtttgcttaagtgcacttttacttgaaaaagaaattgtagggaatgtggagacttgtagactatcaagttaatttcattctgtttaagatatgtaagaacgaatgtaaatgtactttgtattggtgaatattttgtttatagaaggaatttaaagcttcattgttgttgactttgtagattgacaccatttttgttggagaagcatgctcgcaaatgcgcgactatgcactgagtttaacaaaatgcttagcacaaacagcgcaaaagactttcagtgattttgaagaagcggttgaaaaggatgcaacaaagaatattcacactgatggaacagttcatcctttaacgagctatgtgatcaactatgttaaatttttgtttgagtaagtatctaatcaaattcatatgcaatttatgtattgttgtaaatgaataggtgtacaagatttgtccttattcatgtgccttctttttctaattatccactggcttttctagttatgcatcttatgcaattatttccgccatgtgtcatttcttatgttatcctcctgattggccaaaagccttttttttccattgcactgttttgatgaccagaataacactcatttgtagccctgtttcttatgcaccatctcgtgaagatccttttggcatatattacaaatgatttcagcctccttcaacatcccaggcatacatgcaagcacaaaagtcgaaaaaactgacaaccacctgttaatgcctgtgcagctaccagtcaactctaaagcagcttttccaggagttcaaaaaggaagatggaacaggttctgagctggcagctgtaacaatgaaaatcatgcaagccttacaaaataatttagaagcaaaagcaaaacaatacaaggatccagccttgatgcacatatttttgatgaacaacattcactatatcgtcaaatctgtccgcaggtatgttcttatatcaagtaacactaggaagaaaataacaatagtgtgtgtaatatcttattctctcttttctctgtcactcagatcagaagccaaggatttgttgggtgatgactggattcaaaggcaccgaaggattgtacagcaaaatgccaatcagtatagaaggattgcttggtcgaaggtatctgtgctctggatctttgattaaaaccgaatacttttcttgcatattgatatcctttgttttaaggcttatttgaccttactaaatagatattctcatgttcattaaaaaaaaatagatattctcattagccacaacctacctgtccaaataccagtattcatgtagctgccaactgcaaaagtaggtataagtaggcttccagagacattattggtcataaactcaccactcctaacgtgcgacaactgccatgtacagtatctaatacttgttcctgactgagtaggcaatgtttaggaataggattatagcgggatgtaggatttttccaggaaaatggggggcaaaccagtagtttctcagcaagtcaacattgcttgcagcaccacttggtgtgtttgtacatgcaatgcgataatatcacctggaaaatgaaactagtatatgtagatactacgcatgtggataaccttatatttatttggtctgatattacaggtgttgcaatgcctctctggtcaaggtttgacttcatcaggtggtagtggtcaagtaggaagtgatggtggcaatagcagtggagcttcaagagcagctgtgaaggagaggtcagtccgattctgatatgataattatttgaggtctgctttcttgtacaatttctgaagcactgtcattttttggtttcttcctgcggtgctatcagattcagatctttcaatgtgttattcgaagagatctatcagaagcaatgtggctggtcggttccagacactgagctgcgtgagtcactaagacttgcggttgctgaaatcctgttgcctgcctaccgatctttcataaaacgttttgggtatgttgctctgactccttgttacttgtcgaaagttaacttatgagcctaggaagaaagttaacttatgagcccaggaaccagctatgctttctgaaagatacctgcagtattccttctagttcatattcattgtgcttagacatattgttttctgatgatctgtaggcctctcatagagaatagcaaagcacctggaaaatacgtgaagcacactcctgagcaactcgagctgctgctaggcaatttatttgaggggaaacaagaacgcgcttgatagtttggtactgcaacaaggatgatgctgttctatgtaaaaaaaaaaatggagaccctgttagcgttagcattgcttgtgatctccccatgggagtcaaatatacagctgctgtggcaccattccttgtttcggcgcattattatttgtacagaagaatatatatgtcagctatgcctttttgttgacctggtagttgttaactaggcttgttagttcgtagcagtgtgcgagaaaccggctggcagtgcttgcgcgttaactgaacaattgagtttttagttaagactgtttgctagccatgtggattgctttgaagattcgtgtcttttatgttacgatgggattgggttttgaagggttcgatggactaacgacagagtccacgaccggtgctgattcattcattcgggacgagcactggatagcgacccaattgtagtttttttcttctatgcttctatctcttctttatcatcgcagcatatctgtctaagcggtttttttatttagattcatcttgcgatttatagacaaattatgcaattaatttttgtttttgtttatacttaatgattcatgtatgtgtcgtaagatttgatgtgacgggaaatcttgaaattttttttagtttttaggtgaactggccttgtttagatccaaaaagtttttagattttgacactatagtactttcgtttttatttgacaaacattgtccaatcatagagtaactaggcttaaaagattcgtgtcgcgatttacaagtaaaccgtgcaattagtttttatttttatctatatttaatgttttat

SEQ ID NO: 3649 - DNA, 6694 bp, Sorghum bicolor
tgaataagctagtagtactccgtattattttcaactccctctgatcttgtgagctcgatttcttaattttcatccgatggaaattgtttaactatgcttgcgttctctgaaaacgaccttttgtggtgcaggttacaaaaattcggagacgcagcctgaaattccggctccttgtcgtcgtgccccacgtttgcatctgcagggcaggagtggctcgttgccctcacaagggcctcaatcatcatcgttcatcaagcgcgcttcggtgtaaagattcccctcctgcccctagctgtagaatggggccctgaatcgctttggaaaatctgcacgattccaaccaaggccctttgattggaaggcaatcactgataacgtctcctggccttttcaattcctttgaattatatttttttcataaatttatatatttttatatagaggaagagaagagtggcaagtgccccggcctgatgcaggcagcagcaagttttaacctctcttggcagcagattttcagacatgcagtgcaggttgcagcacgattcatgggtggtccttcactccttggctgcttgcctttcaccggcgtcgtcaccaactgcatgggtctgcaggttttggtccatcaggacttttgactttcacaatcgaaaggagaaacaccatgcagcgtatggcctgaatcaaaaaaaaaaaaagcagcgtatggttggatcatggatatgtgcaggtaatcaggaattctggatatgggctccactgaagataacatttcagaaacactggcctgaattctttttcaaagtaccagcggataccccgggattctattctatcctcggtaagttgctgatgatgaccagacagtagtactacggcttgggttgaattgcactgcagttttcgcaccaccggcgatgcttctggacgaccataacacaccattaccgaatgataaagcaaagaggttaggtgcacgttccatcactgatccaacgcaacgaatgaaattcaatcatgcgctatcagcacatgctaaaaagcaatgaaaggaacagtaatttatgtgccgtaagcccgtaactccgtgagctgcttgcttctagtagtagtagtagtagtgccgtggcccttctttatcagcgtgccaccgtttaaagccgatcagatcatatgctgcacggcactggaacagtgagcagatggagacacaagaaaatgataacaaaaaggcagaggacagcgttgctcgaacggtaagctccggctccgcgcgcccgttggtgtcctgcgtctgcgtggctttggatcacggcgctcttctgtgtgctgcctttaatttggcttcggatcccggacacatgcacacaggcaagggaatcccttcgaagtgaggaaaaggctctgcctcagggagagcctagctagcaaacgatgagtgcaacaaaaggatattgcaagcaagcaatcatatatcttccccttcattctcttgtaccattgctttggatcactattgcactaaatcgaatcggattagttaaaatagaatcaaaactccatcccttctgtagtcctgttacatttatttccctatatttatttcgctacaaacaagaaaaataccaaattggataagcctctctggaaataatgcaggaggaaacggaatctaaccaaggccttgtttagttcaccacgaaaaccaaaaaattttcaagattccgcgtcacatcgaatcttatagcacttgcatgaagcattaaatatatacgaaaacaaaaactaattacacagttttggtgtaaatcataagacgaatcttttgatcctagttagtctatagttgaatattatttgtcacaaacaaacgaaagtactacagtgtcaaaatctgaaattttttcggaactaaacaaggcccaactgaccgtgggccccggcccccactcccgtgctcgccaccttctcttccgttccagaagcacctccacatcagcgtccttccagaaaaaaaaaaattggaaaaagaacagtgtctatctcttccttgctcactctcctcacaagctgacctgctcccgagctccctcctctgcctttataatccgccgagccacaccaccacctcacagtcacagacacacaccgctcgctgcttcaagaaaccaccgagctcccaagcgcgcaaggcaggagagagaggagcggaaatggaggggaaagaggaggacgtgcgcctgggcgccaacaagttctcggagcggcagcccatcgggacggcggcgcagggcgccggggacgacaaggactacaaggagcccccgccggcgccgctgttcgagcccggggagctcaagtcctggtccttctaccgcgcgggcatcgccgagttcgtcgccaccttcctcttcctctacatcaccatcctcaccgtcatgggcgtctccaagtccaactccaagtgcgccaccgtcggcatccagggcatcgcctggtccttcggagggatgatcttcgcgctcgtctactgcaccgccggcatctccggtcagctctccttctccttccttcttaattgctgcactggcttcttttattttttccagccaacatgtgatgaactttattaatttactgcgatcatttgttacacttttgtgttgtcttctgattttccttttgctacggctaattttgcctttagcttgcttagctcagtaacaaccctccactccatggtaacgccttagcaaagcttttagtgtgcaattttcgagataatatattgaaacaaaagtgttttggggaaagaaacaagagcaacttgtatgggcaacaaatccactttgccatatggctctgacatattgtgtttgtgggacttctaatccatttgctttggatatactagcactaaagaagaaggggggagggggggaatatgattttatttagccgatattagcattagtagctgagaatctgttaaatttcttatttcttttgaaacagtagagctttcttacagttacaagatttcctttgtttccagcatataacacttcgcagttatatgcagtgagcatggggattagcaagcccttgttaattcattattttattaaaagagtaaaatacaccggcggccctttaagttgtcgctctgtgccactttggtccatgaacttgcaaacgcgaaaaaaaggcccctaaacttgtcagcatgtgccactttggtccatgaacttgcaaacacgaaaaagtggcccctgaacttgtcgacgtgtgccactttggtccatgaacatgcaaatacgaaaataacaccggctgcatggcactgttctgccacgtggccgcctctggtaggccatgcatgacaccgtttatggtgctgacgtcaacaatgatgtcagcacttcttttttaatttacgaaattgatatatatttttattcatagcgtcaaatatatcaaataatatatcaattcgttgcatttattaattaaaagagataattttaaaacaagcaaaaattattcgttttctaggtttcatatttttcctaggcagagtacacatgaagaggctacacaaaacatttcatgaatttagcatttcattaataattagttatgaaataaataaatatttgttggcgcgttgaaagatccgttacacgtttatggaccaaagtggcataggccgacaaattcaggggccactgttttgcgtttccaagttcaggaccaaagtggcacaggcggacaagttcaggggtcactttttcgggtttgcaagttcatggaccaaagtggcacaggctgacaagttaaaggaccgccagtgtattttactcttattaaaaataaaacagatcttaagcctctccccttttgcttggtaccataccagcttgtaccttatttgcacccagggagatttgtcctgcaataaatatttttaccatgtaataacatactctgtagtctgtactactatagcatgtgctgcttgtaattatgcaaaggcatcaacaactgctacctgtagttcatctctgatgtagcacttggtccacagtttcatcagtaattattaaagattaaaacacaaaatgtgtcattttaattagctaagcctcactcactcgaggtaaagaaatgacgtattagacgagcctatgtaacttgtgaggtgtgtacatagaaattagaaaactatatcagttaacctacagtggtcattccatttcaaaaaaatagtggtcctacatatggttaattggacatatattgttgtcaatttgtgtagtacttttctggtcatgttttgtgtattgactccgattacatgcttaatctcaaagcatcaaactgtgaaagattcaatggtattcagcaagcataaaccaataacacaactacaacaaccaagggcaccactaactaatggttgttacctgctaccgcaacaggagggcacatcaacccagctgtgactttcgggctgttcttggccaggaagctgtccctgactagggccatcttctacattatcatgcaatgcctgggtgccatctgtggagctggagtggtgaagggcttccagcaggggctttacatgggcaacggtggtggtgccaatgttgtcgcccccggctacaccaagggtgatggccttggcgctgagatcgttggcaccttcatcctggtctacaccgtcttctcggccactgatgccaagaggaatgccagggactcccatgttcctgtaagtactcttcgtccttcactttcctagttggttcaactgttagagttccgcttgaattcacatttgcaactaaaatataagatgatggctgtagtttgtgttctgacttatgaatttctgatgttgaacttaatgcagctcatatattgtgcatgtactgatgaaatgaactcctgaagtatttattatctttgacattaagaaatgacatgtaatgaaccgatgaactctaggtctttatgtcttttggaaatggaatttagctgattatttaatcttgtgtttcaacaaattgaaaatatatgcatactcttcaatacatattttcatattgtgttaagacttaccacgaatgaaatccttatttggtgaaaacagatccttgccccactgccaattgggttcgcggtgttcctggtccaccttgccaccatccccattactggcactggcatcaacccagctaggagccttggcgctgccatcatctacaacagggatcatgcctggagcgaccatgtgagtggaactactgtcgattcctctctcaccaactttcgattcccaacagttcggtaccactcggtgtataatgtctccacggaaatatcagacatgtagccactgtctttccattttgcagcaatcatagtggcatgctctagaaagtctattctgattctaactaggtgctgtattctttttctttcgccttcaaactacgactaatcattcgctcaccaaactccaaatgatatagacacagtggcatgtcattgacagtcatgacctatagttatagatgtgtgttaatcttatcacaaaggcttgtctccatccattgtagttggcatgcatcaatctaggctgtgtatgggataatgtataattctgggtattgataccatcttcctgtttgtgtgattgttttgcagtggatcttctgggtcggccccttcattggtgctgccctggctgccatctaccaccaggtgatcatcagggccatcccgttcaagagcaggtcttaagctggtcttaagctgccgcggccgtgccgagacatgccagtccgaagaacgagcgtcttcctgtgatgtctttgtctgccctgcccacgcctaggtccaaagtcgattcctcgtctctcttcaagattgctcactgctgcactgttctgtaatctgaacccaggactttgtgtattcctgtaccgagctcagctgtgtatgtttttcttccatcgtggagaatttaagttattaccgtttgttgcaagggttcccgtctccttttatgcgttgggatcttggcaagaaagggcacatgtcatgtgaaaatgtgaatctatctgtctagtgaaatttgcatcgaaagtcaaattgattcagatttttcttggtttagtctcaacagaattaacactggattcgcattctcatcggctatgccgcctggaaactaaggctaacatgaaagaaagcgaccaccaatgcgttgcgaaccacatagttaggccttgtttggatataatagcattcgtatcaatccacatgtattgtgatggataggagtaaaacttgaattaaattttatctcaatctattctatcacatgtgaattgaggtgaatccgataacatccaactaagacctaatgtaataccttaggagtaagaatttgacaccgatgataaaataggcatagaacgtagcgtaaccattagtggatcataacagctccagtcatctagtgcttcacttgaatctgcagcaattgtggacctagtggggtggtggccttctcgcagggccatgattggagtgaggatgaagatgatggacgacaggtgtaaaagacttgggggaccctgggacctaatggctacatgcattgctgcctgcgtactct

SEQ ID NO: 3650 - DNA, 5123 bp, Sorghum bicolor
gcaagcagcaccagcaaccagcaaccactactagagaaagccagatttgccctctctgccgagcgttttgggccctcggcaaagaccctggatccggtagaccattccacatgcggcactctgttttgtatgcagggttaatagctcgattattaaatcgcgagtccaagaaacgcgctttttctctcatgaaatgaaaacatgaaacgaaatgatgtcgctcgctcggcagtgtggtactggtacagccacgggcgggcagacacgccacacgcggcgagtcggtcggtgggcaggacgggcggaccgcggagaccacccacccataccgtgcgtgcgtgacatgtgactgcgtgtggcgtgcgcggtgaggcttatcttggaattgttggacggaaaggccgtgggtcatcgggtcgacgcgcacgcgggttgccgcagcaggcaggactgcaggagggggaggctcgcctggtgccgggcgcgggcggtttcgtttcgccgcctacggcctacccctgcgcaaaccggcggcgtccggtgccgccgcccgccgactggcctgccgtgctggacgcgcggtgggtcgcagtcgcagcccatcgcgcgcgctgcgccgtgacaaggacgtcacgccacgaccccggccggccggggcggctacggcttccgcgcttcggtttcaattcagaggcatcatcttgcgagcgccgagccacatttgtttattccttgcccgttgccctacgcttcgcgcagccgatcgagagcagaacccggccgcggcacgcagctgttttggcgctggttccactgacgaccctgcaccgcgcctgggagtcgggcagagccggcgagtctgtgggtcgctcgtcggtggagctcacataatgaacgaaacccggaacgagatagaaagagaaatggctctcggtcggtctcggtgcgttagctttcacttctgaattagtgcgtaagccagcgagagtggatagaaagcaagaagtttcctctttttatttaccgacttccggcactgactgaagtgtcaactacaaatgtggtgccgcgatgtgaaacagggtgcacacgacgacggactcctgctgaccgggaaattcaacgcagaagcgtatgtatatatgtcaaaacgtactaatagtagtacatcctgtacgcacatgttggtctttttacacatggttatggtctggtcgttccttacagggttcggtatttccaggaggagaaactttgtacaggtagttcacgggtcaagatccttaatctgaccttttgcaaatatacccagagagcttgttttcccattttcttttgaaccactcagatcttgtcttttcatgctattatttcctttctcgttttttggcgatgcgaagagccaagtgggaccgtggacaaaacgtaaaaattgattcgttcttcttgggcaagttaactttgactctcgccaatgtgttttccagacatggttcgatctgtttcttttataaggacaactactatatgttgtctctaccttgctctcatcagaggggaaaatggagaatcagatcgtcgtcgtccatcaatcgaaccaagcattgccatttttacctcccacggcgtcaaatcatacgagagctcgcagtgggcacaaactcatcgcaaaaaacggcaccagcgctgctctttcgcctgcgcggcgccgcggctgctcttcaatttgtcttgccctctagatagagtctcacgtacgacgcagcggcagtcgtcgatttttttttttttttgactgaacgcagtcgtcgaatatggaaagttccggacgaaaattgggctgctattgcaccggaaagcatcaggaggacgcgatgtctgctgccgctctttgccagggccagccgcacccgcacccgcgccgcgtggcccgtcagcccgtggggcgcgcatgcataaataccggtgcgctacccccgccacaaacacacacaacaacacacaagccccctgcaactgcaggtcgtcttcttccccaagcctagacccaagaacgaaacacaggtgttggcagatcgctcgctcgaccgatcgcaaccatggtgctctccaaggccgtctccgagagtgacatgtccgtgcactccacgttcgcgtcgcgctacgtccggtcgtctctcccaaggtatatgcacccatctcccctctcagctgttcattctttcaattggatcggctggctactctgtctcgcatcaatttgttttttgccggcgtttgcgctggaacgaacggccgatttgtctgcagcagggctttttttttttgagcaatctgcagcagggctttgagcaatggctgcaatggcataccccgagcccagttgatgccgaattaatgctgacttttggtctcgctgcgcggccgcaggtatcgcatgccggagaactcgatccccaaggaggcggcgtaccagatcatcaacgacgagctgatgctggacgggaacccgcgcctgaacctggcgtccttcgtcaccacctggatggagcccgagtgcgacaagctcatcatggccgccatcaacaagaactacgtcgacatggacgagtaccccgtcaccaccgagctccaggtacatcacccggcctcagcagttagttcactctgtcgtccctcgcctgtgttgtgctctcagatcggagagacggttcttggtcggcgaaggttggctgacctgaccacgccgtccgggggcccgccatgctggcacaattttttagttttcctttttttttgagccaaaaaaaggcacaattgtttaggttggggataggaagctgccacttgccgggccccaacttccacttgtttttttccccccggcgcagcccacgaccctggttgctgtatagatcatttgtttttctgttcatcaattcatggcatgatcgtcactaatggcgctcgtgggatgagaactttgttttgcctgaaaataaaatacaagatctgcgatgtataccttgggccgtgccgttgcgtcagtcactgagattttgtgttcttttccctcttctgacacccgggcaccctgctgcgccgacattgcattttgcagaaccggtgcgtgaacatgatcgctcatctcttcaacgcgccgctgggcgagtccgagacggcggtgggcgtcggcacggtgggctcgtcggaggccatcatgctggccgggctggccttcaagcgcaggtggcagaacaagcgcagggccgagggcaagccgtttgacaagcccaacatcgtcaccggcgccaacgtccaggtataaaattcatttgattttgcctccaaggttcagattttgagttgtgttattatcccccaacaaggcaatcgcaatcgactgcttgatgaatcttaattaaaaacctgcaggtttgctgggaaaagttcgcgaggtacttcgaggtggagctgagggaggtgaagctgcgcgacggctactacgtgatggacccggagaaggcggtggagatggtggacgagaacaccatctgcgtcgcggcgatcctgggctccacgctcaacggcgagttcgaggacgtgaagctgctcaacgacctgctggaggtgaagaacggggagaccgggtgggggacgcccatccacgtggacgcggcgagcggcggcttcatcgcgcccttcctgtacccggagctggagtgggacttccgcctgccctgggtcaagagcatcaacgtcagcggccacaagtacgggctcgtctacgccggcatcggctggtgcatctggcgcagcaaggaggacctgccggaggagctcatcttccacatcaactacctcggcgccgaccagccgacgttcacgctcaacttctccaagggctcgagccaagtcatcgcgcagtactaccagctcatccgccatggcttcgagggatacaggaacatcatggagaactgccacgagaacgccatggtgctcaaggaaggcctggagaagacgggccgcttcaacatcgtgtccaaggacgagggcgtcccgctggtggccttctcgctcaaggaccgcagccggcacgacgagttcgagatctccgacatgctgcgccgcttcggctggatcgtgccggcctacaccatgcccgccgacgcgcagcacgtcacggtgctccgcgtcgtcatccgggaggagttcagccgcaccctcgccgagcgcctcgtcctcgacatcgagaaggtgatgtaccagctggacgcgctgccgtccaggatcccgccccctccaccgccggcacagctggtcaggaaaaagtcggagctcgagacgcagaggtcggtgacggaggcgtggaagaagtttgtgctcgccaagaagaccaacggcgtctgctagtgacagttccaccactagaacatcaccatgatggtcctcgggcctggtgaactacccatgaatattatctcagtgccgatttgagtgagcactgcgatctattacaaatctgggtagagtgtgttactaatttgtgcagttgctatgcactgagttgctataagttcgagaccaacagttttattttccaaggaagagagtaacaggctggtgtcgattaatgttcgtcatgcatgtgcgatttcttaagtagcagtataaaataaacatatagaagtaattaaatcagtcaactggaaattggagattcatctttttttttcttaaaggctgcaaaagctttgacagatttttattagacgaaaaaaggtttgttacaaaaaaaaaaaaacagctcgagtgctaccttaaccaacgggtcagctactctaccctgtacacttaagaaaaacatgacaggaaaacaaacatttgggagaaggaaaacttctgctactggatagagattcatcttgtgtttgacgtgagtgagggtttccaagagcctctcagcattgctttatcacaaagtttaaaacacagaaaaaaaaattaggcttcaataaattgattagattttctaaactaacatttatctctgctcaccaaaataaccgttcttgttcttttccactccaaaacaaccattcttgctcttttctactctc

SEQ ID NO: 3651 - DNA, 5832 bp, Sorghum bicolor
tagaacgaatgcaaaacgcaagtcttgtctgtcgctgccatgccagcacagacgtggagaaggcatcacggtcacggatgattgggcccgtgagagggacgcgagacgccgcccggctcttggcagccacaagaacgcaggtggcaccgccggattggccggccgccgctctcgcgcgtatgctccaggcctgccgcagtaatctgaaggccgccgttgtgccaggtgtcgtctttgcaggggcagttgcagagaaggaaaagagatggaagaaaaagagagaattgggttaattgagttcactatcagtatcatgagatgaaatcttgtggaagtgggaggcacgctggcgaatgttctgcctggccccgcgcgctctgcttcgatgtcatgcttgtccacatcgatcagggaaagtgacctggctggtttctctgatcgatcagccaaagagcgaggtgatcagatcagatgatgctaacctgccaaggacaaatgggcagcgccccccgacgattaaattttgcaacgagaagagaacaaaatcacaactcatcacccaactcatgaaaacaaaagcgaacattattcacgcaaagtgccctgattaatctccaatgatcgaccatatcagttccatttgcagatatgttagacttaatggtcatgcatggagatcgagatcgatcgtgtgcggtccagaagcagaagggacaggattaggtttagagagccggccctttacataacggcgtgccatgctagaaacctctcgagttttccttcagaaaggggcgaggacgacagctaatgccgtcacgctcatacagcttgtacgttgcaactaatcgagcctgcgataagaatctcaatttgtaggtagcgctatagggctcgctgtctgcctgtacgtgatgcaatgcaatgcaatgattcgctgttcctgtttgttattattgacaatcaagtctccgagcatctccattggtggataagtactactccgtgatttttccattcagaggataatgcagctagcgaattgtgtttaatccacaccgtactcttttttttagggaaccggagggcagaagattttattaaaaggagagcaaaaacaaaacacaaaacaaagttcttacaccgtactcttcatctgaataatagtgtccatgctaaatgtgtgcctcatttttccaactggcaattggcagttggaatatgtatatcaagcaatgcagcatgctgacttcaatttacaaagtccagataagtttttttgttttaaagaagaaacaagaagtcctgatagtcgcttacgacgacgatgacagccatgctgacagcgcatccgtcgctattccacagcatgcactcggccatattcttggtttgtttgattacttgtttgcagctgcacatatgcttgcttgtggtcatactccgtgtttcagtgttcgctacttcatagtactccatgacttatcccttgcatgcatattttcatccacctagtacttttggcaagttcctgatctagccacagcaaatacggccggtcatgtaccgccacgccaccgaacgatgctggaccagtaattggaagcaccagaggttttgtgctttcagacgtactcaggatctcaaattctcaattcgcttgttaatcttttcttaagaacgtacagtacgtaagcatacaagccttctagaataatataggtgaatagcccctccgattgatcactggccaccagttcgactctggcatgacataatgatgagggtttagtcggttgtgggcggcaaattatatccaaaaaaacctcaaaccagaaactaaacccttatccctgaccaataaattattgtaatcaagcgcagttgctaatcaaaccatcatcgaggtgattggtgataggtgatgagctcgtcctctcccccgcacgacccgtgctcccgcgccccatatatacctcggctctcccatctccggactcacaccacacagcaagcacaagcgcagagctagctaaggtatctactagagcagctgctgctggtctgagtctgacatggcgaaggacatcgaagcatcggggcccgaggccggcgagttctcggccaaggactacaccgaccctccgccggcgccgctgatcgacgcggcggagctcacccagtggtcgctgtaccgcgcggtcatcgccgagttcatcgccacgctgctcttcctctacatcaccgtggccaccgtcatcgggtacaagcaccagacggacgcgacggcgtcgggccccgacgcggcgtgcggcggcgtcggcatcctcggcatcgcctggtccttcggcggcatgatcttcatcctcgtctactgcaccgccggcatctcaggtccggtagaggcagcatgcatgcatgcatatatgccgccgtgcttttacttcattgaatcgtgtgcgtgacacacacacacacactgacacttacgatgcaggtgggcacatcaacccggccgtgaccttcggtttgttcctggcgaggaaggtgtccctggtccgcgcgctgctctacatcatcgcgcagtgcctgggcgccatctgcggcgtggggctcgtcaagggcttccagagcgcctactacgtgcgctacggcggcggcgccaacgagctcagcgacggctactccaagggcaccggcctcgccgccgagatcatcggcaccttcgtgctcgtctacaccgtcttctctgccaccgaccccaagcgcaatgcccgtgactcccacgtcccggtgagtacacatatatacacattcatttacagtgaattctgaaactcatatatgcagtacaacactagtgaactgttacgtactgttagtgggttgctgagtgctgactgctagtggcaatatatacaaagtactcgatcgatgctaaagactaatagactatactgtagagtttacgcatactgccaaaggcagaaacggatgttaaacagagccgtgtgttgagaaaggacttgagctgacgtgcagtaatcctattgacgagtagaaattcagactttagtcctcttcgctttcccaaaatgaaaaaaaaaatcaggttttggctagcgagtatattagcaaacttcattgtaaaaagccattatgagaagaaaagcataatttaagtgtataatatggacagccaagtagtcaacgagacatccctggctttggtgctagctagccagactgcagatcgactgcagattttaacagtaaaaattagagcacaaatcacttcagcacgcgaaacgtttacatcaacacaaaaacctttatgtcgtaactcgtaagcaagttgggtagagcgctgttaaatttagcatgcaacataaaagcaacatcttaacaaattaaccgtcccactttctgaacgtctaggcagagtctgaatttctgctgcttagttcatacttcatactgaatttaagcaattaagacatggtaggtcatgtgcccgagaaatcaagtattttcatgccacaaatacaatgctactacacaattagacattccatatatgtagggaactcaaatacagcacaatggtcccgaatccggaatcccagctgtgcagagctctcaaaatcagacgcatgtgaagatgtatcctgctgccggatgcaatgcatgaattggcagtttggcactgcatgtctgcatatacatatacggagtatatgccaataagcagataggaagattctcgtgtgcgtagccagcagagtgtcttcagttgtccccgtcctcaacagcgaacgcgaggtggccatcgaattgcaaatgattggactgcttcatgaggataggagcaaggtgcaaaattccaagagaaacttctggtcattttgcagatttggtgatacatccctttctacttttctagctagctaagagcctgtgctagaaccacgcgatttcaaaatcctgtgttaaattttttttttctggggcacatttaaaaaggatactcgttttgtcagtaactgatgatgttgcggatcattagtagggaaattgcaatgatgtaatattcggagcactaactatggtttttcgccccttggatttatgtatgcaggtgttggctcctctcccaattgggttcgccgtgttcatggtgcacctggccaccatccccatcaccggcaccggcatcaacccggcgaggagcctgggagccgccgtcatctacaacaacgacaaggcctgggacgaccaagtacgtacaccaatcagtacaactaatgatttaaaaaatggcacgagatatgcagagagcctgctttaatttttctcatgctcaattttatttggaaaagaatggatgaatttttttaataattaatgcgagaacctaaccaacggctcaggataagcttcctctagccttacgacgaccattgataatctatcacaatgtatgcatatatatactactattattccattttttagtgcagctgtttcgtcttacgcatgacataagagcacccctttatcgcaatatactacctcatcccttgccacaccctcctaccttacggacacctaaaagatgcccacatctgtttggaactaatataaccctgttgttgcacagctgttgcttggtcaagcacatttaactatatgcttcccacaacaatactcaaaacaaacctttacaagataaatactcaaagcaagtaaaacaatcgcttaggatatcttacattaattatactatatataggtacgtacgtatacactaaatatataaagcataactgaaagcgaaaggtgtagtttatgttagctccgtcctccaccaccactcactgtgtcgatcgtacgtgttttgtgtatttgtgcagtggatcttctgggtgggcccactgatcggcgccgccatcgccgccgcctaccaccagtacgtgctgagagccagcgcctccaagctcgggtcgtcctaccggagcaacgcctgagtccggccggccgccggagacgcgccaggagctggggcatcgaagcgtagatacgccgcacagtacatacatgacgccctgttcctccacatctgccagagtgtccactccgtacgttagtaattgtgtcaaagcacgtacgctgctgttaattttcttcttcgggaaaaaaagtgtgatatatctttgctttctgtatatgtatgaatgaattctgtaaggagaatttggaagccagttatgtgagttttttatttatcacagtctatgaatgaagagtataaaatgtcctgaatcttacttgcaacttcagcgaattttttttttaaaaaaaaaaagaaagaagaaggaaaggtcctgatgagggacttgaccgttggtatgtgttgggcttacggcccaatttagcaagcccatcgtgggggcgccgtttctcctctgttgtgctgggcgctggcctgctgggcttgggactaaagcggggccgacctgaagcagttaggcccagcacaaacatgcgaccgggggaaggacgccgggcgggcacacttgggagacgtggtggcggtgaccatcgctcgcgatcgccggtcgccgtccaacacgccctaacactcctcggcagatcgccgatgtgcccgtgtgctctagtgttcgatgcgttgcacaggtaggcgcagggtccgtcgagctcgcattccctttccctcggcgtcgctctcccttagaggcccgccttgctgcgcgcgcatgcgccagccggtccggtccaagcagcgcggacgaaggcgacggccacctccat

SEQ ID NO: 3652 - DNA, 6572 bp, Sorghum bicolor
tttgttgttggatggttcgctgggaaaagaaaaggaagcaggaacgaaaaaagaaaagaagaagacgcggttcagatcgttcgctgagaaaaaaagctctcaaacgactgggaaagtggaatttggtcgagcaagggaggtagagggtgggatgcgaccaacaagacgggcacgggtgtagagttctcaaacaaagtcacttaacttgatatttaacacaaggacagtatgaatttcaagttatggtatattgtctacatatttctatgctttgcaataggagaaaaattctattaaaggttacattttaattcagtacaggctatataggatattatcatattattgccaatattaacttatattttggataccatagtcatagtaaatagattttatattttatatagaaaaggtaaatcataaatagacatatatcattcccgtcgcgttgcccaggcatttgatagtttttttttcttccattgcaatatacagacatatttgctagaataatataaatatgaaaagtcaatattaaatacgacatataggcctttgaaccatcgactcttctttacactaagttattgatatagttatttttgaaacaaaattattcttactgaaatctggatcagcatatggtcattcaactaatcaaagcgtaaactgaaatcttaaacaatttatagtctatttcaatcaaaataaatatatctctgtaatccttaacgagaattgcaatgtagagtcgagagaagtcttttgtcataatcattgacatatagatcaatttattggcaactaactttttgctaactttaataaaaaattaaagtaatcatttaccataaatgatttttagtcaggaactgagcgtagctcggctgattgggtgcttattgggtttgttgtggtgaaacttgcccatctagattcaactctttaacttgatacgagtgctcgtattttcttggatttatttcaaaatttaacaacgttattcttttagcggtaggcgacatgccccataggccatagctcgtccaacttggttcttcgaaggtgctcatagggatagagtgtgcgtatgttcatagaggtgagtagcttctacgtttgggttcgtaactgagtctcacaaaaatctacttctcttgtaacaattcatgtgcatatttactaattaacataaaatctctggaaaaactacttataaaacactactctctctcagttgctaaaagaagtcgttttagtcttttggataacgaaataatctccaaagcataactttaaccttttattttacaatatttttttaaaaataatatatatatatacttttataaaaatatttttaaatttccagactaatcaactttattcatactttatattttcaatatttaactaaagacttatctaaaacaaattcttttagcaactagagggagtacactgataatggcctccatagattaattctgtatttaggccctgattagttttcacttaaaaccttttttctagcacatcgaatatttaaacatatatatatatataaagtattaaatatagattttttaaaaataactaattttttagtttgtattttgtgagatgagtttttaattctaattaattcataattaaatactaattgttatagttataaatgtattataatatcaatttttttcttttcgtgaagtaaacaaggccgatgagattaaaagaaggaacaaatgatcaacaattcatgctgatgtcggccacttcgctacaattcccaacgttttggaattttccgtaccgtatctcgggcagcggcagcgaggcccaaggagtcaaggacagtacaaaaggcacgagaaaaagaaaacaaaacacggggcgaaaaccttgcggcaaacgaacaggaaaagtgaaaaatcgctttcacgcaggtcgcgaaacagaggcgagcaggcgctgcgttgccacacagcggtactgcgggtgcgggagtcctccctccccggtagatttccttccttcccagagagccgccgaatcgggtccaatcccgtcgatctttctggctgcagccatcacgggactccagaagttgccttcgattcggccggggccggggaagcggggatggggctcggggaggcggcgcggcggctcctggcggccgtggactgggagcgcgaggcctacccggcgtacggcgacttcctcgctctccccgccttcgttctcttcttccctaccgtccgcttcctcctcgaccgcttcgtcttcgaggtgcgcctgcccttgccgtctttctttctttctcccgctgtttcggtcaaggtcttcgactctgcgttgaacgcgagcgcgtagcttgctgccgagaatctcgcctcaacttttgctgggttccctagctctaatcacagcttgtacaattgcctcggctaaacgtcttgtgttcaacgaaggcgctatttttagtgatctcatcgtctaatcgttgcgtgtcttgtgctaatttgacacgtggaaagcgattggttcggcgattatttcttttcaagctcaaatgattagcttctgctcaagatctaaaatcatgtcttttatttttcttttcctctcatagcaattgtatttcctatcctcgactcctatacccttctaaaactgtttggttccaaactcataaagtatattagagtggccactgtgggcacaatgtttttccacggtaaatggtggtcccggaatccaggattagtccaatgctgatgctttgcagcttccgcatagaaggtaacacggaagtcaatggagatgcctgctcttttaacatcagttcttgataaggagggagtagcctggttggttggtttccagccgggagcaggtttcctgaagaaattgttgtatgctggcagctgtccggactggtatttttagacttagagagtcgcattgtttacatccaattggcatactatttctaggattagttgctctttttagtatggtaaactaagtacagttggttgattcatgagtatgaagacctgtttagaatgtcttctgttggacaacagtttctggagtaagagagagcctgttttttttatgagccggctgaggatttgagctaggaaattaagtataaatccattgaaatactacaatacctgttgattacaatatcacaagttccaggggtggagtgtgagaacagttcagttcaccttcatgattttctgggaccataaatttcgctgagctttatatattccctgttaaagtgccttttagttttctgtgttaagttttctgtagtgatttgcaataagatgttattgaaaacttctagtgctagctatatgtatgcgcattcaggtctggaaagtaaccagtcagcagttgcattttggaatttggacacaagaaatgcagaattcttccattcattttggtgaagctaaaagatttacagcaggataaattatgtacatttataaatattgctaactggaaggctagttgagatgctaagttcaactagatgaaaaatgaaattgttcattttaccgaagtgttattatatagaaaataatgcacattcactttatacaaatctgggtaatggagttttttggcccgcaaccattgctatcatttgtgttatctttcaatttgagacatttccatttccctgctgggatcattttcatcagtacttatcatctttgtcattattgggttcgcatttgcttatgcctttgaaatatgttgttccgaaaagggttacattacaaggatgaatggcttcagaatccttaaaaaatagacttttatgcttctatatagtcttgtctctggtgttccaatgtttccttttttgatccacctacactttttttttcacatttccatttcttctgcatttattttaatggtccacctactcttttttcacatttttttgtttcatattcattaattttaatcattgatatatgatattccttaggtcatggttgatccttttgtatcacgtcatagttttttattctctttttttgcaaccccttcttaagattctgggggctgtgttgtaaggtctgttctttttctctctttaatacaaagaccaactctcctacgtgtttgagaaaaaaattatacgatgttccttccaaagttttgcattaatcgactacctaactgctttctttttctgtaactgttttagtgggttgcgaggaggcttatacatgggaatggacatcagagagctaataacgaaacagaagaagcaaggaagaagataagaaaattcaaggaatcagcttggaaatgtgtttatttcctgtctggagaacttttatctttgtcagtcacatataacgagccttggttcaccaataccagatatttttgggtaggaccaggagaacaggtctggcctgatcaaaagataaagtaattccgattcttccttccactgtactttttgatacaaattcttaatggttctcaggctggtctaaatctaatggttgtgcccttactcccagattgaaacttaaggctgtatatatgtatgctgctggattctacacatattccatatttgcacttatgttttgggaaacaaggcgttcagactttggagtgtcaatgtcacatcatgttgctactgttgttctgattgttctatcttatgtgttcaggtatgtttcttatcttggataactgttagcttttgttgtttcatgaatttgcaacatcattctctcagtataggaggacttcttagtcatcattgctgatttgttaatttctttttctaactcctctcataattcataggcaattttttaatttgaatttcttttccttggtcaaccagatttgctagagttggttctatagtattggcaattcatgatgcaagcgatgttttcctggaagtagggaagatgtccaagtacagccattgtgattggcttgccaatgtttcgtttctgttttttgtgatttcatgggttcttctccgcctcacatattttccgttctggattctgagaagtacaaggtaaattgttctgttctgactcataagtctatcagattcttatgccaagaaaaatcaccgagtttgtaaaaaaatgtttgcatatacagtagaaagcagattggtatcttatttgttttgtactaacgtttattgtgagaaattggacagtgacttcctctagtctgaacaacaacccttcgtatagtctggcagtagcatcttatactctaaagagaattttactctgtacttccattgaccacacaaataagttttggatattttttgtatgcgccactggcacgaattagagatttcacatctttgtggactttcctaatcatataactcagtgtccaaaatatatcataatacataattatagacatgttaaattctgataaggtaccatacagatccaccccattgcagtgttggtccggttcacagtttctttgttgtggtgcttgttgagtcgctgtgaggatgtggccttcatcgtgtgagttggtcttgttttctgttgtagctgtggttttcctccctgtttttcaccttctcaattaatacatagatggactgttaactttgctttagaagtaaactaactgaaatgtttttggattcttttcacattatatgacttttccatttgtttcagctatgaggtcttgttgactttggacaaaaagaagcacaattttgatggtcctatatactattatgtgttcaattcccttctattttcactacttgttctccacatatattggtgggttttaatatatcggatgcttgtgagacaaatcatgacaagaaatgttggagatgatgtgcgatctggtaagccctgtcctgtctgaagttttggtatgctgcacgagagcatgattttttccaacttgtgttgaggtgaaaaactttctttgattttactttgccttgctttccatacagattcagaaggagaagacgaccatgaagattgattggcggcaccattttagcttgtgtgttataacggtgctagaaacatcaccccccaataccctgagcttatacattcttttgctggattccaagatttcgtgcagattatgagaggacgagcattgttcctcacgagattcatcagagccgtgcctatggtttcttctgtgtcgactgccaatttgtgctgtactaagtatgcattagaaaccgcactgcaatgcattagaaaaaagttggatgtcgaatataacattcttttgtgttcacacaaagtgcagcagtaaatgtagcaccaattggcattccaaaaaaaaaaatggttccttattcccccggccaggtgcaggtgcagccagagtgtccccagtaaagatggggatggtgcaactgttgagccaacagtttttttttttaaaaaaatgtcgacctaggccttgtttagtttccgacaaatttcgtaaatttttttaggttcttcgtcacatcgaatcttgcg

SEQ ID NO: 3653 - DNA, 3719 bp, Sorghum bicolor; identical to SEQ ID NO: 3645

SEQ ID NO: 3654 - DNA, 4165 bp, Sorghum bicolor
tttggcagagaggttgcatggatgccggaaggcaaagaaaaactagcaacgtgccagacttactgcaagctcaagaagttaaatcaacacagggggcctaactatttgtgtcaagctgtagccaatcgtagaagccatccaaattgatcctatataaagagcatgccactcactagatagcatgacatcacaccaaacttgccttgtttcttcccggtattccgcaattcagttcataatttgcatttttagaggacaagaaacaaaaaaaaaaaatcaaaagaccaaccaaatgcaggtatgcccaaaattcagagcttatcgtcttatccggtggcttttgccttctttatccaacaccgccgttttcgtcacattcacacatgtgtgatgcatctacatacgcagggacccagatccagccagtggccactgagctgccgcattttttagggtttagatgcaaaaggttttagattttgatacggtagcattttcgtttttatttgacaaaaattatctaattatggaagattctttcaaaaaaaaaactaggcttaaaagatccgtctcgtgatttacaggtaaactgtgtaattagttattttttttatctatatttaatacttaatacatgtgccgtaagattcgatgtgacgggaaattttgtaaaattttgggtttagccactcgtatttgcgatggttcgcgtcaaacaggaccattatgctagacaagtcttgtgttactgctactacttgcaccaacagcacacaaacattttctgtatcgtctctctctctctcatttttctggtcttattattttctctgaagaaatccagttctttcagtaaatattggagagaaaaaaaatactatgaatgtagagtgccttgtttattctgaaataagtaccgtgagttgctttgcacaatgagatacgtttggtaccctcgcaaggattcatatacttgtttagttccgaaaatttttgggaaatggacactgtagcattttcgtttgtatttgacaaatattgtccaatcatagactaactagggtcaaaagattcgtctcgtcaatttcgaccaaactgtgcaattagtttttattttcgtctatatttaatactcaatgcatacgtctaaatattcgatgtgacggagaatgtgaaaaattttgtaaaattttttgggaagtaaacaaggctacacaaatgcaagcaaaagaacacggaaggattaaagcgatgcgtgccatcgagcagattcgtttcgctttttccgccatttataagggcacaagacgagcaccgcaacccacactcgcacttgggctagcagcagctcttgagtcctgacgcgcagggagagacagacagatagaggcggccgacgagcgacgcggatcggtagccattgctcggcggccggggcagccacggccaccatcatagctcctgccggcttcctcctgccgtcctggccctgctcccgttccccttcccggcgcgctcacctgtgtctgcggcctagcctaacctagcttctacagctacgagagagagagagagagagagtagcaaccgagagctgcgagagagagagaggtcagaacggaacagaggagctagctagcaactgtagctctgctgcgactggaccttgcacacacctgcagctttgaatgcgcaggtctcggccgtccggtctcccaaagcactcgagcccccttcccttgtcccttgccgccttttggtcacctcgggcaccgcgagctagggcgcagcacctgtgcctgttcctctcctgttcaccgctccctctctctctctctctctctctctctctctctctctctctcgcaggccaggcagggggggcagccgttcctttcctccccgccggtcgccatccccctcttcgctcatttactgctcgctacgactcctcgtgcgaccatctcctgaccgtgagcttgagggacgcggcggcgatcatggcgtggcgtggcccgctcggagccggagacgccggggacagcggcctcgagctcagcctcggcctcccggcctacttcgccaagccatcatcaggtctgtacgtagtctacctaccaggaaccaccaagtacacttttattcttctctgttgcaaatgcctactctctacgtatatagctcaaaagtttttgatctctggtggtggctcgcaggtttggacgtcgccgccggcgaggagtccggtgaggcctctgctttcgctcaccaggctgccaatgggagcaatggctccaaagcaaggttggtactcgatctctgttcactttcttctgcctgaaagaaaaagatcagacttttttcttttttcttttgatggtcgttcaatccgccagggtcaggccagcacccgcggcgccggtggttgggtggccgccggtgcggtcgttccggaggaacctggcctcgtcctcctcctcaaggccgtcgccgccgtcgtcgtcgggtcaccacaaggttcaggacggcggcgcgcacaagggcggactgttcgtgaagatcaacatggacggcgtgccgatcgggcggaaagtggacctcaccgcgtacggcggctacgccgacctctccgccgccgtcggcaagctcttccgcggcctgctcgccggtacctacgcgtctcctccctccaagaacagcggcgccgtgctgtgcatgtggccatatgcttgcttgtccgtcgtctcatcatttcttttttcgatcgcgcagctcagagggacccggccgcgacggcgggtggcgaggcggcggcggaggaggaggtgcaggagccggtgatcggcggcgactacacgctggtgtacgaggacgacgagggagacagggtccttgtcggcgacgtcccctgggagtaagtggaaacggcaccaacatcccccccgggatcccaccacttgcacaacacaacacgtcggcgtcaccatattcgatttcattcgaattcgcacctcacgcgccccgtgttgtccgccgcaggatgttcgtggccaccgccaagaggctgcgcgtgctcaagagctccgacgtgccggcatcgtcggtgagtccgcacctgccctcaccgtccgttccggcgagcgaagctttcgctcggcaagtgcacatttttgcacctgcgactgcgaaaccgatgagtaattgacacgcatgtcgttgtctctcttgtttcgcagctgagagcagggggcaggaagagggctgcagccgattgctgaaactgttcggcatcatgtgcttgtaaaaagtctcgagtggaggagacgacgaaaggagtggccagggctcaggctgtgtcccaggcctttttttgctgtctttctgctagtagtactagctagcagtgttgggtgccagtagtaaagtagggaaggagtatatgggaacaaagtcatgacggtattaatgtcatgtagtgcaagattagaagtggtagtacctcattagtactcttgggtgttaatgaatctatggtcttttgttttgggatatattttgacgttttaaattaagctgtatactatgtatgcacgcgtcaaatttcggtgtgtttgtgctgatctcacacgaacgtgtttccgtgtgaccttataagcaaaattgctaacttggcagtgtcattaaatgaaggagttttattagatgagagatgggtttgatcctcataaaactcatggggctcggttacctaatttatagtcttggtaactgtgtcataaaactatgcattgatgtcataaaactatgcatcgagagtggcaacaatcgaccgtaatacatgatgagtgggatacatgctgatctgagttctgtcgatttcagccagagttgaaatctgaacttggaactctgtttcgccaacccactgaccttgtttctttgcttccttcgaatcgagatcgttctacttctatattacagactctgggccggttttcttcatcgaactcggtcctcgcccgtttttataaggcccaacaggccaatactatcccggcccatctaaccataccagacgggtaccggcccatcgtgctgccacgaatctctgcgctctatcgcacgccccacgttctttcctcttccccaaacctgccgatgtttt

SEQ ID NO: 3655 - DNA, 9038 bp, Sorghum bicolor
taagcacaatgcttaatctttgaacttgctacatcgatctgagcttttgatgaatgaggtccaagcaccctatccagatggtggaaccaagcaggaaaaggccacactaagacataacttattctacaagcctatagcaagctccaaagcacatttagctagataagcaagcatggactaagtacaaagcaaaagtatattcaaaataagggtagtgtacaaatatggacaggtacaaaagaagaaaagtagaaaagacctgtaagactcagaagactcttctagacaccaagcagggctcctactctaactctctcccagtactagcctagcaggctagtagtggaagatagactattatccgtataaagtttcataattttgttattttatttgttaataaaataaaactcgcattttctcttctaaaaatcattatcacctcattaaggttttgtttagttctaaatttttttttgtaaaatagacacggtagcacttttatttatatttgataaatagtttttaattatggattaactaggatcaaaagattcgtcttgcaaattacaggtaactatgtaattagttatttcttttatctatatttaatgtttcatatatatgctacaagattcgatgtgacggagaatctgaaaaattttgcgatttttttttgaactaaacaaggcctaaaatatttatgtgacctgttaaagtcacggagaaagagggaattcgcaggaaactttcaaggtcctaccatggcagaaagttcctcatgggcgacgtgattggttttgtccccaatataggcagtggccctaattccaaggaaggaagggcatgtacaacccatagacggcttgctgtctgtaagttatatacagacagttaaatagacagcttgtacaatccacagacagctaatcatttatttgactatctacacacattaaatacatacatacatctatgatcaagcatgaataagatctcttcgtgatattttgttgcttctttaacacaaacgatatcacggataaataagatggacacaaatatattatttctttagaaccatcaatttaatatgatatattaataagtgtaaaatacaagtatatttattagcatccgattgttgcctatgtgatttctgaacgaaatgccggaataccttttgaacgtatgcaaatactttggtgggacattcaatcgaacacctagtgagcagctgagaagcgagccttccgtccactgcctctttgaggccatgactgctgcagcagtggtgccgtcagcgtcagggcacagctgccatgagggcctctcccatgttccattgaacaccagatgaactgcgtgccacacctggatccctcacctcgccgcctggagacgacactccatacaacgctacttcgaagggccacagcacctgggagcacgagccgctgctgtcgtctcgcgagacgacggcccggctgtctcttgtgtcaaccaggggtgtttttacaaaaaatgatggtataaagacggctcgaaaacacccgttgtacgtgccctgacaagttgaagaggacgatggccgacgggcacgagaggaggagggtacgcagtcaattagctgtgctccaaccaatcacctacctagcaatagcatactacgcggtcaattagctatactcctccgaacaatcagctagcgctctcacctccccacacatcccaacgagaattaatacacggagcaacggcgtagccgcgacgcaccggacgtcatccatccccgacccgtcgatcgcgatcgcgtcggacggaggagtccaccgctagctgctaggaaaggaattatcggcagatcgcgttcactccaccggcgcggcggcaccagcaccgagccgagcacggcgggtttgcccgtgcgtgcgtgcggtgcggcccgctccgtccgtcggttataaatacggggtcaaaggcaaggcggttgtttcgtcgcgctcctctcctcctcttcggccagagacagacagggagcgggggaagttcggtcgacgacacgatcgcagtgccggccgcagattctcccgtcgcttcgccgtcctccagccccgacactagcagcgcccgccctcgccctcgccctcgccctcgcccggcggtccagtccaggtacggccagcctccccctcctctctctctctctctcccgtctcctgccccggcttctccgatccgtccacgagccttggttggaaccagagacccgccgctagaggaatctcgtatcgtccgacgacccattgtttgtattttctcccctgttttgccataataatcgcgtcgtctctctcgttttagtcacgctcttcgttttcagattttccagtccccttgttttcgactgttgtattttgtttcctctttgccatacccatacatatggcactgtggcagcatattccggctgtgtagagagctgagacagtgaacgggtctctgctgttctggtggcctctttctctttggatattcaaagattccccggccgtcgtgcgacacctttcttcttcctggcacgtgtattggtgagagtagcagcttacgctcgcggcctcgcgcgcatgcaaaggagaggtaggcaggttcgatgaacctggctgctttgctttgctttgctttgctttgcttttgccgtgccaaccataaaaccgcgcagaattcaggttgtagccgtattgatcaccctgctcgtttatagcagcaacaccaatgctagctagctagcacactgtctttggattggatttggatggccggccactgcaactccatccatccatccatggcctgggagtcacgcggttagcagcctagcaccctcttttgctcgcatactcctctctcctgatcgtcgcctagcgcttgcagcgcattcattactaccactactcatcctacattaattaactaaattaaattaattaaacagccagatgttgggtcataataaaacaataatgctgtcatcatctggcacgtcaccggatactcatctcccgtcatgttgaattgttgatataaatcagtattctcgattccctcgtgtcattgctagtgtgtgcgcggtacaaattaaagagatgttcagatgagtatagtattattatatactgtgtgctacaaacaacgcagtggcgtctctctagcgtgccgcgcggagggtaaaaatatgggttcttgtcatgtgtgctacgtatatataagcattaaatccacttttagcctctcaactattgatcgactttaattttagtcatcaactataaaatcgtatggacagagcggttttgagccactttgagcggtttttttttcttttctatggactatggttagtgaatttttgaagcattggaaattcattaaatcttttgggtagccttgtcatgatgttctctatgcagaaaaaatgtaaaactatggaagttagtattttttggatgctaaaaaattagctcttttaattaataaatacatgttctatgatttttgtacgataatatatatatatcctatgatcatgaaactttttgcataactgttttatactaagatagaccttcaaaaaaagtttaagattaatttaatgttgtttgcttatgtccctaatttatatgtaattaataaagcatataaattagggatacaaacaaacatcattaaattaatcttaaattttttgaaagtctatcttagtataaaacagttatgcaaaaaagcttcatgatcataggatatatatattatcctacaaaaatcatagaacatatatttattaatgaaaagagctaattttttagcataaaaacactacttatttttatagtttcatatttttccttcatagaaaacatcatgacaaggctacaaaaaaaaatgatgaatttaccatgctcaaacaattcactataaaatttacaggtttaaccatagaaaagaaaaaggaaaaaccgctcaaagtggcttaaaaccgccttgtcctctctccgggtgctaaaagtgaccggttttgatagttgagggtgaaaaacagacggttttatagttgaggtctaaaattagacaaccaaaaattgagaggctaaaaatagacttaatcctatatataataacataacatcaataattggacacgcgtaacctgggccgcgaagacttttagtcaattgcacaagctaaagcaacgaagaaagtactagagtatccgccacactcgcctcattcatatattaatcatgaatctgttgaaagattcccttcaccatcaacctatagttctcccttcgttcctagaccaatttttagagttattcttaaactaaacatttttatttaactaaatttatagaaaaaaaaggtaaggttcaacatatttctctttgaattgaataattccatggatttaatttatttaaggacagagataatattatattatatttataactataataacattcaaaaagtttttagataagaactaaacaaaagattattcgcctaagtttatctgtcgaatctataaattattcaatagtatttttttcttataataaattaaggccttgtttagatgcgaaaagattttggatttcgctactgtagtactttcgtttgtttgtggcaaatattatccaattatagactaactaggatcaaaagattcgtctcgcgatttacaggtaaaccgtgtaattaatttttatttttatttatatttaatacttcatgcatatgtcgaaagattcgatgtgacgaaaaatcttgaaaactttttggttttcgaggtgaacaaggcctaacaaataatactttacaccatgacgccaaacaaccggttgcgagtctagagaagagatggttattcactcaccgcgactgccacgtctcgtttcgaggattccgaaggccccacgcgccagaggccacctgtgtgctagtcggctgctagtcgcccggtccttccacagccaccaaaagggtcagtgcacgtgctggctgatctctgtcagccggctgtcaccaagccagccacaccacgccaaaccagtcgccatagccgcagggagcgccggagaagaagatccctctcaatggtcgccaactcgccatagccacaggacaccagtcgggtcaaggcgtccaatcctgcgcggccgagctttgcccagagaccatcattgctcctcatctttagtttttagtgggactgggaggtgggaaagaaagcggcaagcagccatcaaaagaggccccaaagttcttggtggcctagctggattggattgatatttggacgagtgttcttcttggctacccgcctacttctacttcgtcttcttgttggctgcgcacggcgccagcagcatctccccacggctacgagacgagacaggccgtgcgcttcttgccctagcccatcgagcagcaggtgcgtacgagcggcctcctcgccttcctgattccgtcctgccatggcatctgcatcagcagatgccagatggagtggagatttggagaaccccggcgattctgaatctttttggttctctgcttcgtcagttcggggtttttttttcctaaggtttggcgcccaattgctctcggcgtgggttgggttcgtcgtgatttcctcttccctgtagttcactttggccactaatgattgctgcggtctagtgtctgaaacttttactttgcgggctgagttagattcgtttcaggtagaattttcttatagattattctgccttctggctgatgctggcgagctattgctcaacgattgcgacggacctgtagtagtgttcatgaatcatagctcggtgaacaattcctctgctaggcaggtctatctcaaattcggagcttgcctgttgttgtgtggagaaatcgaagtggttgatagtgaaactgagcaagattccccttttcgcctccactgaagtgtgcagtaaaggcgatgtttcttttctttattgaagaaatttgatcagtgtactgaactgtctgttgctgcagttcttcatgttcacacctagtaatctgctaatcatcatcgggttcgtttttttattaaaaaaaatctgctaatcatagatgacactgcgattgtttctgattgtccatgatttcttttgcacattgttcacatgcaagaaggatcgttcacaccctgaagaatagttgcatatttgcaggacacaggaggccactctgactctgagcttcgcatcacctgctgacggacgccatgggagaggtcgcggacatgtacacccaagacgggacggtggacaggaaggggaatcccgccctgaagaaggacaccggcaactggagggcatgcccctacatcctcggtcagtacactcctctcctgtgtttctttccaggaatcgtccattgctgctctgctttgtgcttgctctgtttgtttgtttgtttgtttgtttgttgtccactccactgatggcagctgatacatacatggttcagcgaacgagtgctgcgagaggctggcctactatggcatgagcaccaaccttgttcactacatgaagacccggcttggccaggtgaacagcgtcgcctccaacaacgtcaccaactggtcagggacgtgctacatcacgccactcatcggcgccttcttcgccgacgcgtacctggggaggttctggaccatcgccagcttcatggtcatctacattttcgtaagatcgttgctcgaatcaatccgtggtttggttttcttttatttgatttcccattgccatgatctgacattctgacgatttgacagggactggcgctgctgacgatggcgtcgtcggtgaaggggctggtgcctacgtcgtgtgacaatgacggcgtgtgccacccgacggacgcgcagtcggcggtggtgttcgtggcgctgtacctgatcgcgctgggaacgggcgggatcaagccctgcgtgtcctccttcggcgccgaccagttcgacgagaacgacgagcgggagaagaagagcaagagctccttcttcaactggttctacttctccatcaacatcggcgcgctggtggcgtccacggtgctggtgtacgtgcagacgcacatcggctggggctggggcttcggcatccccgccgtggtcatggccatcgccgtcgtcagcttcttcgtgggcacgccgctgtacaggcaccagaagcccggtggcagcccgctgacgcgcatcgcgcaggtgctcgtcgcgtgcgcgcgcaagtggaacgtggccgtgcccgccgacaagtcgcgcctccacgagacgctggacaaggagtccggcatcgagggcagccgcaagctggagcacacggaccagctcgcgtgcctcgacagggctgccgtcgtgacggccgaggacagcgccgcgggggcggcgacggcgacgagcccgtggcgcctgtgcacggtgacgcaggtggaggagctcaagagcgtgatccggctgctccccatctgggcgagcgggatcgtgttcgcggcggtgtactcgcagatgagcaccatgttcatcctccagggcgacacgctggaccagcgcatggggtccaagttcaagatcccctcggcgacgctctccatggtggacaccatcagcgtcatcttctgggtgcccgtctacgaccgcgtcatcgtgcccgtcgtgcgctcctacaccggccgtccccgagggttcacgcagctgcagcggatgggcatcggcctcgtcgtctccatcttctccatggtggcggcgggcgtgctggacatcgtgcggctgaacgccgtggcgcggcacggcctgtacggcaaggacgaccacgtgcccatctccatcttctggcagataccgcagtacttcatcatcgggtgcgcggaggtgttcaccttcgtggggcagctggagttcttctacgaccaggcgcccgacgccatgaggagcatgtgctccgcgctgtcgctcaccaccgtcgcgctcggcaactacctcagcacggtgctggtgaccatcgtcacgcacatcaccaccaggaacggcaacatcgggtggatcccggagaacctcaaccggggccacctcgactacttcttctggctgctcgccgtgctcagcctcctcaacttcctcgtctacctcgtcatcgccacctggtacaagtacaagaagacggccgatgatatcccggacgccaaaggggagcactgatgggcagggcagttgacacttgacactactacagcatgatggccgactcagtgaaccgagatggcgaaaatgaagtgatttctctctgtggtcgttagctgccggtttgttttgccagagtctgtgtgcttaaacgatacttttagttcactgtagatgcctggggcgaatccattgttcagatgtcatgtgttggttttatatgcgcaatgctcgatcccaatgatcatatctagatctatgaaataagttgagctcttactaaaaccgcgaattatcgaatccaaaagagcaacgaaaccatgttaaattttttaagcttggacaaaaagtccatttcatcttccttaactgttatgtaagttcgatttacttccctcgatcagaaagggtttttttttcgatcaccaaatggagcggcgctccatttactgtactgaaagaaggacccatgagaacaggctcaaggttacaccaaatcgatctggcattccaggggcagaaaatacataggggtggaggagtgagcagattacatgggactaagacattcttggatataggctttccattccaggcgccgatcaatcctctatccctcttgtagcgaaaggccaaatggtctagatcattgattatcccgcacaggacaacagtgggtgagacatcttcatcgttgaagatcattgcattccgagccttccaaatgtgccatagggagatgagcatcacatcgatgaccttggcg

SEQ ID NO: 3656 - DNA, 5721 bp, Sorghum bicolor
tgctcagctcgacctcgaccgactccagtgcccatgtggggatcactcgtttgctgcacggccgggttcccccgaatcaagtgtttcaggtctccgtgtgggaccctccgcctcatgggcccactgttaaccacagccccaccacatcggagaaatgaccctccgcctcactaacattggcaaatgccaaaatggtgttgacattaccacactcatccctaatcggccgtcaataacgagatgctcattatggcacaacatctccaagagtttccaaagcgtactcctaatccagatttctttagtaacattgaagaaacttgctctctaatagctccctgtctcaactctcaatcttttcgcacttgggaaataaatgtagccttccggatatttctagacatgtattgatttgtcaatctaatgatggaaggatgtaggaatattgggaagtagggcaagatttccaatgcaattgtacgttggagtgatttataaattttttgggattgttgatgtaaaattatcttctatgttttagaatcgaaattttatacattgttagagcaacctaacgaatcagtatttttagccactttaaaaactcttcgatttaccaattattatttttgaaaactatcaaagatgcttttatggctgaacccccttggaatatagaattattttttgttctatttcttacctttattctaatataaaacatgaattgatttctataaagatccatgcactatccacattggagatgtttgggttactccacaaactcttgatccgccaatctagtagtagtatgtttgttctttttaattgtatgtttagcctaggccatttagcttgaacaatgactaaacggtagatagctgactctccggtgtatattgtgcgtatacaaacaataggttgtaccgtataccaagcatcttcctcgtttcttggcagatggccacatgcaatcaagcattgaaacatgacaaaaggcaccacctccatttccttccttcgttgcagctgcagccgcagctgagaaacgccaggaggacggacacctgcatgcagcaggcgtatgattgtgcttctgaaaacagcaacatgcactcgatcaccaccggcactgcgccgcccgcgaggcccgcaacaaacacaactcaaaactggtcaaaccggcgtgcgtgtgcgagcgagttcggacgctgctgctgcggcctgccggcctggggcagccaacggccacgcgcccatgccgtgcggggtgtttttttgaacgtaccgcacggcgcggggaggacgacaggcgtggccgtggcccgccgcccgccgcccgcgtgggaattatggccgcaataaactcggcacctacgcggaggccggagacaggaggttgcgcgctgctctctccctccctgtgctgtgctccacccagtgcccccggcggccgccgtacggggacagggaaactggtgtggtgaggatcacgtggagagggcaggacgacgacgacgacgacggggtggagacccggtttgacgcggcgcggccgcggcccgcgggcacctctgctctgctcggccgtgggaatattttactgctcggcctcggccccggccccggcctcggccgcggggggagccgttggatgtgcgtggcagtggcagccgctgcgtacgtgagtcaccgcggagtcatcagtgcccctgccgttggtgcgctgcctcgtgcctgcgccaccgccacccacgagccacgacgcgggccgcaccgcaccaccggctgcttcaaatcgcgcgtcgccaccagggggcgtcccccggcagctcgcactctcctcacactcctctggcagctcactctgctccgagcccgttcccttcccgtcccacgaaaacaaagcggagagagagagagagagagagaggcagagaggagggagaagaagcaacaagaacaacagcgaacaaacgtactacagagctcctgagatggcggcgccggcgccgaagcaggaggagctgcagccgcacgccgtcagggaccagctgccctccgtatcctactgcctcaccagcccgcccccatggcgtacttccttccttccttccccccgtcgcctgcgcgcgttgcttcttggatctctctcgagggtccacgactgacgccgtctcccttgtttgcaatgcagcggaggccgtactcctcggcttccagcactacctcgtcatgctcggcaccaccgtcatcatccccaccgcgctcgtcccccagatgggcggcggcaatgtacgtcccccccgagaccccgactctctctcctctctctctctctctctctctctctctctctctctctcttctctgtgtgtgtccgccgccgcccgccgtagcctgacacgaaagctcgccgctttctacgcaggaggagaaggcgcgggtggtgcagacgctgctgttcgtggccgggatcaacacgctgatccagagcttcctcggcacgcgcctccccgccgtcatgggggcctcctacaccttcgtcgcgcccaccatctccatcatcctcgccggccgctacagcggcattgccgatccccacgaggtgcgcctcttcgccttcctgtcctgcccggttccaagtccaacggaggctgcccggctcaccgatatctctttgctgcagaaattcgtgcgcatcatgcggggcacgcaaggcgcgctcattgtggcctccaccctccaaatcatcatgggattcagtggcctttggcgcattgtcgtcaggttcgtctcctgctctcgcccccctcgtgtgttcaggtcccagtgtacctcctctgattccatctgtctgttctaactcctgttgcaggctgctgagcccgctgtctgctgcccccttggtcgccctcgtcggattcgggctctatgaactggggtttccaagtgtatgtctttctacatgtagtactacattctccctatagtgatgtatttggcaacactgaggtagtaacatgaatttattttaccctgcaggttgccaaatgtgtagagattggtcttccacagattttactgctggtggcactttctcaggtagtaggatgcatcaggaattcaggactgctgctctgtggtttcaatcggtaacggttgctggatccttgagaacaatgtgtaatttctgtttctcttttgcagtacataccacatttggtccccttgctgagtactgcctttgagcggtttgctgtcataatgtccattaccctcatctggctttacgccttcttcctgacggttggcggtgcctataagaatgctgctccgaaaacccaattccattgccgcactgatcgatctggccttgttgggggtgctccatggtaatataatgcatccctttgcatgttctttccctacctaagaggcagaactttgtatgttttctgtacttattcagaatgtaacatcctgcaaagaccctacttggctactagattgatagattattgatctacgatttgcaggataagtgtaccctatccatttcagtggggagcaccaacctttgatgctggtgaagcttttgctatgatggcagcttcttttgttgctcttgtagaggtatgttatttggataaacccatgatatttctgcagctttgttatcctagatggaactgcatatcatcttccttcaagctgatactccttactgcatgatgcagtccaccggtgcatttattgccgtttcacggtatgccagtgcaacaccatgccctccttccatcatgagtcgtggcattgggtggcaggtatcgtccaaattccttttgtttgcagttagtgtatccaaaaattttgaatgacatctgagcatcttactgacttacccaactaatttgtctatgtgccattccagggagttggcattttgctgagtggcttgtttggaacagctaatggaacctctgtatctgtgtaagttgattctagatgactgctgcaactactttttatagtgtgatcatgtgatctgaaaactattcaacttctgtctgagtttggatattctcatggaacagcgaaaatgctgggctgctcggtttgtcacgcgttggtagtagacgcgttgtgcagatttctgctggatttatgatattcttctcaatccttggtaaggttcatacttttatgtgaccatgtattcaacaacttttgactgtaataatactttgtgttaagtagttcaggttaactttaaggctggaattatttaagcttatcatctggacaaatacaactgagcaattcatactatgcttctgcacttctaatggtaaccaactgtctctaactgtaatgtttttttctatgcctttgtagggaaatttggagctgtttttgcatcgattcctggcccaattatcgcagctatatactgtcttctctttgcatatgttggtacgtagcacgaagcaaattttaaactttgcatgttttttatatagaactgttgaattatgaaaaggctatgtattctcctgtacaaacaggtatggcaggtgttgggttcctacagttctgcaacctgaatagcttccgaacaaagttcatcctaggattttctttgtttatgggtctgtcggtgccacagtatttcaatgaatacacttccgtcgcaggctttggtccagtgcacacgcatgcaagatgggtaagatccaactcgaaacacattttggtatttatttgacaagaggcaacatgctgacacacagataattctgtacttccggttctaccaaatgttcatttggcatgccaccttgcacaatgaagtttgatattactgcatcatggttctttgacattggtttctggtgctatgtgcttctgaaattaccttctagttagttttactgcaaatttggcatgctgaagagctgcaaactaagagatgtgttttccttgtgctcatgcccagttcaatgatatgatcaatgtggtattctcctcgaaggcatttgttgccggggctgtggcgtattttctggacaacaccctgcataggcgagacggcaccgtgaggaaagaccgggggcaccatttctgggacaggttcaggtccttcaagactgacccgcgcagcgaggagttctactccctcccattcaacctcaacaagttcttcccatccttctgatcctgctgctgctaactgaaaacagaaaatgctgttcgattaggttgttgtatgattttggcaatgccacgcccaagtggctgtttctcctacttctgttgtaccccttgagcttgagttctgaatcttgtagagctcagcctaacctattcggaaggaatggagaaattgcttggtatttttgatgtaaattgggttgggttctcggatagatgaagaaaatgaaaagagaactgctccagtactctttctataaattacactccagtgctatttcagagtaaactaatgctagtgcatgtgcaatcgttacagattcagtgagtactgagcatttgctattaatttccagaatcaaaagagatcgagtgtgtccggtaaaggacgatggactgccagcgcacagttttttaggctggcactgtcacatcataatttccatataactggtgtcttgagtcttgtcctgcatcataacgggttagcagtcgcaaattgca

SEQ ID NO: 3657 - DNA, 7715 bp, Sorghum bicolor
gctgagtatcttcttttgaaaagacaaatggaatgttgaggctttgaaaaacacttccccagagctatactcctttgtaaagaacaagtctctaccagtcagcaaagtcttccaacaagatcaaatcactaaattgttttatctatgtctctgagaactagcttttactcaattatagaccctcttagctatgacgtaagaaacaatcttatttgatggagaggacacctgagcctacatttgcggggaggggggattctcctctaatgcatgcaaggccttggttggacaaaggcacatacaacgcagaaatagttatgggaatctatcggtcagccaaaacacattatatgtctagatcctcatcaaagctagactaagcacaaggaatatcttaaaacgaaagaacatgcatcttgattcatatgactgcgccctttgctcactccaagtggaagaaagtgcaggccatctctccctatactatccttttaaatataaataaccataccgacccaagcgagtttccacattatgagctatttgaaagatcaacttaattctaccttcttcatgaatgcaataatgttgttgtgttggacaatatggtgagcaaggaatgacaagtttttcaaaaaactacaagaaaatgtacaagagagtaagatgttactcaaaaaagaattgtccttgctcactttaacagcgacatcaagaaaagcagcacctctttctttatggatccaaaatcttgtccatatgttgctttgtccattttcttcctttctttctttgtctcttgaatctccacgtatttgtactcccagctttttatatttctttaaataaacagtgtaggacctaaagcccctccatccatatccttccaaaaaggtctaagtggtaggatcatgtttggtaacaaatatctgtcgtggtaccatgtggcacaataagagctcctgaggaaaaaaacaaaggattcaaaaacctatggatcgaattcctatagcagcctttggttggtagaaattgttcatagaaattccaaagaaaacttttctttcccttcaattccataggaaaataataggaaaaaaacaatccacttagacctcatggaaaaatttctatgcacaaggaataaggcaaacaatggattcatgggagcagtttgtgtctaatcaaggtagtggaataaaataattaagttgattaagaaaacaagaacctctatttttgctcctaaaattccttttaagattcgtgtgtttctcctttgcctacccaaacacctagatatgaaaaattcctatgtttccgattccattatttttcacttgcattcctactctattccttttttttttcttttcctgtgttttatcattcctacgttccgaaagatgcctccctgaaattcctatcgcaaactgagcatatactcttctgaaagaaagagagagagactatgcagagtactactgtatagcattagctacaaccaatgttccctctaattcctgtctgaagttttctgaacaagcttcgttctcatcagtgccagtggactgttgttgccgtggttcacgctgatggggcaattcagtgctgtgaatcgtgatgacacttttgtttgtttgggtagcaatcgcaaaagcaaaaagttggatgatctggcgcttcagaaaggaagttggctggaagtttgctgctgttcattattggcaattggcattgcacggttcgtcgtctcgtcggcgggggcttctccaccgcatggcggaccgggcgaggcgataacccaaccagtggccaaaattctcgcgccaatttggttgcccagaaaatgctaatccatccattctcattatccaatctgcacggccgcaacgcgacaagcccatattccaaatctctctccacccacacgcagacgcacgaggcagcagtcagcacagcagtagagtgagtgagtacaaatcctcacctgctcccctgcttcctggttttcgtccccacctgccttccccattctctcccgtgactcatccatccagtccagtccacccgccactccacgcaggaggaaggggaacggcggcggcggcggaggagtgacggcagcggggcaagatggcgaggaagccgctggactacgaggagctgaacgagaacgtcaagaaggtgcagtacgcggtgcgcggggagctctacctccgcgcctccgagctccagaaggagggcaagaagatcatcttcaccaacgtcggcaacccgcatgctctcggccagaaaccgctcaccttcgggcgccaggtcaggaccatccatctccgcttcgcatcgcatcctcgcggtgttggttgttcgacgccttctatctattctattcttaccccgacgactaaaccctgtattgtgtgactactgcatcccgtgcgcaggtggtggcgctgtgccaggctccgttcctcctcgatgatccccacgtcggcctcatgttcccggcggatgccatcgctagggccaagcactacctcgccatggctaagggcggtctaggtgcgttaccatatacagtgaccttgttttggggggggggggggggggggaacaagagccattggctttaggtcttctagaattatcatatccatatcctgattaatgttgtcttcctacaaggttcataaaagtatcaaaccttttgcagtctgaataataataatcgaaaaaacaagcaacttttatcagttgtatgtgatgtcgtaggttcagtcatatgagattatgagtactctgtctgaccaaggtattcatctgaccatcaggtgcgtacagtgattcccgtggtatccctggaattaggaaggaagttgctgacttcatctacaagcgtgatggatatccgacgttgatactgccgagaaatttttatgtttttagaaaggactgctgaaaattaattttatcagagctgtagaccattttatctctaacgcttctatgctctgcttactgcagtgatccagaactcatttacctgacagacggtgccagcaaaggtgtgatgcaaatactgaacaccatcatcagaaacgagagggatggggtatgattgttcttcaaaaacatgtctttttttccacatatcgatgtgatgctattcgtactgaagagtaaagactaattttgttgataaatcttctgtggcagatcttggtccctgttcctcaatacccactttattctgcttccattgccctatatggtggtgctctggtcccgtactacttggaagaagaggctaactggagccttgactttgtaaatatccgaaaaacagtggcagaggcacggtcgaagggaatcactgtgagtcttttattagtcatcattgtgctaatcaaaatttcccttctcttgctacatgatttctgcaatttttgcacatcgcattatgagcttgcctttgcccatccgtagttacattacatttacatggatacagaaagtgataccaagtaaaatgtcaataccatatcattgactgattctagtctcatcgagctacttccagcatttcctttgtggaaccactcatgaacattttgtgccatgggcttcaaatcatgccccttagttcaacaacttgtcatgtccagcaaacttgtaggaacctttggtattgatcaccaaacaactaacaggtagcatgtagaattttggtcttaatgattaatattgatcactaaacatcatctcagcttcttgcagttcttggttctttttatctttttgaaaccatcatagtcatgccactcatgtaaaaatgtggtctctctcgtttttttgtgtattccactctgatgatcacatagtcaatactcaatactactcatgtaaaaatggggccttttttatgtatgtattctgctctgatctttttcttttccttatctatgatgcttaggttcgagcaatggtgattataaatccaggaaatcccactggccaatgccttagtgaaccgaatataaaggaagttctgcaattttgctaccatgaaaacttagttctgcttgcagatgaagtgtatcagcagaacgtctttcaagatgagcgcccatttataagctcaagaaaggtacttttgttttctgaccaatgattctttgtcatgaactcatggttgcaacttgacttaagcatggttttcatctgacaatcctataatatttgggctcaccaaaacatcccttggaaccaaatatggacaatatataataactaaaataaaagattatccatctaacatggtacactaaaagattgttgggaattccaaaactcgctgctgatgttgcctttctcgactttttccaggttatgttcgacatgggcccgccactaagcagggagcttcagcttgtttctttccacactgtgtccaaagggaactggggagagtgtggacaacgtggtggatactttgaaatgacaaatcttcctcccaaggtaatattatttgcagcatgtcagaatgtcacttgtcccaagtatcattgaaaagttcctagctatgtcaagtcaatgagacaatgagtgtatgaaaagatgtaaatgagatattcgaaaatattgaattgttcacacccagctgcaaacacattaagtaaactgcacagtataattaattggccatgctgtgccgtttaactttcttaggccttgtttagttccaaatttttttgggaaaatgatactgtagcactttcgtttttatttaacaaacattgtccaatcatggagtaactaggcttaaaagattcatctcgcgatttacaggcaaattgtgtaattagtttttatttttatctatatttaatgctccatacatgtgccgcaagattcgatgtgatgggggatcttgaaagtttttggtttttggggtgaactaaacaaggcattacttgtgaatatcttgcacaatgcaatttgggccaatggtccatccaactgactagagtgctattattacatttgttgcatcaatgtcttgcttttaccaaagtctcctttgacaaactttcagaaactttagagtaatcagtagggtctactggagttacatatttatgccaccacgatgtacatttacaactggtttccttgtccagtctaaactgcagagtagtgttaaacgctctggaaacctttaaactttgtcagttaagattctccctttaaacaagctagtcacttaaataaggcttatgttagactctattgtacaaaaaggcactttgaaggtcattttctgaatataatgttcaaggtctgatgctaaccactttgttgatttgagcttgcagacagtagatgagatctacaaggttgcatcaatagcactgagtccaaatgttcctgggcaaatttttgtaagtgaaacactgctcaatgtttgattctttattattttttccttctataaacccggtactctgttttggaacgacatatgtttggattgatctcgggacctcaaattagaagcaaattcaaattatgtcaatcactgattttattcatgaagcatcaagcaaattctacaaatttctatggatcagtatagttatgggaatattttttgtggttcgtttactgacaagtttgttcgttcacattaacctgcaatgctggacaggttattactatatgtattttttcattctttggacctacaccaattttcttaacctaattcagttcaagctatgctaatttgcttgaagcttcatttctttgcttactaaattacgaagcagttctgaatagttgcttctggaaaaaaggggggttctgaataagtttggcttttacagatgggagtaatggttaaccctccgaaacctggagatatctcataccccaagttcgccgctgaaaggttaaacatactgcccctcagaagtgttagtctgcatccaatttcagtagaaaatgaaactatgcgggatactgaatatttatttgttttttctgtacattcttaagcttgatgtttgatgtggctccaaatgatgttgcagcaagtccgtccatgaatctttgaggaggagagcacgcatgatgacagatggtttcaacagttgccgaaatgtcgtgtgcaatttcacagaaggtagcatcaaaattctaaactttgtcgatttgcagcaattagagtatggttattgcttacttgattctcttgcaattgattgtgttgttgcaggagctatgtactctttcccccaaataaggctgccaccaagagccattgaggcggcaaaaagagctggcaaagcagcagacgttttctactgtctaaagctcctggaggcaacaggaatttccactgttccgggctctggttttgggcaaaaggaagggtaagtgatttattcatatgatgacttatctgtgatgtatgaagtttcataaatttaagacttcagaacagaatatatatcgtttatgtcactgaaaaaatgaagagaacgaagtgtagcttttttcaaaaaagaaaaaaagaaaaagaaaagaagcgtagttgaatctgctgcccttgaccttcatccagttatttatattcttataagtatcttctgagacatgttactttgattttcttctgtgatctgtaaataacaactgagtaggaaatctggaaggacgttactgaagtgatcgatttgttgtttcttttctgaatacagggtgttccaccttcggacaactatccttccagctgaggaagacttccctgccatcatgtcgagcttcaagaagttcaacgactcattcatggagcaatacgagggctactccagaatgtgaacaagaacagaaacaagatatactgaaggatcggctgagagattcgttgttccagtctcagcacaaatggagcgtttctgaagatattcaattgaaagttgattagttgtaactctcttaaaaagaagcaattgctgcctttgaagatatgtatagggaacggaagttctgtgggttattattgaataacgatctgccattttcttctactgccatagtatagtcttgtacctgctggaagatgtacgctgctgctgctgttggaccactatgccatacaaatatacaactatcacagttgacaacagtctatatgcctgcaaagcttgtttgctccctccattcccatattcatagtactaatggaggggagagggttgtctgccgattgctcattctgcgcatggatcgcacggcaaattgacttctggttacactgccctcttataactgctggaagttgttgcttccgccagcgcaaagttactgttggtgagtttggttctggtgtggatactagatgttgtttgggttgtattttacgtacagtggtaacctgttgttggggcagcaaatatgtgtgccctattatattggttgcttggtggtttcagaaattcagagagactgagcaacaagcgtataaccaattcagatttcagagaccaccaagtgtgtcttaaacatgttctgatgacatcgtctggtctgctggtggctttatatatatagcctgtagggaattcctatatatagtgcactgcagttggttggcgtgcagagtagagacgaacgaacggatcggagcacacacaacacacatgatgcca

SEQ ID NO: 3658 - DNA, 8791 bp, Sorghum bicolor; identical to SEQ ID NO: 3623

SEQ ID NO: 3659 - DNA, 3241 bp, Sorghum bicolor
gtcgaggcagcaagcatgacgagcattgcggtgaatgctatggggaggattacgggaagagcactagcagggcggaggagcatcactacagtgacctaggggtgacgagaaaggaggacatgattggctcgggcctagctccaggagaacggtcaattcgaccgttcgaccctagccaggccccaacagtagggatggctctacttggctagactccatgcccaatccaaccaatcaaatagccaaaaattggccccagaaagtctagtttgagctactcaaccaaacacaccctataatctctcccctcctcctcctcctcccttctcccacctctgttgtaagtattcccttagacttgttccgctcctttttgttataaaatttcagatcccctgtggggccatgagttttttgtgtcaaaaaaggttgctcaagaatgttagttaatgcccattctaatatatctttttgactaaatcctccataatttatggcatcattagatttagttttcatttcatggttcatatatggagagagaaatgatggtgtttgggtgttctaacactataataaacaaagtttctgtcctaaaattgttatatttggtagcttcacatgcatgtttcttccattatatgtcttcaatttcatagtttagcaaatttatttattaaaatagattaattaattacccatacatatatgctaaattatgtgttattgatttcagtgttaattcaaatgattacaataagtaataaacatgcatatttctaagaaaaatggattaaaatattcaactatatattaatgtattttttatttgatttgattaatcactatcatctcataaatacactagctcttcaaatcatgagaaatgtacagacctagccatattccgttgttggcgtccttgaaggtccgaaaattgtaaaatacaggggcatgttttgatcttgatttctttgaacgaggttgctcaagaaggttagttaatgtgcatcctatgtccttttgaaagaatgctccataaattgtgacctaattagatcaatttccatggttcatgtacggagagaaatgatggtgtgtttgggtattctaacaccataataaataaagtttatgtccgaaaattattatatttggtagcttctcatgtctatttcattatatatcatccatttcataatttttggatcatacatgcataaattatatggatgaaatctatattctaaaacttagcactattagagaagttggcttagagctagtacctagctctaaccactgcggatgccctcaaagtactataaaaatataatattattctatgaaaaaatgctaccggccccaagtcaaaattccttcagagttgaccagaaccatcagaacaagtgggcatccagaatttgtgtgggtgttgcgtcctaaactactaaaaaatttctcttagatggcatcactatttattgaatggaggcgagcactattttttactgcctctattatccccaagttcgccaacactgagcgaccgccttggtcaacagttaacggaggtggtcgccttaatgtaagcacctcagttagttactaattaacctaggcagtcgaattaatacaattgtctccaaaaatgatgcggccgtattaagaagcttgccttcataaataaattttcggaggtgaacatactataaggcccgcctccgaaaatactaaggcccaaaggagcaatatatatatatatatatatatagagagagaggggtatactattaggagcttagggctcctaatagttattagaagccctagtctaatgtgtgctttctggttccaccaaaccaggtacagcccactaacccatccaacagtccaccaggtccaatatatataccccaaaccctaatcccacccatccagccaccctagccgccgccacccccaaccaccccgtcgcctctgctctgctctcctctgagatggccctgcaggtgcaggcccagtcgtctctcctcggccggttcgcggccatcacggccgggtgcagcgaggtggagccgtgggcggccgtcgtctgcgggttcgtgtccgcgtgggtgctcatcagcgccaacgcgctcgccgcgcgcctcaagttcgacgacccgctggaggcggcgcagctgcacggcgggtgcggcgcctggggcgtcctcttcacgggcctcttcgcgagccaaaagtacgtggagcagatctacggctccgggaggccctacgggctgttcatgggcagcggcgggaagctcctcgccgcgcagatcatccagatcctggtgatcgccgggtgggtgagctgaagcatgggcccactcttctacgcgctcaagaagctggacctgctgtgcatctcggccgacgacgagatgtccggcatggacctcaccaggcacggaggtttcgcctacatctaccacgacgaggacccaagcgacaaggccgggggttggtgggttcatgctcaagtccgcgcagcaccgtgtcgagccgccggcggcgacagcgaccagcaaccaggtgtaaaaatcagaagcaaattaaaacctatcgagctgaagttacgtgcttgcctttttcagtgtgtcatcgcgtattcatatttgattttgatctcgatcatatctgccggtactgtttgggcaatacttcgccactcttcggagtcgcaagaatttgtgtaaattattagaaagctgtccactagttgataaatgtgaagaatggtttacagatattcttgaatattaacccttttatttttgtatagtttttacactgatttactactgcatgtggtggattagtttggatctaaagtgttcagtagtaaagattacggactacttactactacagttctggtttggtgattactactttctccagagattatggtcgattacaattgacttttaaaatcgatttttttttctatgcttgatgagttagctttttatgcgttcaattcatgtgtgtaatgtgattttagctggagttgctcttagaaaagtatctagtcggttactttgcttgcatgcatagttttctacgcatggtgagactgtgttttcaggcctcattaaaaacttatattcatatttctatgcacccactcggccatttagggggagcattctagtcatctaggcttggtctcgggctcgtatcggtctgatccact

SEQ ID NO: 3660 - DNA, 31582 bp, Sorghum bicolor
  misc_feature (5632)..(6346): n is a, c, g, or t
tcgccggcagtttcagcttagctgcagaaagagagagggcgacagttggggaaggaggtgctgacagacaggccctaccagtcagcaggtgagagaggtgagggagagggggatggccggctgagcctcggcccaaggagagaaggggagagggcgggggattcggccttgcaagcggaaagaaaaagaggggggaaagagaaggattttccctttctctttttcaaaacaaaacttcaagcacatttgtaaaattaaattttgaacaaatttaacatttgatttttaaaacgatcatcacaataaaaatacactagtatgtatatagcaaaaatgttttctaaatttatattaaactttaaaattttctaaaatttattattttcttatattgtaatacttcacaaaaattattaaattaaattaaatttatctatttaaagaagaatagttttaggcgttataattgggtgtgatatttataacaacttgacaaatagtcttgctctgtgcgcatatatgccaaagggcaagcggcttcgcatcctgggcatcgcgccgtttccccctcgcgcgcgtttgtctactgcctgccgccgtctgtttcctcgaaatcccagaaagaggcacgagttcagaacttgttgggcagcacgccgggtccacctccatcgatggcttgttgggcagcacgcgggtgcaggacttgcacaaccgagtggcagacttgcatcacgtggtctctgacgggcgcagcagggtcaggccgggtccaagggcgacgggcatcagtgtcctggacgaggtcacggcgacgcaaagaaaatcgcgcgacacaaggccgcgcgcgtgagaaaaagccgggtccacaattttttttttcaagtaaattttgccaaatatttagagatgatctttttgttcactcctcatatatttttaaaagttggcaaacaataatatttaccaagtaaaactttacaaaactgttggagttactcttaccgtatcatatcaactaatatattaagagcatgcatgtttgtttggagatgtaaaaaattaataggtacggtaacatttttattttatttgataattagtatctaattattaactaattagatctaaaaaattcgtttcgtaaattactctataaatgtatttttagtttctaaaataatttatatttaatattttatatatatgttcaaacattcgatataatagggttctaaccaaaggacctaataaagttcctcacgtccttaatccagatcaatctgctgcttgcgtggtggacatgaagcataggccttgtttagttcaactgaaaactaaaaaagtttttaaaatttcccgtcacatcgaatcttgtggcacatgtatgagacattaaatatagacaaatataaaaactaattacacagtttagctgtaaaattaagagacgaattttttgatcctagttaatccataattagataatatttgtcacaaataaatcaaagtgctacacaactaaacaaggtcagagtagtatgtcacgtgaaaggagctacaaagctgcacacatgaattgacacgatatgacagaacccataactcgttgccgcagcgtgaggtgggactacttccacctaaaatccataatttttcaagatttttgttatataaaacttttagatacatacataaaatattaaataaaaataaaaataaaaactaaaaaggagtagacatcacacatgcattattcagagctacgtactgaactatttggacaccacacatgcattattcagagctgctacgtactgaactatttggacatcacacatgcattattcagagctacgtactgaactatttggcaaccctcttacataccgacttggcatcctcgatcgtctataaatagatgcatcagcctatcttaagggcaactcactactgaagcagctcaaacctttagccactacagcagctataagcaagaaatggctctacttcttgcttctgccatgaatcacactgctcatccagcagaacttagaagccatctaggacgacccaataatgagagtttctcacggcaccacctttgttcttcaccacaaaacatcagtaagcgaaggtctaaccttagctttaggccacgagctcaaacgataagcagtgagcctggaatccacatgctgagcccctgggaaatccctaggagggactggttcccccctagctttctcttcggtgctgccactgcatcataccaagtactaatttctagcacgaatgtcgtttacatgcatctttgtttgttggaaggaatgtagtgttaactgttacaaatgatataatgaatacctaaaagaaaaaagtattatttgtgaatgcattttaactatatatttgtttgatgcacaaaaaaaaaatatacatgtcatgtttgtgtagattgaaggtgcttggaatgaagatgggaaggggccaagcacatgggatcacttctgccacaattttccgggtaacatatatatatatatatatatatatatatatatatatatatatatatatatatatatatatatatatactgccaatattttttgtttataattagcaattttttatgtagtaacaataagatcaatgtagtagttttcagcgtaactatcataaatatgatatccttctttcctaaattcttccttttctttcatgtatatatgaatagaatggatagtggacaggagcaatggggatgttgcagcggattcgtaccatatgtacgctgtaagtaatgagaatgttcctataaagtgaatgtggaggttaaaatgcagtacatcttatcgctgagactatccaatgcaaatatgactttgaaaggataaatattttgtattgtgcagttgtttttgggaaaaaaagttaatgtatatgcactccaaactatatatataaatatgtgcctattaatatagtatatatgttgttataattatttatatcagtatatttggttggcaggaggatgtcaggttgctgaaggaaatgggcatggacgcctataggttctccatctcttggcccagaatactgccaagtaagcatatacaaaaatatcccaatatgttttttttcagtgaataagttagaaacaaagagtaaagatgatgactagaacgaaggcgccatcatcaagctaacaatgcatccgatcatcagagttgttggattgttagggtgctaatatccaaatatgttacggctttcagaggggacgctcgctggaggtattaacgagaaaggcgtcgagtactacaacaagttgatcgacttgttgctagagaacggtaaaagaaacaccatttttcgattggcagcttaattaattaaggaagaacgtaatccaaggtgcaaaagttttgacaaaccattctgtattctttgcaactcgatcaggcatggagccatatataacaattttccactgggacgcgcctcaagcgctggtagacacgtatggcggcttcttagatgagaggattatgtgagtatatatgcagttcaaatgaatgttttaatctttccttatttagtgtattagctgctctcagtccttccataaacaaaagaatatataccgatcgatcagaagagagggattattctaaagttcaatttgatcaatatttgaagttactataataatatgtttaaaacctatatatgaacttatatatgacttaacttcatggttcatatctaagtattagagaaacatcaatgaccaatactaaaaaattttcctgcagatcacaaacaatgctctattgttatttcaacaaagtgtcaatcaactagcataataactatatttattgatgaacatcattccggattgtaatttttcagaaaagattacacagacttcgctaaagtgtgctttgaaaagtttggtacactactacagaatgaggcattggtcgatgtccaaaatggccaaaaacctcggcctttttgcggcccggggttaaagacccctttagcaccggttcgtgtgacaaaccggtgctaaagggtcctgcccaacggctactgacatgtgctgtcggggcagggaccctttagcaccggtttttaacaagaaccggtgctaaaggggtccctttagcaccggccagagccacgggccgaggcaaaccctttagcaccggtttgtgttacaaaccggtgctaaaaggtaaccctttagcaccggtttttgctctgaaccggtgctaaaggtccggtttataggccggctccctcctcccctctgcccatttgaaaccgagagcaccattgttgttcttggagcttcttcttgcttgttcttcatttgttcttcatctccaacgcccatcgttgatcttcttcgactccgtcatcgtctcttcgcgcttagaggtgactaacttcagcctttcttgtctttttcatgttgtttttggcttgtgatgttcccatcattttttagctcaaatccactttgttattttgaatcattcacatgaattagtatccatatatatatatcatatttcatggttgacctagttttaatatattttgcaagaatgaattatagtatatttttatgatcatagaaagtaggatagttcaaattaattggtttgttaatatcacttgatttatttttattactacatataatgtccattgtatcatacatgtttactagtaaatgtggaatttataattgttttaaaattgagtatggatagtagatggcaaccgtgaccgggtcttccgtctctcaacgggttcaaaagcgataccgtccggaactccctctcattacttgtggcaagtgtgggcagaagattttgatggagtacaaagtgtcgaaagagggagtaaacaagggtcgtatattctacaagtgtccagatcgtaatgtgagttatttccagacatttgcttatatatgtgcatatttttttaaatgatattaattaaacttttgattctctcttttaatttcagtgggacggtaccggcggatgtacaggttggtactgggaggaagaatacattgaacacattaagaaatcttttgcacaggtggttgaggctgaaggtggtgaggcagtgagccgacgaaagaagttcaatgatgttgatcaagcgaatgatctatctattatagttgggatcggacgcgaactaattatgttgcttaagtgcattttagttttgttttttttaatgctagttgcgattgtatttgttgtagccaagcttttctaaattaatcaactatgtatcttagacatgttgtgcaataagatgagaaactatatgtgtgcatggttttcataatatatatgttatctttaatgcagatggtaacacgtaattggatgtataatgccgatcggcgctccgaagagttcattaatggcgtgcactatttcttaagtgtggccgagtcaaataagagggacggtttcatgtgctgtccatgtgccgtgtgcaagaatttgacggaatattctaactcaagaactcttcattcacacttattaaagtctggtttcgtaccaaactatatttgttnnnnnnnnnnnnnnnnnnnnnnnnnnnnnnnnnnnnnnnnnnnnnnnnnnnnnnnnnnnnnnnnnnnnnnnnnnnnnnnnnnnnnnnnnnnnnnnnnnnnnnnnnnnnnnnnnnnnnnnnnnnnnnnnnnnnnnnnnnnnnnnnnnnnnnnnnnnnnnnnnnnnnnnnnnnnnnnnnnnnnnnnnnnnnnnnnnnnnnnnnnnnnnnnnnnnnnnnnnnnnnnnnnnnnnnnnnnnnnnnnnnnnnnnnnnnnnnnnnnnnnnnnnnnnnnnnnnnnnnnnnnnnnnnnnnnnnnnnnnnnnnnnnnnnnnnnnnnnnnnnnnnnnnnnnnnnnnnnnnnnnnnnnnnnnnnnnnnnnnnnnnnnnnnnnnnnnnnnnnnnnnnnnnnnnnnnnnnnnnnnnnnnnnnnnnnnnnnnnnnnnnnnnnnnnnnnnnnnnnnnnnnnnnnnnnnnnnnnnnnnnnnnnnnnnnnnnnnnnnnnnnnnnnnnnnnnnnnnnnnnnnnnnnnnnnnnnnnnnnnnnnnnnnnnnnnnnnnnnnnnnnnnnnnnnnnnnnnnnnnnnnnnnnnnnnnnnnnnnnnnnnnnnnnnnnnnnnnnnnnnnnnnnnnnnnnnnnnnnnnnnnnnnnnnnnnnnnnnnnnnnnnnnnnnnnnnnnnnnnnnnnnnnnnnnnnnnnnnnnnnnnnnnnnnnnnnnnnnnnnnnnnnnnnnnnnnnngaaactagctggcaccctgccggttcgccttagtacagatggtatgaatccgttcggtgagcagagcagtagtcacagcacttggccagttactctatgtatctacaaccttcctccatggctatgcatgaagcggaagtttattatgatgccggtgcttatccaaggaccgaagcaacctggcaatgacatagatgtctaccttaggccattagttgaggaacttcaacttttatggagcaaaccaggagttcgcgtgtgggatgagtacaaacaagagcactttgacctacgagcattgctgtttgtaacaatcaatgattggccagctctgagtaatctttcaggccagtcaaacaagggatataatgcatgcacacattgttatgaagaccttgactgtgtatttttgaaaaaatgtcgaaaggtcgtgtaccttggccaccgtcggtttcttcctgtgaaccacccagtacgaaagaaaggcaagcattttaaaggcaaggcagaccaccggaccaaacctctcaatcgaaccggggatgatgtactcgaaatggtcaaggatataaaagtggtatttggaaagggacgaggcagcgaacctattcccaaggatgctaagggacacgtacccatgtggaagaagaaatgcatattttgggagctaccttactggaatgtcctagaggtccgcaacgcgatcgacgtgatgcacctgacaaagaatctttgtgtgaacttgctcggattcatgggtgtctacgggaagtctaaggattcacttgaagcacgacaagacttgcagcgcatgaaagaacgagacaacctgcatccagaaaagacagatgatggacgtcattacttaagccctgctagctacactctgagcaaagaagagaaggaaagcatgtttgaatgtcttagcagcatcaaggtcccatctggattctcctccaatatcaagggaataattaatgtgccagagaagaaattcctgaacttgaagtcccatgactgtcacgttctaatgacgcaattgctgccggtcgttttaagaggaattctacctccacacgtacgtctagccaccgtaaagctatgtgcattcctcaatgcaatttctcagaaggcaatcaatccagagcaactagctactctgcagaatgatgtcgttcaatgtctcgtcagctttgagttggtgttccctccatccttcttcgatatcatgacacacctcctagttcatctggtcaaagagattcgtattctcggtcctgtgttcctacacaacatgttccccttcgagagattcatgggtgtcctaaagaaatatgtccatagtcgttcccggccagaaggaagcattgccaagggctacgaaacagaggaggtcatagagttctgtgttgactttattccagaccttgacccaattggcattcctgaatctcgacacgagggcagactcagcggaaagggaacacttgggaagaaaacatatattggtacgggaaacgattacttcaataaagcacactacacagttctccagaactcctcattggtggaaccatatgttgaggtacacaaagattacctacggtcccagtggcccgggaagaatgaagcttggataatgcgtcagcacatggaaacttttggcgattggttgcgcaaaaaatgtcaaggtgatgaaaacattgatgagcagctttatttgttggccaggcaaccatcatggcatgtcctcacatacaaagggtacgagataaatggtaacacattttacacagttggccaagataaaaggagcaccaaccaaaatagtggtgtacgcgtggatgccacggatccaaatgggaacaggcaaacatattatggacgcatagaagacatatgggaactagtctatgcagctaattttaaagttcctttgttccggtgccaatgggtgaagatgaccggaggtggggtaacagtcgacaaggagtatgggatgacaaccgtggaccttaacaatagtgggttcaaagacgaaccattcgtccttgctgcagacgtgagtcaggtgttctatgtcaaagatatgtctacgaaaccaaagagaggaaaaaatgatgaccactcaatcatcaatgagccaaagcgccacattgtcctttctgggaaaagaaacattgtcggaattgcggacaagtcagacatgtcaggcgattacgaaagggatgatcgaattccgccgttcatagtcaacaaagacccaagcattctgttaaacaatgaggatactccatggttacggcaggatcataaccaagggtcatacgtcaagaagaagttcactgttgtgtcggcttgacttttccatttgggacaatctagggttcggtcaaagggtgtgtttgtaaaaaccaatgctttgactttggtcaaacttggtcaaatagcccatttgatgacttgaaatgaaaaaagtttgaatacaaagttgttagagatcatcaaaatctatattttatatattgtccatttttccatttggataattttgagccaattctagttacatttctataaaatccaagacgggtttcggtcaaacttggtcaaatgacaaactaaattacttcaaatgaaaatattttgaataccaagttgttagatatcttcaagatctaaactttttatatacacaacttttccatttgagaaaatctaagttaacaatacccaccaattctaagttctcacacaaactatatgaaactatatgtgtcaattgtggattttcaactacaccttcccaaaactttgtcaaatgtaaaaatggtctatatatgaaatgtagattttgatgagtggaacaatattggtattcatgacttttccattcgagaccatgtagggttcccaaaccgctgcgtggctatgagttccatgaaaattcaaaattcagtggttcaaacttttccaaatgaaaagttgaccattagacaaaatgtagaacttgatgagtgtagcaaactttgtattcatgacttttccatttgggacaatctagggttcggtcaaagggtgtgttcatcaagatatatatttttatatgattttttatttgatgaaaattatacccaagtagcattcctagtaataaataacaaaaataaaaagttttacgtcaatatgatgtgaaaataaatttccagttcattggatatagtttttgtaaatttattggaataatatatttttgcattaacaaaatactaaacatttcttacaaaatcattgtaaattataaaaatacaataagatatttaagtttaaaaattttcatgtgtacattaaaacaaattacaatatatgtcactatttaaaaaacattatgcaaaatatttaatttactatacaatttataatataaactgtatatataaaacaattgaaaaaccctaaactaaaaaaagggcctttagcaccggcccatagtgggaaccggtgctaaagggtccgcctctatttaagtcatgggcgtcctggatctgagcagttcgtcttcgtcttcgtcgagttcatcgtatccagcgccgccgcccgttcatctgcccgcgcgcgacctcgccgatctccagcgccgccgtctccagcgccgccgcgctcagctccggccaccagcgccgccgccgcgaccaccatctccaccagcgccgccatctacgtctcgatctccacgcccggccccgcgcgcgtccactgcaatgtataatccaaaaccatatatatacatatatatatataataaatactccactgcagtttatatatataaaataaataaatgttatgaattatatgtcaatcactttgcaatttcagtgatttctatatatttgtacacaaaaataataattaatgaatgctagctagtatatatattaagtatatatatatacacactaaaaaataatgcatgatgttagtattttattctagtaatagtttttagtacattagtataagtgtagtgttgacctgttataaattatattatgctagtatatatttgtaatatattaatattattcttgtattattttgtagtattatttttttagtatattatttgtagtattatttttttagtatattatttgaagtatattattcttgtattattcttgtatcatattttatttctagtgtgttgtatatattattgtttgtactattattcttgtattattcttgtattatattttattttgtagtgttttgtatatattattgtttgtactattattctagtattattcttttagtatattattctagtgtattactaggcttaagattctagtattattttttagagcactccaacactttcattatttttgtagtattcttgtaatatatattcttgtagtatttttagtatatagtatgtatgtatgttctatttttttatatatgtattattttttgtatgtatgtatattattttttatacatatacacacacatatatatgtaatattttttgtatgtatgtattattctagtattgttttttattctaatgtattacttggcttaaaagatcctagtattatttttagagcactccaacactttcatttgtagtagtattagtgtatttcttatcttatatagaatatatatatgtatggttgcagacatagaaatggctgaccgtcctcatgatgatcctgattatatggaagctgccattcaaaatataatcgacgacggtagtcagtacttcgttgattaccacgacatcatgcaaggcaatcctactgagcaacaagagggcaatgcccctgagcaacaagagggcaatgcccctgagcaacaacttgtcgtgcaacaagaagaaaatactggcgaggtatgtaaatgtaaacatatataaataatgcatctcttacattaggttttagacttattacttggttattaatttagtatttttgtttctatatgtacgtgtagccttctggatcgacctctacggggagaagcgtacctccacgagggccaaagaagccgttggagggccgctatgtaatctctgagtttgagatagctacaggcagaccacttggtgagcatgcaaataaatatgttaatcactgtggatatcttgtgagagatcaaataccgatcagttgtcgtgaatggagagagaagcgaggtgctcctgagatcagttttgtctctgatcgtgacaaggagttagtttggaaagccgtcacagacgttttcaccttcgacaccaacgatgaagagttgaaggtgcgaatttatgactggactatgaagaagatggcagtactcttccagaattggaagaagtctttgtacaataaatatgtcaagaaaaacgagactccagatttcaacctcaagcaatatgtaaagctgagggccttctgggatgactttgtgcagtacaaaacatcagaagagggcgaggaacgagccaatagaaacaaagagaatgccagtaaaaaggcataccaccatcatatgggatcaggtggttataagagtgctgctcccaagtgggaccgaatggaacaggagatgcttgctaggggggtcacacccgagacaatagcaaagaattggagcgagcgctccaagcattggttctacggtcatgggggaagcgtggacccagacaccggggcgctagtttggggccaagaaatctctagagcagcagagagactagtccgtgcacgagaggcggttcagtctggtgagttcaggcctaacagggagaaggatgaactcacctatgcgcttgaaaatcctgagcacggtgggcgtacgagaggctatggggcagttccgtggctgcaatcattccaagccgatcaagatacctacacaagccgccagagaaagaaggatgaggaggcagagcggatccgccgcctggaagcttttgttctgcagtcacaagagcgcgagaaagctcgtgaagaatggatgcaggcagagattcaaaggcaagtgcaagcagcacttagtcaaatgacgaaagggcaaggtacatcacagcctgaggtcaatgttagccccccaggccagttgaaaagcagctgcgcatccacggaagtaccaaccattcaggatgacacgaagctacacttccccgtggatgatgtcacagaggcttttactacctgtgagctgcatgtaccagatgggaatgccaccaaaaaggtggctatcgctgttgtcaaccctatcgaccgaacgggcactccaagaatccataatcgaccagtacctggtggatatgctagcgtctcggttgatagggttgagaaaggttgtggcaatgtgccactagacatagaagggggagacggagagaagaccttaggtgaagctgagaagacatttatttgttggcgcaagcgcttcataattattcctcagcataggtttgtgtgtgattttacttcttatattatttattatgtattgaaatttaaaaaaagtttactcacaaaacttgtaattgttttctttgcagggactcctccaacctaagtccagttctctccccagcgcatcatagtgctgcgggcggtgacaatgctggatctcctccaacacctgcggcggccacaccgaccccgccaccgcctccaccacggtctccacctcctccaccgaggtctccaactcctccaccgcgttctccaactcctccaccgcgttctccaacgccaaaaagatcggccccaccccctccaccgcctgcaccgccctctccaaagagtgcacggtcggtcccctcgcctccaaagcgaggtagtaagaagcggtccgtccaagaaggaccgaagtcatcggtcccacctccaaagaaggctgcctcagcaaatagagctaagacgccagaaaaattaccttacgaaaagagtgaagaggaggtaattgctacatctaaagctgaggtccaacaattttttgataaaataaaggagaaaaggaaaaaacggcttaacccagaaaagccgtacttttatgtgaagccatcggaactgaggcagaaggtggcggaccatcaaaagaagcaacgcgaagctcagaaaaagccagcactttcggactatgagcggtctctggtcaagtcttcacagcctactaagaagagagtaggaaagggggtcccacagctcggagaagtatcaaaaccggtgccccctttgattgtgccaaatcaatacggctcaaatgaagacttgataccaaagaaatccttagcgttgtctgagctagactcgcttgagagttactttggacagagcggttcaaatatagaagaaattaccgccattcttggatgtcatacatttgaaaaagccgaggtagttgatcaatggagggcaagatatgaaccgggcaggagtctattcaaccctaagcgtttacatgagctcggcacacaaatgtttgcaataaacaaatggtgcattgaggcgtctaaaaggggagagaattggatttctgttcgtattagacaacatcactacttccgtggagatgacctcatatacgtgcagttcgaagaattgcaccaattatgccacctcgacgctcttgacaaatctcttgtcagctgcttttgtctgtaagtatttttcctttttattatacttctaacttctttaattacatgtatataatccttacacacttaggatttgtatgtatatatgcaggcaccaaatgagagagctcagaatgagaaatgacaatagtattgggttcgttgacccttatattgttttcaaggctccgcaggcagtgtggacagcagattatgagacagaaatctgcaccaatcttatgaggttctttgtaaaccaaaaagaaaaacaaaaaatactcttccccttcaacttcgagtgagttatatagttattaagtgcatgcatattttattttacattataggactgaccctatatatgtgtgtgtaaacagctttcactggatactcatggtcattgaaattcccaagaaccgattgataatctttgactcaatgagaaaaccacaagaaaattatcaacaaatggtaaacattattcaaaggtacgtaatgtcgatctcagctacaaaaatatcataatatgactctgtaattattagttcacgatccacaatggctgtgtatagggtttgggaaagattcattgaccgtgaacatctcagtggatgtaaagcgccgcttaacataatacatccacaagtaagttctactagctaacaaactttcgctaacttttagccttcttattgtcgtggttatgaatatttttatatatatatacatcgtacagtggtgtttaagacaagaaggagggaacaatctatgtgcatattacgtgtgcaaattcatgatggcacaagtcaatcaaacacccacagagacgctcagagtacgttacatgtctcttttcattatctcctgaattatattgaataacttagataactaataccttttttatttatttcaaattaaagacggaatggctgagggaaaaggtcctacaacaagaccgaatcaaagctatccaagagacgatagcaggatttctccgcgaccaagtgatcaatccaaacggcgagtttcacttcaacggcaacgaaactcttataccaaacaacgatgatcatttgtatcgtttgtagacattgggagaacaaactctatgtatatatgtgttacgaattttgtacatataaaactatatatatataaagctttttacatatctatttaatttttgatgtggtctattcattttattataggcaaagcttaactattaagcttagcctataattttcatttatatatgcttaatatgcgtgtaatataaatatattattgtatcagcaaaacatgtattgaaaaacctattattatatattatatataaacaataaacagaaccgaagaagtgaactaaaaaaaaaaagaaaaagaaaccctttaacaccggttggtaacaccacccggtgttaaagggtcttgcaacgtggcagccctggcaggaccctttaacaccggttggtgttaccaaccggtgttaagggggggccttcagcctcggttggccgaaccgggactaaatagtgggcctttagtcccggaagggcagcaccggctcgggaaccggggcaacaggcccttcccgaccggtgctaatgcccgatcatgcagcagtggtaagaaggtgaaaaactggttcacctttaatgagccggagacattttgttctgtttcctatggaactggagtccttgcccctgggcggtgctcaccaggagtaagttgtgccgttccaactggaaactcactcaccgagccatacattgttgcccacaaccttctccgagctcatgctgagactgttgatctttacaacaagtatcacaaggtacaaacaaattaaagaatctctctctctctctctctctcacacacacactcttctaaattagtaggaaggtagagatacaaatatcaatatatatactccagtattgagtattgacaaatcaattgcagggtgcggacggccgtatagggcttgctttaaatgtatttggtcgtgtgccatacacaaatacgtttctcgatcaacaggcccaagaaatgtccatggacaaatgcctaggatggttcttggagccagtgcttcgtggtgactaccccttctccatgagagtgtcggcgagggatcggctgccctacttcaaagaaaaagagcaagagaagctagttggttcttacgatatgatcgggataaactactacacctcaacgttctccaagcacaacgacatctcagcaaactactcgccagtgctcaacactgacgatgcctatgccagtcaaaaaagtaagaaattatagttaaggaccgatatctagtgcttcacagttccaataattaaagaaatttgtcgtcctcatactaatcctgcacttctattgttctgttcaaccagcccaagggcctgacgggaatgctattggtcctcctgtacgtacatatcttcctaacatttatattgtttttttacaatatttatactgaacgtgataatgtgaaaaattcgtccaaaaatataatcacagaatgctcatggttaaccttttatacgtaaaaaaagggaagttgcaaaagttttgtgttatagctatataaagcggaacaaatctggttttttccttttaatattcatattggtaataatttgtcacaatcttaattacttcaatttgcagactggaaatgcgtggatcaatatgtaccctaaaggcctacatgatatccttatgaccatgaagaacaagtatggaaacccacccatatacatcactgagaacggtaagtagtagggtgctatatatacttttgcattttgttacaatttcaatcatatataggtactactaactttagctaactaactaacaagtatatctttttcattcatctcatggatcttttgtaaataaagggttttaatactttttaatgaagcaaaactttgaaatgttcccaaagggtttttgcaagaatattggctctgttttgtttttgaaagatgagcatagttcctatataggcgaacttaaacattgctagatgagggttttaggccttgtttagtttaccgtaaaaaccaaaatgttttcaagattccccgtcgcatcgaatcttgcttcacatatatgaagcattaaatatagacgaaaataaaaactaattacacaatttgtctgtaaatcacgagacgaatcttttgaccctagttagtctatgtgttgacaccatttttgggcacgtgtccaggatggcaggatagagtggcagtacgatgcgggttgctgatgaggatggttgccgatgaaggagaggttgaatgtgactaagtccacaggcagtaatatggtgccgatgactgggtaaaaaggtctgccgatgactatggcaaggggattgccgatgacgcgaaggaggagtccggaagctgccagttgtcatctggaggagtttcggtttgtcacgaaggatagttttattatttccttagttatttgcatcgttttgtatacggattccgcgtaatttggaattcgaattctaatcgtgtctggtcgtagctctttgagcagggtataaatataaaccctaggaccttgtaataagagaatcaagaaatcaatcaaacacacgttttactcatattccagcatctactttttcgacgacttcgtcatactttttttttcttacgagttcttaggaattcgtcgacttaagctcggcgtgttctcgagttccccgtgagtacctcttagccgtgacatccgggcgcatcgctgttgtcaggactaaagtattcgagttatcacctttccgatagcaaggtcaaatcggctggcacgccttaacgtttgaatcgggtattagccctttgtgtttgcagatcagttttgcatcaacacatcttttggcacgcccggtgggaccgattcaagatcaagatcaacatgtcgatctctgacctcaatcaagagaacgtcatcctcgtgacggaagccaacctcaaggatgagcaaaagcaagctattgcccaagccatggaagagttcaagcagcaatgcctgaggtctttcagcataaacaggagcggcgaagtggtccagaaagatgcactgccggcaccacggcaggtcacctttgacgccaatcctggcaagcttcaagatatggttgacaatgccatcaatcgagcgttgattaaccaagctggtgtactgtctaatacggttttcaacgccgtggcaagaactttcaaggaaggacaaattccgccagattatgtggggtcctcccatcatcagccaacggcaccagaggtcacggctccatcggctgccttgacgaatgcaagtgcacagtctgccgtccctccaagtacattggggactactggtgcactatctatgccgatggcaaccaacccacaaatttcagttgggcagcataaactgacaacagatatgttggcatcggcaatgtcagggttaactcttcctcccaactggtggggttatggtatgcctccagagttgacgccgggaacatcacagataactgacatgaggggcaaaactcctatgacatcggcaccttccaatgtgccagtgaaccagagtcctcggtataccacaattactactgcaaggcctcacactggaaatcctcaagattcaatgttccagatgcccaacgcatcggcagagtcaatgctgatgcaacagaggcctatggcccagtcggggtatgtcaattcgacgacggtacccaattaccaatcatcggcagcacctatgccgatgaacgctaataatggatggcttggacagcaagcctttccacaatcgccccagcagggttatcagactacagggttccagcaagggcaggtctatcccgggttccaaggtcaggggattcacaaccagccaataaattttggacagcaactcggaggacagccaatcggtggacagcagtttggtagtccgcagattggaggacaggtgaccaatacaatgttccatgcaggtcacgtcccgaacagacacgtggaggttcgccaccaagtgccagatccgcagccgcctcatcggcaagatgccgatgcgtattgggccgataagattgctgaagtaatgacggaacaatttgggataaaacccaaagtcaacacttattcttatcggacaccgtatcctccagcgtatgatttgatcccgcttccacatcggtacaaggtaccggattttacaaagttttccggacaggacgacacgtcaaccatggagcatgtcaacaggttcattattcaatgtggagaggctggtaacagggacgaattgagggttcgtctattttcatcatcattgtccggatcggcctttacttggttcatatcattacctcccaactcagtaattacttgggccgatctagagaagcaattccacagatacttcttctcgggggtccatgagaagaagatcaccgacttggtcaagttgaggcaacgtaatgatgagtcggttgagggatttgtgcagaggatacgagaggtcaagaataaatgctatagcctggttctggatgatcggcagctagccgatttggctttccagggtttgttgccacatatcagggataagtatgcctctcaggagttcgaaagtttaagtcatttggtgcagaggatatctgatcaagacatcaagcctttcgagcctaagagggcatggaataagaaagtgtcatttgttgacgaagcaacaagctcagattccgacgaggaaccagtaatcggtttggcagagtgggtaaaaaacaagaagccgatgtcttgtccttttgggcagaaggaaccagagaagtttgcctttgacaccgccaaggccgataggatatttgactttctacttcaggaaggtcaaatcaaactgtcacctaaccacgtgatcccgtcggcagaagagttgaagaggatgaggtattgcaagtggcataatgcaacttcacacgacaccaacgagtgcaaagtattcagacagcagctgcaatcggctatagagtcagggagaatcaagtttgacagttctaaagcccagaagccgatgaagatagaccaacatcctttcccgacaaacatgttggacgctaaggggaaggctaaggtcttaacgtcggaaacagctgagaagagtgcatcggtagatcctcagcatcaagttactactgccgatgcaagaagtaagggcttggtccaggaaggaactagctcaggaagacttcctcgatctggcatcgtcataactcataggaggcctcgagaaaaatggcaacaacgggaagatcggtatcgacgccagcaggaagattatcaacgggaagaagaaagacgccgacaggagtggaatcggcacagggatcattggaattgcccattcttcatccactgttgggaggaaaatatcaagcttcctactgtcagagactgccctgaatgcaacggttatgatcgttacgataggaacgatcggcgttattatgatgatgaacggcgaactaatgggccgatcagaggaagggtgtcagtttatgaccggctggggggcagattcagtgggtacaacagacttagtgaccgtgtccagtattttcccaggaaccaagaggagctcgaaggaatggctgatgcgcgggttcccgatgaattcatattttgcagggatgctaacacgcatcgcatggagtcaagggagaaccgacgcccgacggcaaggcaaaggccacttcctccatggtgccctcaaggattaaccaagacacagaaaaggagattgcaacgagaaaggcaagaggagctaaacaagggagagaactctggaagtcggcagccgtcagacactaagagggaaggtccatcggcaggcgtcaacatggtcttcatgttgccgatggagtttcttgcaccagccagtgatgatgagttggaattttctgatcagatagctcagttggctctggatccgatgacggctatctttgagaaacctgccgatgacgagaggcagcatcttaaagctttgttcctcaaaggaagggttgatgggcagccaatgaccaagatcctagttgatggtggagctgccattaatattatgccgtatgcagtatatcggaagcttgggaaaggggatcaagatttgaccaagaccgatatgatgctcaaagactttgaaggaaacgtgtctccagtcaagggggcgatatgtgcagagttgaccatcggcagtaaaaccttgccgacaacttttttcgtgatcagcggaaaaggtgcctacaatttattattggggagagattggattcatgccaattgttgtgtcccatctacaatgcatcagtgcttggttcagtgggtaggagacaagattgagatcgtcccaggagattcttcttatgttatcgcatcggcagaagcggatacttacgaaaggaccaggtgcatttcaggagaagcttgggagaaagattttctcaaagttgccgattatgagattccaccgatccaagcagtcggttctgacgacggtttttaatggatagattcgccgatgatggaaaattgggccagggattcacatcggccgatgatttggtagaaatagatataggtagtggtgataagcctagacctacttttattagtgctaaattagatcctgagtgtaagcgacaattgattagtttgttaaaggaatataaagattactttgcttgggattatacagagatgcctggtttagaccgatcaattgtcgaacatcggttacccatcaagtccggatttcggccacatcagcaaccagcccgccgatgtaatcctaacattctacctgatattaaggccgaaatcactaaacttattgaagctaagtttattcggcagtgtcagtatgccgaatggatttccaatgttgttccggtttacaagaagaacgggaagcttcgggtgtgcattgatttcaggaatctcaataaagctacgccgatggatggatacccaatgcctgtcgccgatctactggttgatgctgcggctggccatcgggtcatcagcttcatggatggtaatgcgggttacaatcaaatattcatggcagaggaggatattccaaaaaccgcattcaggtgtcctggtcatgttggactatttgaatggatagtcatgacttttgggttaaagaatgctggtgctacttatcaaagggccatgaattttatatttcatgagttcatcggcaagttcgtagaaatttatatcgatgatgtggtggttaagtctggagatttctcaaagcatcttgccgatttacgaaaagtgttggagtgcacaaggaagcatggattgaagatgaatcccaacaagtgtgcatttggcgtatcggcagggcagtttcttggtttcatggtatatcagaggggtattgaaattagtcgaagatctattgatgccatcaataaaatagtggcccctaccaataaaaccgagctccaatccttgatcggcaaggtgaattttatcagaagatttatatcgaatttatctgggaggattcgtgctttcagtcctcttcttaaattgaaagccgatcaagagtttgtttggggagaagaacagcagttggctctggatgaaatcaaaagttatctagtaaatcctccagttttagttccacctcaacaagggaagcccttcaaattgtatttatctaccgatggatcggttatcggttcagctttagttcaagaatttgaggggaaagagagagtaatttattatttgagtaggaggttgattgatgctgaaaccaggtattcggccattgagaaactgtgcttatgcttatatttttcatgtatcaagctgagacattacctgttgtcggctgaatgtgctgttgtttgcaaagatgacgtggtccgatacatgctatctatgccgattatgagtggtaggatcggagatggattttagcgctgtcggagttcgatttgcgttacgaatcggctaaggcagtcaaagggcagattatggccgattttgtgactcagcattgcggtctagtggaaaccttggaaattgcaccctggacgctcttctttgatggatctacctgtgaccggggggcaggaatcggcattgtattagtttctcctaaggggaggaagtatgagttttccttgccgattgttgctacatcaataaataatcaggctgagtatcaagctctgatcaagggattggagttgttaagagaagttcgtgctgatgctgttgaaatattcggggattctatgttggttataaatcaattggccggaagctatgaatgccgaaatgaagttctcataacctatttcgagagaagtatgcagctgttaaaggaattcaaggacttccgattggagcatgttccccgattgcataatgaagacgctaatcggttagcccagcatgcctcgggatatcagccaatgattaatgcgacatcggcagtcagtgccggtgattggaggaaagaaattattgattatctaaaagatccatccaaaaaagttgaaagacgggttcgatttcaagcaaccaagtatgtgctccttgaaaatgaattgtattatcgaactgtcgacggaattcttctccgatgcttgggtgatgatgaagccagaagtttgatgggagaaatccatgaaggagtgtgtggagcgcatcagtcggcttttaagatgaagtggatgattcgaaggaatggatatttttggccaaccatacttgaagattgttttaaatatttcaagggatgtcaaggttgtcaaaagttcggtaatatccagagagcacccgcatcggctatgaatcctataataaaaccttggccgttccggggatgggccatcgatttgatcggccagatttatccaccatctagcaaagggcataagttcattctagttgccactgactatttcactaagtgggtcgaagctattcctttgaagaaagtcacatcggccaatatgattgattttgtgaaggagcatattatttaccgatttggaattccccaaacgattactaccgatcagggcaccatgttcacgtcaggggagttcgatgaattcgcaatcggtatgggaattaaagtgttgaattcttctccttactatgctcaagccaatgggcaggccgaagcgtctaacaaaggaattatcaagcttattaaacgaaagattgaagaaaatcctaggcggtggcatacattgttaaatgaggcactatggtcttatcggatggcttgtcatggatcaaccaaggtgtcaccctatcaattggtgtatggacatgatgcagtgttgccttgggagattaaggatggatctaggcgattatcttttcaagatcaattggctgccgatgattatgccactttgatgaccgatgagttagatgatttagcagggcatcggttaaaggctttaatgagtatagaagaaaataagaagagagttgctagatggtatgataagaaagtaaaggctaaggagtttgccgatggggatttggtatggaagttgattttgccaatcgggactaaaagttcaaagtttgggaagtggtctcctaattgggaaggtccttatcggataagacactcggctcctggtaatgcctatattctagaaactctcgaaggagttgaatttcccagagcattaaatggcaaatatttaaagaagtactaccccagtatatgggtcgatgcataaaagtttaagtgccgataacactcctatcggctggatttaagtgtttgggggcagacttaatgtttcaaaagatgccgataacagtcttatcggctagactaaaagctaaaagcaggaaaacaaaggtgtgttgccgatgaaagcttcagatgttcagcagcgcttggattgccgatatggcgcgcagccggatctgattggctgtctctatctccttgatatcgtcgtcggcagaaccttctatcggtttcagcttcctcttcagctgcaacgctttgcggccgtggacgtttcgttcttgttcaaggtgcttgatggtctccggcagttgactctcttcttgctgggcttgggacagagcatcctctacttgcttgagttcggccagcagagcttctctttttgccgatagatcagatactttctgcttcagtgcatcgcctgaggacattaaggtgccgatgttcttatgtttctcgtcggctaagagtttttctttcatcatctcctcagaaagctggatttgagcagctctatcggcaaggcgtcgagtggctctctggtactgtagctggcggctttctaggtatgcagcatggaagagggtttcttcagcatcggcaggaatttggcctctaagggttttgaacagggccttggccgggtcagaatcgttgaccagttgagcagtgtcttgatgaagtatggccgatagctcttccagcttagctctggtttctgccgatacagttccaactgcccgagaggagcttgcttcctcgccttcttcttcgaagatatcaatggcgaaggagaataagctgtcgggagaatcttgttcctgaaaatgaagatggaataagtcatttttatggtcaaaacttcggcagacgatactggtggaaaattggatgacttacttgcttcaaggcgatttcttgcctttgactcgaagatgccgatggagctacaggttgatcggcaaatgttgccgatggaacgatatcgcctgaaagaagacaggaagggttatgagactaaatgagaataagtttgtcggcagaggtattgttgagatatgttacccggaggaggaacaacagttgtctgaatcagggaaaccgccgatgatataattggacctgccgggccagttgtttgttcacccacgtcagctgatgtaccttctgtttgaggttcttcctgctggggttcttccatctgtggtgcttcctgcattggttggggagatggtgcttgctgtgtctggacttccggagaagagggggaagattccaccgggattggagacaccggaggaggagggggagtcgccactttctggcgttttgttccagccttagcaccttgggtgcccttcctctttggctggctagactggggggcatcggcaccttggcgtttggcttttgccgatgcaccagtttgctgcaacaacaaaaaggagtttatgagcacagatagacgatacaaagatagtcagcataaatgaaaaaggttttaacaaattgccttgaaagcttgcgccagagtggaagcagttaccgttggcgatgtctgagttttcctggtggtaactttcttgaggcgcgcaccccgatgcatgatggaggccagagtgggagcattgtggccgattgaggagatcgggcctgaggggaacaagtcgatcggcttgccactcctgctaaccgatgggggggtgttgtcaacctgcaaaaggaattcaggggtaagttaccgatggaaatagtattggaaaatgagacatcggtttaaaatacttacggtgtcatcagggacttcgtattcggggtcgatcacgccgcggtatgagagggccgatctgcagaatagattctctttccattctgcccaccatagcttgtatgcctgagtgataaaggcagctggaacccattctgacagatctacatctgtatcggcatttggtggtagctgggctactcgagtccactcgagaaggttggtgatgggttctctgggctttatcacatcggcataaggaagtgcaatcggcaactggccgaaagctagctggcgagctaatgccgatggatggtaaaattcataggtttggggagaggtttttgtgctaccgaagaaattcactggtatggctctgggagtcacaattgccatcatcacctcattgtccctgtcgagagcttcatcaaatggattgaaggtcagagggagcatactgtctgggtcgtcataagccagccatggtcgttcatctctggccagaccctcatacagggtctcgaagaatcggccgatctgatccggattgttccctgaaccgggtaagactataacggcttcgccaaagttcaagggggcacgcgttgccgattcctcttcacccaacacatgattctcggctatatctcttgggaagtgctgtgagaacaagttgaaatcaaggcgcttatgcaggtgcagattgagccacatattaataaaccaccaggggcctcccaagttgccgatggattggccaagcaggagtttctgggctacctgatgaagaaggtggtaaacagcgccgagcaaatatcggccgagaggaaattgaccgccgctagccagtctttctgctgccgatagatagacagaagtcggtcctgccgatcgaccacagaatacaaacttgtccagccacatgttcagaaaggtggtttgctcctttatggtgacaggccctctcccgcggtacttctggatgtaccctgaccaaccgccgatagcgcgagtctccactttggcactgggggcagtatcaaaaaagtgggtgctatcggcagaggatatatctagcccagtgagcatggctacatcggcaagggtaggagaagcagggccgtggccaaaaaaacgaaagcattgagagtgtctgaccaaaagtaggatgcagctatcagcagcgactcgttcctgtgcatatcggcaatggatagcctaatgcactgagctagtttcctctcaccccactggacttcataagaattgctgaccctcaagaaccaatctttccaccctatagtagggctgggccaagagcgaaaggtgtctttccacagatctaaagaaaagttttcggctctaaagggaatcctgttggtttctgcattgacaaggtcggttggatctggattccctagagggccgaggcactgaaggtgtggttgatcggtagggatgacaattttgttggacaattcctagtgttttggggaataaaaatacaaagaaaaaggaaaaggaagatattcagtaagatgaatcgcagatgaacaggaatgcgagaaaaggtacaggagatgagatggaagtctgacctcagggacgacgaagccaatggccatcttgtcgtgaagaggacgttggagggcaccggagttgatgaagaggagtgcttgtcggaggtcttgagggttgtagatggcgccgccgctggaaaagcaaagttggatagtagaatggtgtaatgggggaggagtacccaagaaggaactatttataggacaagatgggcaagggcaaatccgacttatctctttgccgcatccgagaagcccgagggtactcaggtggatatggtaactgttcacacggtaatcctgggattgtgcaggtgatttgacaggaagcggccattatctaaagatattttactatgcgcgatctcctggtcggtccatcggcgatattctataacggtcatcttgccgatgggcggatagaggggaggtaaccatttttgcgaatatcctggtcagggcatcggtagatctttgtaacggtattgttgccgatgtacgaccaagaaagatgcctgtttaggaaggtggggatttcgaggaatctgcggaggattaggatcagagttgtccagattgaggttgtcagttaccggattaggagcattaattgcggagaaggcatcattactgcagagaatttcggggcattaatagttttatactccgaaactggggggcatgtgttgacaccatttttgggcacgtgtccaggatggcaggatagagtggcagtacgatgcgggttgctgatgaggatggttgccgatgaaggagaggttgaatgtgactaagtccacaggcagtaatatggtgccgatgactgggtaaaaaggtctgccgatgactatggcaaggggattgccgatgacgcgaaggaggagtccggaagctgccagttgtcatctggaggagtttcggtttgtcacgaaggatagttttattatttccttagttatttgcatcgttttgtatacggattccgtgtaatttggaattcgaattctaatcgtgtctggtcgtagctctttgagcagggtctaaatataaaccctaggaccttgtaataagagaatcaagaaatcaatcaaacacacgttttactcatattccagcatctactttttcgacgacttcgtcatactttttttttcttacgagttcttaggaattcgtcgacttaagctcggcgtgttctcgagttccgcgtgagtacctcttagccgtgacatccgggcgcatcgctgttgtcaggactaaagtattcgagttatcacctttgccgatagcaaggtcaaatcggctggcacgccttaacgtttgaatcgggtattagccctttgtgtttgcagatcagttttgcatcaacactatgattggacaatatttgtcacaaacaaacgaaagtgctacagtagtgaaattcaaaaaatttcacatctaaacaaggccttaatacacacgcacggacacctgaggatagctgcatcactaagagcatccccaatcgtttggcaaataggctttgcatacatgtatttacaaaaatgtgtaaaaaatacatattcaatggtttggcaattgggctttgcaattttgttaacttggcaaatagagggaaaggacttgcatatatgtcaagcccctccgcgcttggcattgcgtccctcgcgcgaaatctgacctctgcgcgtggtcacgcgactactccctccttccgccaccatattttttttgctaagtgattaatgccaaaccattggagattgcctcttttcatctttgtcatatttatttgggacttggcaaacttccttgtttgccaaacgaactatgcaaaacggttggagatgctctaacaagtgtagaagcctaactgcgaagatccggtaaccaaaaaataaaaataaaaaacagagacagaaagaagttgcatttacattaatatatatcagcttaaagtcattaagctacataattaagctcctgcaaaatgtaaaaaaatggattaaactacatcaactcctgtggaaggtcaaaaaaagagtgaggtaatcaccatagaagctcataataattacatggtataggcttcttgtgaactagtctgagcatgcttgcctcaaactcgcatggtataggcttctaatcaagatgctgttctgccgaaatgcaacctcgtggacctggccatgttaggctggctggctatatatagataattaaaacattttgctgactgaagtgacttgagaagataattaacccatagaataatgagggataatggtgataaatcaatcgtttgtgagagatcataccgtcccacgcacttgtgttctcatggagttttgatgattttgcagggataggggacattgacaagggcgatctacccaaagcagttgcgttggaagaccacacaaggctagattacatccagcgccacctctcagttcttaaacaatcgatagagtatgtatatatatatatatatatatccacctacctacctctagtttacttaagtttatatatatatatatacatatatatatatatatatataaatataaatataactaactcacacttgacaaatgcacgcttgcattgcatccgttgttcctacgtacgtgcagcttgggagcagacgtgcgcggctacttcgcgtggtctctgctggacaacttcgaatggtccagcggctacaccgagcgttacggcatcgtctacctcgatcgtgagaatggctgcgagcgaaccatgaagcgatcagccaggtggttccaggagttcaatggagctgccaagaaggttgaaaataacaagattcttacgccggccggccagcttaactaattaagtagaacacgtactgctgctggctgatgtatggtatggtggcactgtgtcctctgtgcatgcctgtgttgtttgaaacttttactttgcacggctgatgtgaggtaagaatgtaatgctctgttccagttcagtgttatctagttattatgcaataaaacgaagtgatcgatttgtccgtttcaatatttgtaatgttgaattattattattattattatgggccatgtggacaatatctgcaatgttgaattatcattgtgggcgatcgatgtcttattttttgtcgagtccggggactacgccagaaccatactaccacgtcgtaaccatggaagccagttgtgcgtttgttttgggaccaaagggagtattctctaacttaacctttgattgacaaagcgttagcaacgtaggcccaaattctatcaactagcttaaggtaatatcaaggtaaggtcacacaggcatgcacaagcaaaatcaataaattg

SEQ ID NO: 3661 - DNA, 3828 bp, Sorghum bicolor
aagcatttaaacattgtctaattataaagtatcctagctgaactaactctttaaatcacaaatcacatgcatacctgtgcgtgtaccacaagtactaaatatgctaaacacatggtatcttcacagttaagggaggataaatgtgtcaattgtttttaccaaatttcaaaaataatttgttttaaatttcgtaggatgtcttctattccaggatgaagggggtatttttttctatcgaagttgtagggacatgccaaggcctgtttagttctaaaaaaatttgcaaatttttttagattttccggcacatcaaatcttacggcacatgtatgaagcattaaatgtagataaaaaaataactaattgtacagttttactgtaatttgtgagacgaatcttttgagcttagttagttaataattggacaatatttgtcaaatacaaacgaaagtattacagtgtctattttataaaaaaatttagaactaaaccaggccttgaatttctttttgacaaggaccgaggcccaaattaacctatctaacttgagtgcgatcctctttaccaactcagttgagatgcgatatgcaaactccactagagcacgacacatgatcctagttgcgtatagccgcaaaaactagttcgactcatcaaacgatctcatacatcaacgaaaacagtatattacagcgaattgagcgtagcagctggttgagtttcttgtcgtgaaacttgtctatccagatttaagtccttgatttgatacgggtgttcatattttgctggatttattctaagatttaacaatgcttttttcagtggtagcttagtagatgacgtgcccgccgacagtgaggcgcatttggtgacttcgtcaatctcaaaatttgtcggtctaacttagttcttcggaggtgcttatagaggtagggtgtgcgtgcgtacgtttataggggtgagtatgtgctcgtgtatgagcgtctgtgtttgcaatttggtctcataaaaaaacatatatttacaaatcttatcaaattgataagttattatacgatatttacaaatcttaccatgtttttttcctaggttgaagaacctatgttgcgatctaacttctgctctctgacactctcatctcagtgtatatatgagtatcatgtctcttgtttgctgtgttttagtgcatagtagatgagttaactagctagctagtttccacctgatgagtttgttgaatttattcggaagctccgtgcaaacggtgcaatgcaaattgcaaatacaaaatattctatgtggtagattggtaattgttacattcaaatctaaacattatggtttgtatgtgatagcacttagccttggtgaatagcactacttgagagcttagatattataaatcttactctacggtctataatgctaatgctgtcaacttcaataataccttaattctaatgtctttcattactgttcatacacctaaagtgtttgtctttttgatgatagtgagcagttagtttcctaatttgattattccgtggaattgcctatacagtttgctgatctgtaacaaatctgtagcatgcaggccagacaagttcaaagaccaacccaatactggacccccgattgaaaaccggcctgtgggccgttgccaaatcccgatcagggtctgtactagcaaaggatttgttttggccagagagtagtttcggcttgtttgactagccaggacagcgatttcgcatgcatgccatatatgtatccgtagggaaaacgtacacgtactggccgtaatgtgcccgtgacctggcagtctggaacacggatagagatgagcacgtacgggagctcgcacgcaccagcgtccagcggcgcgtacgcatggacgggacgtgccgccccgctggcccgctgcgcccacacgtggcgcggcgccgcgcccggctcggccacgttataagccacgcgcgacggccgtcgccgcacctcctgactgcacactcgtcgtctgctctttaacgccgctaccgccgcagctgcagattgaaacgaagacgcacgcggctactacaggctgcaagaagaggcagcaggtttttgcttgcgttttttgagctttttttggcggcggcgacatcatgagcaccggcgcgcggccggggcggcggttcacggtgggccggagcgaggacgccacgcacccggacaccatccgcgccgccatctccgagttcatcgccaccgccatcttcgtcttcgccgccgagggctccgtcctctcgctcggtacgtacgcccgccgcgacccgcccgcgcgcgcgtcaacctcatatatcagatcagtctcgcatatgaatcatgttcgtcgatcatctcatctgtgttgtgttgtgtttgtgtgcagggaagatgtactaccacgacacggcgagcacggcgagcgggctggtgacggtggcgctggcgcacgcgctggcactggccgtggcggtggcggtggccgtcaacgtctcgggcgggcacgtgaacccggccgtcacgttcggcgcgctggtcggcggccggatctcgctcgtccgcgcggtcttctactgggtggcgcagctgctgggcgccgtggccgccacgctcctcctccgcctcgccacgggcggcgcccgcccgcccgggttcgcgctggcgtccggggtcggcgactggcacgccgtgctgctggaggccgccatgacgttcggcctcatgtacgcctactacgccaccgtggtcgacccgaagcgcggccacgtcggcaccatcgcgccgctcgccgtggggttcatgctcggcgccaacgtgctggccggagggccgttcgacggcgccgggatgaacccggcgcgggtcttcggccccgcgctcgtcgggtggcggtggaggcaccactgggtgtactggctcggacccttcctcggcgccgggctcgccgggctggtgtacgagtacctggtcatcccgtccgccgacgctgcgccgccgcacagcacgcaccaccagccgctcgcgccggaggactactagctagtcaagtcggccgggtggccggcgccggtggcgtcgtctccttagttggacccagtacgtcctgttgtcgtcatgttttgttatgtatgcacgtgtcggaaattatgtttgtggtgtcgtgtggagtggttaataaggggggcatacgtgttgtttggtcgccccacagcgttggagacggtgaatcagatgatgtacatctcaacttgttactagtgtgtatgtaataaattccaggtaaaaatggcaggacttgtatagtatcatatgtagttctgattatcgtttacttgatagtcatttctcattagcacatcgatggctcagctatgggacgtccgcttagctaagcacgaacatgacgaaaacgttgatagtatatatttaggctatggaaacatgtaaattaattatcagatgagtccgtttttaagcttgtgtcctatttatatgtaggcaatagaaacatgtgcactctttttttttttgagaaaaaaacatgtgcactcttattttgtttatgaatgatagagaagagaaaaataagagaactcgcgctcttatttggacatattttagaacttcgtagaaaacttatcagtctattttcaaaagacatgatcccatgcacaaatcttatctgagttggtctcaatctttgtttcaatgccagtgctgctaagtcactatattttaggccgttgggccgtatattatgttggatccattaagaatgaattcgccacgaacatatcagat

SEQ ID NO: 3662 - DNA, 7315 bp, Sorghum bicolor; identical to SEQ ID NO: 3564

SEQ ID NO: 3663 - DNA, 3660 bp, Sorghum bicolor
taaaatggagggagcacttgttcagctgtctacaaggctaaaattacattttcattatttcatcctcaggcgccgctatttattggttgtaaagttgcagaaatttttctttcacgaccatgaacatgttttcatttattttgtcttggctatatgactttttctctacttgctcaggctgcaagccaaggaaagagcgtggatcctaacatcactaagtattctgtaaaagtgctacctgtaagctggtgcctgtcagttcaatagttgaatccatgttttcttgttgagctgacggtgcattgtatctcctgcagttcaactatgaccagagcgtgtatggatttcgagaatatttcaggaagcatggtttcaagtattctgaaacaaactaatctgccttaagagtagtcctagggaactattgcagttgtttggaattggaatgtcgtgccttaactcttgttcattcaagaagtggctgtcatgtattcatgtatacggggtactgtccatgcctatagattagctttgccatacctatgaaccattggatttagttaattatttatacctctcaaagacatgacagaggatcttgcatcatcttttctccagcgctattgatttgtgttgtgactgggctgttgtatgatcagagtttgcaggtgttacttgttattagagggcaaaagccaatggacgatatgatatcgttataaagtatttctgtttataagaaaatagatagaagactgactgctgtatatggatccgactgggatttcaacatagaagtaatttatgtagccatttcctaacaactttattttagaaaacattgtattctaagcatgaaaaggccaggaggcaagagagtagcatagctacaaggccactatatctttacgtatttcttgtgatgcagttattctcctctggcctacagtctacactgggaccagaccattatgctgtcacctaaattatacaacaaatgaagttgtaagaatgatgtgggcaattgtcgataaacaaactagagcacgcagtgcagatccgctagggctgatgatatataggagcagcagatctgccacgctaagctgatcgcttttgtgccagccacttgtgctggttttacaagcatggaacagcaagtgatcagcttttacggtgctaaacgtggggaatgatttgcatttgcatctagaaacaagtgcgacaaagcacaaggtgtgtgatcagaacttcagacaggacgtacagtacagcgcacgcgcatttttggctccaacccagccgctgagcatgaggcctggtttacttcacgaatttttttcatttgactactgtaatattctcgttttatttgataattagtggctaatcatagactaattatatttaaaagatttattttataaatcacatataaactatgtaattagtctatacatgcgtagattcaatgtgataagaagaaaagaaaaaaattttagagcaaaacagcgcgttagaaccaaattcttcgctagcatggagacatggaccttgtagaacgtactcgtatcgtatagtattgtcgaccaaatatctgacggaatcagtaaaagattgcagcatgctttgctttgctttggtaccttgaaaaaaatcacgcactcacgtggatcatgatcggcagcatagcatcattatttcttggatcttgggggagaacaagtaggtgaagagtgagtcgaggcaagatgacgagattcgtatctgggcccacgtgcagccacagagacagagccggtggaatctgcggtcggagaattgctgcggccccagctgtccccggacgttgcttcacacaacacatcatcgatcgactccactccatgctacaaataacgcacacacagacaattatctcgcagagcagagcagagcagagaagccatccggatcaagaagcgcgaggcagagcaggagaagccagcgaggagagatcgatggaagccaagaacggctacagctacagcccgctcgccggggacgaccacgaggcggcggcggcggcggcggaggtgatcagcaccaccggcgccggttttggaggcgacgacgtcaagctcaggctgctcggatacaagcagcagctcaagcgagacctctcgtaagttcattttccactaccttctctgctctgctctgttcgtcggaacgatcctagctgccctgttctagtttccccttcaattccttctctctcatttcggttctcaatctcacaaaatcacgtgagtgggcgcagatcgatctcaatctcatgcgttttcttgtggccggtaagctagttacgtgctttctaatattttcctcccgacgaatcgacgatggatcatctcatctgttgtctgttgcttgcgggttactctgctcatcacttgatcgggagaaaaaaaaacttgggcagtagggcttgcgtgttcgatcgatgtatgacgtgatcgtgagatggatctactgtcgggtgaggtcgctctcacgaagtcacaatatatataaatccacacgtaccagatttctttacggtagacgtcgactggacgagtgcaaccggcctctctgttaaataaatttgatcaaaggtattagcaatatataaagatgaatccacagcttctttctcccacaccccttctattttttgagatctcgtcttgttcgtttgagcttattagtcgaatctgctagctattcagtcaacaatatcttccgtcatagtttatcagcgaacaaggcgatcatgatgagaagctacaaactagtcagccagccacatgtggactattagcaatatataacctgtttaatcacttttgcggtcggtcacgcacgcagggtggtggccaacttctcggtgagcttctccatcatctcggtgatcacgggcgtgacgacgctgtacgggacgggcctccagttcggcgggccggtgaccatggtgtacggctggcccatcgccggcgccttcaccgtcgccgtgggcctcgccatggccgagatctgctccgcctaccccacctccggcggcctctacttctggagcgccaggctctgcacccaccgccgatggggacccttcgccgcctggctcaccggctggtaagtgttttcttctgtctaccacggcattgcgtatagtaccagttttttttgttttttttttttgggtgaggaactactaccagctgctacatttcttctagtgctagtagtatttcgaaacagagtaaagtgcaaatgcacaaaatgtgcaccagtggaacgaggggcctggcccatgtcttgtcaggcccaaaataaaccagccttttcttaatttcccagcctgccaaacgccgaggtgcctccgttgagtttttgacgtccaaaacttaaaaggaaagcgacatatgcagagtactagtacaggtacaagattcgaagcatgctatactatcattgcttgggccttccgaaaagtgaaaagttttcggcactgcactttcgtttgtttgtgacaaatattatccaatcatagactaactaggatcaagagattcgtctcgtgatttacagctaaactgtgtaattagtttttgttttcgtctatatttaatgttttat

SEQ ID NO: 3664 - DNA, 5986 bp, Sorghum bicolor; identical to SEQ ID NO: 3572

SEQ ID NO: 3665 - DNA, 3365 bp, Sorghum bicolor
tcaaatttcaagacgaatttgctagtatattacatcatcaatggatttgcggtgttgcattgtttgcatagattcggcatcgacctcctgcgttgttacgtacatgtgtgggggactcgggtttcttggtgtggaacttcagccagcgacgtcactcactgaccgaccttttcccgttttttttttcaggcgtggacattaggccgtgtttgattccaccaccgcgcatgacaccatgtgcatgggcccaactttaaggcctatttgaaactactctgtttcactaactctattatggagcagttttaggccttgtttagttctgaaaagttttcacttttcggtactgtagcactttcgtttgtttgtgacaaatattatctaattatggactaactaggatcaaaaaatttgtcttgtgatttacagctaaactgtataattagtttttgttttcgtctatatttaatgtttcatgcatgtgccacaagattcgatgtgacggggaatcttgaaaactttttggttttcagggtgaagtaaacaaggccttactgtagaatttttgaagcaaatgtgttttgtttggcatgcagctctgctccacctttggtgacatgagattttggtggatgtccttctatacccttagcatatccatcatcggcatctccatcgccatatacgtggtaacacggacgcccatgacccaagaggttctccgactcacttgggctcgccagacccaatggagtgcactgggtagccatccttggttctcttggagcactaagttgtggatttggaggccattgtaggaagcaagcaagtggaggttgtcctaggaggctgcaagtgagtcacaatgggatcgagcgtggccgagggctagcacagctagggtgtctcttgccggtggcggtggggttgagtgcagccagggtccgctcgccggtggcagagaggccgagcgtggttggggtaccgctcgctgctagcggagggggcgagcacagctagggtgccgctcgccagtggtggtggggttgagtgcaaccgaggtccgctcgccggtggcagagaggccgagcgtggctggggtaccgctcgctggaagcggagggggcgagcgcggccagggtgtcgctagctggtggtagtggggctgagcgtggttgaggtgctactcgtcggtggagcacgatgagggccagcgcgaccgagtgcggtggggaagaagtgttgcaggcgagtcgcgactcgcaagagggaagaacgggagagaaagaactaaagaaagaaagaaattgttttctttgtgtaatgagtgacattggttggtaatatttccacaactccacgagaagcttcaaaacctgattttctagagtatcctttgaggtgttcgaggaaaaatgtaaagttggtcttgaacttcacctttttcttagagcagaagtttagaagttggagatggttcggcataacaaagttggagcaaggctagaaaatatggagcaaaaaagtgccaaacaaactcttactactagttctagcacttgccacgtcaccggccttggagctcgatcgatcaatcctagcgaaactagctagatcaggagggaagagggatcttttgaagcctaaccacgtgcaggtgaaggttacaaaaacccacgactcaagttttttttttaatcaactcacgcctcaaggttgaaaagcgaagagtaacaagttaccaaccactgttgggaggcaatgccaggcacggacgtctgtctatgccctgtctatctgcattctgcagtgcaggccagccaggagtggatagcaaaagtccccccggaaagaatcccctgcactgcagatatggtgggctccgaaaccacgtccgcgcccgcccgccgcttctcccccatccgccgatcgtttgggtgctctgatgccgcctataaatcctcgccctcctctgcatcagaggcaacacatccatcgtcctcactcctcacatcctccggcggtgctgacatactgtatctgcttcttttcactagccaagccaagtcggcaacctcagagagatccgagagatgtcgacggtgagccgtgcatcccttgaccagaagcttgccctcgccaagcgatgctcgcgaggtctgtgtatggacaaacaagccttcttgaagcgctatgtactatatgtacactgactctgactgacgcttgtttgtatgtctgcagaggcgacccttgccggagccaaggcggcagctgtggcaactattgcctccgcgattcctactgtgagttccattccatcgggccctaaatctcagctcttttccatagattaactagacgcattaacttatcgttttgctacgggttcttcagctagcgagtgtgaggatgctgccatgggcgaaggccaacatcaaccccaccggccaggccctcatcatctcaacggttgccgggatggcctacttcatcgccgccgacaagaagatcctgtcgctggcgaggcggcactcgtttgaggaagctcctgaacatctcaggaacacctccttccagggcacaggtcgcccgcacccggctttcttcaggccatgagcctatgagacatcatccgtcgacctacttcttcttcatcgtcgatcagtacaagcaccagacgatgccgtcgatgtctggctgtctgaataattgaactgctaggctctgacgctagtagcgtactgtagtaaccatcgtgcgtgtactagtaataggagtctagtactatatatcgcgctgtaattagtttctactattggtgctcatttcagaatgaatgcaaatttaatttctgttaccaatggcaacggatctagtgcaaactcatcttccgtgcaaactatgcaaactctaatctagaccgcaggatgttagtccaagggagcgcatgagagaggtggaaggaggggtttgtaaaagtgtgattaagagcgggcggttaagtgcaaaatgacccaatctctccgcgcccttggatcaacatcctgcggtccagattagagtttgcacagtttgcacgtgagatgagtttgcactagatccgttgccataatttttttctgcaactacaatgtaaatggccactattttttttgatgaagatggtaatattacaaaaaaaagggcacataaagtaggttaattggtaacggcaacggatctagtgcaaactcatcttccgtgcaaattatgcaaactctaatctggaccgcaggatgttaatccaagggagcgcatgagagaggtggaaggagggatttgtaaaagtgtgattaagagcgggcggttaagtgcaaaatgac

SEQ ID NO: 3666 - DNA, 6151 bp, Sorghum bicolor
cttggatctcgtgtagacatggtttctaatttagacccggtttctatgatttttgctctttcttcaataattgtcttgccacattagtaaaacgcttaggtgacagtataattaatgtagataaaaactatggtagtttcatcattgaaagtgcccttacagacacatacgctcacataaaagagtgcatactttgggataaagttatcatagacgcctcactgttgacagacacgtcgcctaccagtgagaacgagtgcatacccaccccctatgaacgcacacgctcatatcctaccttaaggttgacgaagtcaccatagacatctcgttgtcaatggccacatcgcttaccactgaacaaatgcatgctcacccctatcaacacacgcatgcacaccatacccctatcagattaacaaagtccaccatagacgtctcgctgtcgacgagcacgtttcataccactaaaagaataacacaattaatcctaaaataaatttagaaaacgttgttcaatatattaaggcataaaaaagacattgttcaataaaacgttcattagattctagcaacttcacaatttccaatcaaccacaaataaacgttgggggctaaaaagacatccattattcattgctcggagtatcaacaagggcgcggcaaagccgtgctagcccaacataaaaaaaaatcatggactatataaactatagctatgaattattctaattaattatagaaaaacacaactctaaagctacaacaaaaacttgtattaaagcatactatattatatgttcactgtgtatatctacttatctggagtccaacaaatttatgtgatttactataattttataaatatttagccaaaataaataaaaatgaaaaagacaaaagtatatttaaaaccgctcataactatgttagagacataatatgcacaatttcaaaaaaactgagggatatatttttacccaattttgaaatttaggaatgaaaaatagactttcctaaaaggacaagtaaacttcttcctttgggttgtgtttagtttttggaggaaaaaaattatgatactgtaacactttcgtttatttatggtaattattatccaaccatagattaactaggcttaaaagattgtctcgtatctttcgaccaaactgtgcaattaatttttatttttgtctatatttaatatttcataaatacgtctacaaatttgatgcgatagaaaatcttgaaaattttagattttgggtagaaataaacaaagccttagagcatctccaacaacttggtaaaattcacttgtcaaatcttgagttatagcaagttgctaatttgtttagcaaaagaaaaaaggatgtgtctccaataagttgctattctcacttggtaaaaatagaggatgacagatgggatccgctcacttgataaaagaatatgtgtctccaacaacttgcgctcgggatagcaacttgggatagcaacttgacaaatctcggcattagaaacctctggatagcaacttgggaaatttaacaagttgagataaggagttgttggaggaggatttttatgtttttcgcaaatttagtagaataacatgttgaaataccaaattgttggagatgctctgctattacacaaacactcctaggtgagatcatcggaacaaaaagagcacaaaaaggttgaataccgcacgcactggcagccagcctcccatgtgggccctgaattaatatcttcactgtcaaacgggtcccacacgcaaaatgagatcttttcttcttatacgggaaaaagaggcagagacgcagcgctgcagcctgcaggacaggagagacccgagaagccagccatggatgggaggaagaactcccgccgctgtggcggcctctccaggaactttcctaactgaattcgatctcccttatccggcatcagcgcgcaccactaaattcccttttggtaatataaaaaaaaataccttccgcttcgaagacgtacccggtaccccctgactctaatcgagttccagtcccgctccaacgtttgagagagagcatgtccgacttgcgaactccttcgtcgtccttctccttccccaagagttccagatcgtgaagccagccactactctactccgagtcgtagctctcagcccccgcgcgtcgatcttatcctccacctccagtctaattccagctccgagcctccacccaccccgatccctccctcactattaatacagccccggtgcttcacccccgatctccatcacaaccatcaggccctcccctcctcgatcctcggacgaaacgcgccgccttttcttcaccccgtctcgtctcctgccgtttttgggtcgcccggatctcgccctcgtcgcgcgcgcgcttgttgtttctgtcggcggtgctggaaaggcggggtctttttcgtggccgcgcgccctcgtgatccttcttcttggggtggggaaaagaaaacgttgccgccgcgatgaacgcgctcgccgccaccagccgcaacttccggcgggcctcgaagctgctcggcctcgactccaagctcgagcagagtctgctcatcccgttccgggagatcaaggtggggggcctccggcgccgttgcctgtgccatctcttcttgtgttggccgaattgtgtggctcatgcgtttcgccatgttcctcgcaggtggaatgcaccatccccaaagacgacggcaccttggcgtcgttcgtcggcttccgcgtgcagcatgacaacgcccgcgggccgatgaaaggcggcatccgctaccatcctgaggtgagccatgtcgggctgatgcgattctgctgtcgattctgcctattgtgtgctcttctgaaaatacagataatgcagcaattgtaaactaggaatagaaatattgcagcaattgattcatcaaaaaatataaaaaaaatgcagcaattgtagaaaggcatggtttggttacgttgatttcttcttcctgtcagactgatagaacaacttctgccacttgtcattttgtaaagctcctccactatcttttaatctctgcatatatggttgcgttcatttcttcgtcctgtcaaactgatagaacagcttaatgtgcagtaactttttgttgaaccaatcttttagtagccttttgcgaaactccaaaaattcacttccttattacaggctaatggtatttcttttttgtttaaagaaggctaatgccaattcaacctctaaaaacatatccaaaatcagtacaggacatcttcttctgatataactttctgaccttttccagttagttaccagaatttgtactcacgggttgttttaactacatgtgtataagcaactgatgtggtcagttgtgttttctttatagaaaagccttgcatttttgacaagtgctttagtcttgttcttttatgcttggtttataaaatctcagtataggaaaaaaaaagctacataatttcttaaccatgattttcttgtatgtattactccattcagaaatttatactagtcaaaaaacgatttaattgttttgtctggcaggttgatccagatgaagtaaacgcccttgctcaactcatgacatggaagacagctgttgcagcagttccatatggtggagcaaagggagggatcggatgctctcctggtgaactaagtagaagtgagttggagcggttgacgcgagtatttacccagaaaattcatgatcttatcggaacgcatacagatgtcccagctcctgacatggggaccaatgcacaggtaggcctaatattgcttatggtattgtttgtgatccactcttttttgtatgcttagctaccttctttattcttatgcaatcacgacacagaccatggcatggatgttggatgagtactcgaaatttcatggtcactcaccagcagtcgtcacaggcaagccaattgtacgtgaaaaaatgtggcatcaagttactttcgtgcaaatagttttttacaaattataataggaaaaaagaatgcaatagttgctataaattttatattttttttcttgtaggatcttggtggatcactgggtagggatgcagcaacagggcgaggtgtcatgtatgcgaccgaggctctacttgctgaatatggaaaatgtatttctggatcaacttttgtgattcaagtgagtgataattaatacacatatgttcattgaatttactttttttatataagataataaaaggagaatcatatgttccgtttaaaaagttaactactataaaaaataactctatatatgcatgttggtattgcagcacaatacaatatatatataaattaaaatatgtcaaccttgcagggttttggcaatgttggctcatgggctgcacgacttatccatgagaaaggtggtaagattattgcaattggagatgtgacgggttcaatcaaaaacatgtcgggtatagacatacctgctttgatgaagcataagaatgaaggtcatgccatgaaagactttcatggtgcagaagtcatggattcgactgagttgctagtgcacgaatgtgatgttcttgtcccttgtgccttaggtggagttcttaacaagtaagaacgagtgtccttgtctattgttagtttcattggcctctctcaacaattttcgcccattgatatgtgccggaaccttttcatgacctgataaaatatgccaattttgttatgtgaatagcctacttttgatttatttccaatctctgttgtatatataccccggaattgctgatttgcagtaattggttttgtgcagggataatgcaccaagcgtgaaggccaaatttatagttgaagctgctaaccatccaactgatccagaggcagacgaggtataaccatttattgtacaataatatcatgaacacaaccaacctttcttctctgagcttctgcctcttgcatatgctgtagattctcgccaagaagggagtggtcgtattacctgatatctatgctaattcaggtggtgtgatcgttagctactttgagtgggttcaggtaaatgcctctgcgtcctttgccgcctcaatgctggattgcttcattgctttaatctgccttcttgtggcatgttgatttatggtgcagaacattcaaggtttcatgtgggatgaagagaaagtgaacaatgaactagagaagtacatgagcagtgcttttcaacacatcaaggccatgtgcaagagtctggattgcaaccttaggatgggggcattcaccttaggagttaacagggttgcccgtgccaccctcttgagaggctgggaggcatgagaccattgactgcagattacagactcatcaggtgtattcaataattcatttccaacaatgttggaggatcagtgtttgatacggtaaaattcatcagaaaaaggctggcttggaaggaatccagttgaaataacattctgggtgtcgtgcttgttgatccagttcttagtgatgattattgaaaactgtacttaatcattatataatgttttagaaagcttatttggtctcaacagagttcatgtatctttccattcgtattaatggaattctggtatggggtttgaagcttccagatgtaaatgatccgcaaaaattgcagtagagattcaaataaaccagctatcatccacacagtttaaagcactgctgtgactgagtttctcataagcgctaagcagcttaataattcagttgaagagaacacactaaagttaattaaaagataacacactaaagttaattaaaagataacccactaaagttatcatcctgcgcattgcatttagcaattctgaaagtgttcggcttataagatgctttaggttcccatgttttggagctacgggtttgacgctgccagcgtctgagaaggcaacgcgagcaaaacaatccccggaccatctgaaatctggtcagcggtaacagggtacagtttgcgaggcactttttttaccatgagtaatcgaggctggccgtgctgcttcagcgccgctgatgcttccatgctgccctggtcagcaactgaagttggagtaggacaaccaccagcaatcaccggtgtcaact

SEQ ID NO: 3667 - DNA, 6151 bp, Sorghum bicolor; identical to SEQ ID NO: 3666

SEQ ID NO: 3668 - DNA, 5986 bp, Sorghum bicolor; identical to SEQ ID NO: 3572

SEQ ID NO: 3669 - DNA, 6360 bp, Sorghum bicolor; identical to SEQ ID NO: 3597

SEQ ID NO: 3670 - DNA, 7414 bp, Sorghum bicolor
cttaactagcaaaaaatatccagaatatagaatgctaatttaatatttagagatttaaataaataagttgttgaagaatatttttttatcaaaatttctatttctctctattataatggatgtaaagaggctctcgaggcaggtggaggtcaggccactcatcactgactcctatgcgagcacaaaggtttttaaacgatgatcttggccaatcagaaaccctgctttcactggatccgatgccgcccgacaacagggtcggctgtcggactaaaatactccatccgttccaaaataagtgtcgttttcgcttcccgagaaataactttaattaaatatatagttaaaaatattaatatttataatatataattaatatcattggaaagatctttaagtctagttttttaacaaatttatttagagatataaatattgcatgtatttactacaaatcgagtcaaacttgtggcacgaaaatctaaaacgacattctttttgggacggagggagtacgcagagtttcaccaaacgtgcgtggcctgaagaatcggctgccgtgagtcatgcgcgtgccactggatcaagggacaacggtctaaaactttggacaaaggagggtagaggaaaaaggataattgggtcaatttctgtttttaccatgcattgatttttcctttcaaaacaaaaatcgtagagatgtctgcattgatctagaccattgagcacaattattagaataacggaaacagtttagtcaattggaagatcaacttgaaattgaacaccttggatcagcccggcctactactactcaaaggcacgcaccgctggcactcacccctgtgtgtagatcgacaatgtgtggccattttgtccatttactgcctagcaatttgttcacatcacagcaccctacctctgttttccccattgttaggcgctaaatacaccatacctaatgagctccttcgcttatacatgttttaagttcaaaatatagtgcttcaaatattttgcatttgaaactttccttttatattttattaaaaatggattctagatcatagtactcactattaattactgtactgccataaataacttcacttttagttactactactcacttggttcgaaattataagacgttttggttttctagatacgtatttttgctatgtacttagatatacactatgtctagatacataatgaaagcaatgtatatagaaaagtcagaacgtcttgtaatttagaacggaggaagtatataatagcataaatagtcatttaacctacactgtagcacctaaattgttgaattttctctatagaagattcatagagaattgttttatcaaagaaaaactaaggtaataatattcctgttaggatgtataaacttatatgaagtaacaacctacaaaactttgttgtcatagagtactaatatgatttgaaatgaaacctcaagtatttgatagggttagaaaatatatgcgactcgtaaccagctcagctctgctcggcttggactcaatttgatttttttcacgagccaactcgtgagccagaacgagctctgacaaagccgaggaagcccaaattgatgctagtatcaggaagccataacaacgacctaagcccaaagccaaccctaggaagatccatgctctcccctctccctcttctgtctgatctcacatcccggccggttccagtccagacttgactaccactccacctcccttgcagtcccacagttgcttccttcccacggacgacccatccctctcgcccgcgcgcgcgcgcgctccgcagccacaagcgcaaagggggcagcgcacacagcagctgtgccagctgcctcctcctcgcagtgcccaccacctgccgtccccgtccaccggacccggatgcggacggctcgcgcggcctcgcccggcccttccctctcgccacccatctataaatacctgcccgcgcgctgcggagctgagagcacgcaagcagcaagcgcagcgagcacacacacaccagcatccctctcgcagtgaccctgctagctgcctgcttctcccagagctgagccgccgatccagctgatcgatcaagctaagtcagcttagatccaccatggctgcctccaccgcgtccaggaccaactcccgggtgaactactcgaacgagatccacgacctgtccaccgtgcagagcggctccgctgtccctaccttgttctaccctgacaaatccatcgccgacatcttcccgccgcacctcgggaagaaggtacgtacgccataatatataactgatccatccatgccttctaataagtcagcgtctgcaggctagctagctagcttgcgctgttgcgagcaagctagctagctagctcggcaactagctatccgacgactggccgccgtggtaataaacacggccggactggtgatggtcgatgtacaacgtacactgacgagacgactcctcatattctttcgcatatgatacgtgcgtgcacaacacaacataacacacgtactacttgcatatggatggcaggtgatctcggaggtggtggcgacgttcctgctggtgttcgtgacctgcggggcggcgtccatctacggcgaggacaacaagcgcatctcgcagctggggcagtcggtggccggagggctcatcgtcaccgtcatgatctacgccaccggacacatctccggcgcgcacatgaacccagccgtcacgctctccttcgcatgcttccggcatttcccctggattcaggtacgtagctagctagcgtaccttcttaatatttaatctccgcggtttaatttgcctttatttttctctctgctcctgctgatttcgtgttcgtcctgcaaacggaagtggagcttttggcgtgtaggcatcatgcatatttctttccgcggcagctctctttcaattcgttgggtccgctatttcaatccatttgttaatataggagttcagtacgacttagttgtcaacatgttgtcatgcatagccgtgtccgtgtgtatactttggatagccatctcaggttaggatttagctacgatacacatacccttttccatgaacgcgcgcacagaagagctttgcatttcatcaaaaaggaaataaatactcaagctctatgacctgaactgtacgtctgagttgagacaggaactctgcaaataaattgccgagatggtttatacatgaagatcacctggcaattttccacgacatatgtttttttttaaaaaaagaaacgctagcttctgtgcatgtgcgtcccactactatacaaataaactactgaagaaactatcaaatttaaactactgtgcatacagacacagatcgattataactgccaactggacacatgcatgaagcagccaatgaccaaaaacagttctcgtattaattagtacaagttgacaaggacccagtagtgttgcttaaacaagtccagtatacttcgtagctagacagcttatctgttccgattgccggccgattggtatcctactttcctagtcacggccggtgtcagctgtcagtcaggtcggtagcctggcagcatacagcagcatccaaaacaaaacgggcattatttggcaggctacacgccgagctcgcgcgcaacatgtgaaccagataaaacactcgagagtagtacatatgattgggcaacttggtagtagaactgattggctcgtgtatatgtatgattagggctcgatatatgatcgatctgctcatggcacatgcttccgctaatgcataccgtaccggtgcgggtgcgccgggagggggcgttgacattctcgcggctgttctatagaagtagcgttgatcataatccatggtcatcaaaagaagatggtgcccaggatggtgatgggctgatatggtacttaagcttggcgaagaactgaaggttgttgggtgcgtgcatgtgccttgcgttcggccgcgaatccggccgtgtgcaccgcccggccggctgatcttgccgagatagaaagacatgcattggcatgggcgatggcaagaatataatccggccggagcgattggaacgtacgggacctcgctcggtgccatgctaaaaagctaagcccaaatccggcgaattattagcgtccggctcgcgtggcatgcttgcaaagtccgcgcgcaccggaccgtaccatgcacgcggccagccacgcgcggcaggtgtgtcgccgagacgacgagaaccacagccttcccatcgtcggaatattccgacgtgtccaacccggccccggcggccggcctgattcgacggcggacgtggtgcgcgcgcccccgtgcacaccgacgatcgtgcccgtcacatcacatggtaaacgagcggtttattttgatttcggatccatagacggcccggcccaggttcgatatataagtgcatcgtcagtggaagttttatgtcgcattaatattttagaaacagtacagatgaaatttttatcatctctatttttattaatataatgtcacatgatcatatatatttaatgctcataaaactttaatgaaactttattgagactggtctaatatacgacgggcttgcttgggccttgtttagttccaaaaaattttagaaaatcggcactgtagcactttcgtttttatttgacaaatattatctaatcatggactagctaggctcaaaagattcgtctcgtcaattccgatcaaactatgcaattagtttttattttcgtctatatttaatactccatgcatgcgtctaaagattcgatgtgacggagaatctgaaaaattttgtaaaattttttagaagtaaacaaggccttggcgaacgatggaatcgcgtcgcgtgcggtaggtgtattaggtgtgcgccgctttcatctttcagagggtaaagaaagaatagagcgctcacgaggcggcatgaggttttttttttgttaatctgctttgtgatgtgtatgtgtgtgtatttcgcatgataaatcgcaggtgccgttctactgggcggcgcagttcacgggggcgatgtgcgcggcgttcgtgctcaaggcggtgctccaccccatcgccgtcatcggcaccaccacgccgtcgggaccgcactggcacgccctcgtcatcgagatcgtcgtcaccttcaacatgatgttcgtcacctgcgccgtcgccacggactccagggcggtgagtagtttttgcttgcctagctagctgcactgccccactgctgcatgccggccgccgtcgatctcctccgctgttcatcgatcgatcgattgccctgacgatgcttttgctttgtttggctgcaggtgggtgagttggccgggttagcagtcggttccgcggtttgcattacgtccatcttcgcagggtaatatgaacgaaaacgagtcacacagatgacaaaatcctcacactgactgaccttattagtactattagcaaggacatgactgtagtactctcgcgaggaattaaaacacggtagactttcgacaaagggctagctagctaacactagcagtagtgacactgaagaaatcgcctgctgcctagcactagcaggtcctggatcggtagctaggaaagcaagcgcgcgcaggcgactttccaagctgatgacgttctttgctacgtaccgatcgagccgccattttttttttcggcttctttaaagatttcggatcaccttgatgtagtactactacaagctgacactgtggttgcgacaggtcgtgaccatgcacccatgcctcggctgaactactggagaaatatagaaccctgtcatcagctcatgtcatataatcgcttttctttaggcactagtacagtacttctagctagcttatcgtaatctacagtctacataataactacatatacgacattacaaaagcctgcctgccttcactgacttacttaatgcacacaaattaaacgacgatttttttgggagtcctagctctgactttagaacgaaactatatatccataaaatctcttctgaccccagtaaatagattgagttagtagcccactaggaaaaaaaacacactgagccactgacacacacatgtacacatttaagctaagacgcgggcggaaacgagtggcatttgcaggcctgtgtccggcggatcgatgaacccggcgaggacgctcgcgccggcggtggccagcaacgtcttcacgggactctggatctactttctcggccccgtcatcggcactctctctggagcctgggtctacacctacatccgcttcgaggaggcacccgctgccaaggacacacagcggctctcctccttcaagctccgccgcttgcagagccagtccgcgctcgccgccgacgagttcgacaccgtctaacggccgggaccggcaggtgcatccacacctcaccatgcgtccatgcaactactgttcgtgcgtgggcacgctgtgtgagagtactgtgtgctcgctcgcgctctgttcaggacctcatcaggtggtgggagagagctagttagagctgcgtgtgtcatgcttggtgtacctagctaaacctacgtgtttgtattcttctcccgtactacgtcgcctaccacgtagcagcggatcggagcaagtgtgatgtgtactatgtatcttcggctttgtactgcgtcagagtttgcaaaagttaattgatgcagatgatgcctgattatatcgtggctttgctggtttgcagaagatgcatgcatgtgttggaacaaatatatggatttatgtctttgtcaactactttatatgttcctttttgtttttgagtttattttactatacatttttaatatcatagtatatttttggatggcattcaaagtgtttttttaaaggaagtttgttgatattgtagagacactgcaagatatcacactcatatatatgtgatatgtcaactattccttcagttctaaattgttattttgattttgccttaagtcaaaacttctcttaatttgagcaatttaataaaaaaatacgttaacatctacggtactaaataaatactaatatatatatataatgatggttttggattaattaaaataatttgatagatgttaatttgttttatctaaaaaaactaaaacaatctatattttgaaatatagagaaacaatgttagatgcttgcctcgtgcacttgtggcatgggatagcccatttcgacacgtgacgcagtggccacgtgtcatctggccattaattcactagtagcatccaaaggttttctttgagcgccaatactctcgtggatatagatttgtatatagacttagattgagaaggtatacgattgtatgaatggatga

SEQ ID NO: 3671 - DNA, 2986 bp, Sorghum bicolor
acgaaatggagaattagtcccggtttgagatacccaccacgactaaaggcacctgcccaacagctttggtcgtagtcttttgtagaaggacatctttagtcgtggtcggtatacccaactgggactaaaggtcaccatttagtgccggttgcagatcccctccggggctaaagatttagtctgatttgtggtttcaaccgagactaaaaatctatgtttagtcctagcaagctacgttttgtcccggttgggaacccaaaccagaactaaaggtcctggttatatacattgagtcttcttcctcctccagcccgagccattcgaactcacagttgttgcttcatttttggccatcataagactactctcactttgattcttcggttgtaaaggttactaacttcatcctctcatgatttattagtagcatacctcattttgtggtctagatatatgtgaaatttatgatgaatttttttattatttgtgcaacatttgaactcaaaatcacttgatttggatgaatgaagcttaaattagttcatcaaaattagtatacaccttttcctggtagtatgcatatcacatttcatggtttatgtatctagagaaatagagaattttaagagttcttttataatttgatttgtttagaaactaagaaatttatagaagtttacaaattaaaaatgaatacagagagtagatggcagttgcttgtggttcatcggcatctcatcggtttccaaagcgaatgaggctagactttcctctcatggagtaccaagtgaagaagaaatgtcctaacaaaaattgtattttctacgagcatccggagactaaaactaaaaatcacatgcaaccatcgtcgtcttcaggaggcgaccgaacggcgcagctcggcatagctggctgggcagcacggcagcggactaggcacagtctggccaggcgcatatggctatgcgtgagtgggcagtggtctccttggcgctgggctcgaagtgcggccatttccttggcaaagggctcgaacctcgtcgtcggcgtggggaggagtagtgacgttgggcgagacaatatcgtgcggcatggaagggtgggaggtgcatgccgggctccgtagtgtgtgaccgcatggcgccaacagcccgacaccgcctcacctagcaatatgcatgaaaacggatcagatacggacggatattactgatatcaaaattgttttcatatttttggtcggatttagattcgaatacggataatttcaatcatatcggataagatatgattggatgtcgacatcataaatatacgatttaagtatttggatacggattcggtaccggatgttaaatattcgtactcggatacggacagatgtaaacccctctaaacgaatttgatctcgaatacgatcggaaaatatccgtactatttttatctctgccagctcgcggcatgccagccattatagtcgcccaagcgagcggaagggacaggaagcgtcgggagttagacacgaaaaaaacgaaccgatactctgagggatgtgtataataatcagtgctatgttgggtaatttttgttgactccatgaatcatgttgttttcagaatttgaagtcatagatctatctaggagtgagatttatatttttcgtagattgaagccggtagagctagaggcattttggtttagaaaaatagaagtaaaactgttttttacatggaaccaatcgcaggtgcacaccgaagaataatctctaaaagtggaattgacaataatagcaattaccaaatgcagtgcgaaacaaatataggtctcgtcaatcacaaccaccatcccctccgcaccgcacaatattttcttcttccgcggacaatgccatttaccaaccaattcttccctgccggctgcaggagtgtgatcacgagctcgacggagaggctgatcgatcggtggagcatgcaagaagggaggcggccatgagcagcagcatggactcgtcggagctaaggaaggtgttccaaatgttcgacaagaacggcgacggccagatcaccaagaaggagctcggcgagtcgctcaagaacctcggcatcttcatcgccgacgaggagctcgatgccacgatggacaagatcgacgttaatggcgatggttgcgtggacgtcgaggagttcggcaggctctaccgctccatcgtcgaggacggcccagtggccgacgccgacggcgacaagcacgatgaggatgaggacatgcgggaggcgttcaacgtcttcgaccagaacggcgacgggtacatcaccgtcgacgagctgcggtccgtgctggccagccttggcctcaagcaggggcgcacggccgaggactgccgtaagatgatcagcaaggtcgacgccgacggcgacgggcgcgtcgacttcacggagttcaagcagatgatgcgcggcggcgggttcgctgcactaggtagatgatcggacttcggaggatgccttcgttgcgccgatggcatcggcgttgtagatacttcattaacaggttggcatggtaacgatatatggcaatctagtggcacttgttcattgtagttaactattaattatttggtttggtggattcattgatacttccttttttatttgatttgggttgttaatactaatttctgtgttaactgttcgatttaactaggcctaatccattttttattaattctagcaattgataagtgaaaagacaattctattacaaaatatttcatggcagaggtctttccggcctccccagccacaccgatgatccagcgttggctagggtcagagcgagagtttggtcaatcagttctattgattctccatagatcttggtggcagctggtgtgcttatcgggaagcagtcagttcactttcttcatagtaattttagtctcttcttttggtttgttctattgtaaggtctggcagatcaatacttt

SEQ ID NO: 3672 - DNA, 4480 bp, Sorghum bicolor
  misc_feature (1)..(386): n is a, c, g, or t
nnnnnnnnnnnnnnnnnnnnnnnnnnnnnnnnnnnnnnnnnnnnnnnnnnnnnnnnnnnnnnnnnnnnnnnnnnnnnnnnnnnnnnnnnnnnnnnnnnnnnnnnnnnnnnnnnnnnnnnnnnnnnnnnnnnnnnnnnnnnnnnnnnnnnnnnnnnnnnnnnnnnnnnnnnnnnnnnnnnnnnnnnnnnnnnnnnnnnnnnnnnnnnnnnnnnnnnnnnnnnnnnnnnnnnnnnnnnnnnnnnnnnnnnnnnnnnnnnnnnnnnnnnnnnnnnnnnnnnnnnnnnnnnnnnnnnnnnnnnnnnnnnnnnnnnnnnnnnnnnnnnnnnnnnnnnnnnnnnnnnnnnnnnnnnnnnnnnnnnnnnnnnnnnnnnnnnnnnnnnnnnnnngtatgttttagtgttttggctctagcgaagaaaccgttaatgtggagacccctatcaaacaagctcttaaagagggattaaatgagaatagtttgagcctaaatcctggtgtcatatattaatttggggtgtttgaaactgctccactctagtttttatagctctgctccacaaactccactatggagcagctccaccgtggagtttgtggagcaggaggtactgtttaggacgaggggcggcacgcaggtgaagagacgaggggcggcacgcacaagaagaaatgaggtcgcaacgtcgggaggagaagcatctacgagaattagtccgtgattaatgagtgacaaggtgggtaattatctcacaactccatatgggagtaacaaactctaaaaactgaagtacctcttgaggcactccaggaaaaacatggagctagcctctagcttcactttttttgcggagcggagtttgtggagctagacgtgtttggcaacacggagctgaagcggagcagttctaaacaccccttagtattggtttggttacttgggtcgatcggcgctattgtggagagggaagacctcacaaataattgaaaccgagtaagtgacgaccggatcaaacatgtaatcgatccatcaaccactaaaagtaatgtcatctacgaatgactggtaggaaattgtgaaaccaacaaccatgcaccaaccagtcgttacttcaaaaaaaaaccatcaaccagtagaccacggccggctggttagctagatttctcgagtataatataatcgtatttttcttgaggcacatttcaagttcaggagaagaaaaaaaaaagaatttgtgggagaattttctactggtgcacgagtatcgtgtgctgatttaataactgctaattaagtccaccaacttgcaatcgcaagcttttcatcagatattcagatagcggccggaagaaacgacgacattgttccaacgcaaagtacatttgtgttgctagagatagagagcgacgacgtagcgtagagtgatgaacgcaggcacaaacacttggcgcgcgttggacgtttacttcacacaggtgtaccgacagtacgatgcactgatggtacgcattaggttataaaacgggaaaggtaatcgcagtgtggcgaaggatagtgaaggcctatgcaaggtgggccatggttacccctgtttttgaagattcccttaagtaacagtaacagtaataagcatagcatgcaggcaatggcaatggatgatcatggctgctgtctcaagtctgaactctgacgcacgcacgcaacaacactcagcctatattaatgccacattgcgtccgtgtgggatacgatcatacgaatcatacgatactgatacagtgataagctgatacttgtcaccactgcgggtcccactcgatacgatacgtagcttgtccctcccagctggccagcccatttatgccaccacctcctctcctcttttcttccatcaccgatcgaggcttctcacagcacagctagcaacacacagcgtcagagctcgtgagagagactggttgattgatttcactttcacacaccggaggtattagaggccaggatgtcggtgacgagcggcggccacggcgaagaagaagcagacgaccttctgaaggaggcgctgttggctgccggcaatggcagcggcagcgacggtggcatcgacggcgaggaggacctggaggagatccggagcgtggggtcgttcctgcggcacgcggcggaggagaaccggaagctctggtacctggccggccccgccatcctcacgtccatcgcgcagtactcgctcggcgccatcacccaggtgttcgccggccacctcaccacgctcgagctcgacgccatctccaccgagaacaacgtcgtcgccggcctcgccttcggcatcatggtctgtatactatacctcgccttcgccttcggccttcggcggaggataccaaagactctgattctgctgcatcatgcgtgtggtgttgcatcattgcctgcagctggggatggggagcgcgctggagacgctgtgcgggcaggcgtacggcgcgaagcagctgcccatgctgggcgtgtacctgcagcggtcgtggatcatcctcaccgccatggccgtgctcatgctcccgctctacctcttcgccaccccgatcctgcgcctcttccaccaggacgccgagatcgccgacctcgccggccgcctcgcgctctacatgatcccgcagctcttcgcctacgccttcaacttccccatccagaagttcctgcaggcgcagagcaaggtgatggccatggccgccgtctccgcggccgcgctggcgttccacgtcgcgctcagctggttcctcgtcgggcccatgcggatggggctcgtcggcctcgccgtcgcgctcaacgcgtcctggtggctcgtcgtgctgggccagctcgcctacatcctcatgggctactgccccggcgcatggaacggattcgactgcctcgccttctccgacctcgtcggcttcgcgcgcctctccctcggctccgccgtcatgctctggtgcctgcgtatcgtactacgtactctacatactggattattatattgttcgagactttggctgctgacacacgtgacacgttccttctcacgtgtgtacgtagcctggaattctggttctacatgttcctgatcgtcatcgtcggcaacctggagaacgctcaggtcgccgttgccgcagtctccatctggtgagtgagtagtcacgtgtttcagacgaaatggttgctctgcacctgcagttctaacgcctgctcgatcgctcgccgtgtcgcttctgcactgcatacatacgaatcacagcacgaacctgttcgggtggcagatcatggtgttcttcggattcaacgctgccatcaggtaataatcatcgatcgcattggcatcaatcgacgtacgtgcatcgtgcacaacgagcaggaacgcccataaatcgatccatctccccatgacgcgcaactattctacgaaaatgctcgcagcgtgcgggtgtcgaacgagctgggcgccgggcgtccccgtgcggccaagttggcgatcctggtggtgctcatgtcgtcggtggccatcgggctggccttcttcgtcctcgtcctggccttccgcgacgtctacggcgcgccgttcacggacagccccgaggtggtgcgcgccgtggccagcctgggcgtcgtcttcgccttctcgctgctgctcaacagcgtgcagccggtgctgtcgggcgtcgccgtcggcgccggctggcagtggctggtggcgtacatcaacctcggctgctactacctcgtcggcatccccgtcgggtacatgatcgccttcccgctgcgcggcggggtgcaggggatgtggggtggcatgctcactggcgtcggcctgcagacgctcatcctggtcgccatcacgctgcgcaccaactgggacaaggaagccggcgaggcgcattccaggatacagaaatggggtggatcgtcggcggcggctaggggcgaaggtacactgtagtaggggctacacatgccctccaaaatgcaaaatcaatgagttttgttaaaattttcccacatatgcacccacataagacatatgtatgcatttacagagtaagtgtaccctctctaatttgctctagctttgtctccgacggtgatcaagattttaatgatggaaagacacgtgcatgtacaccacagagaaatgccatgcaagcagaatggcatggtgaagtgctgcagtaacaagcttgattgtttgtgcttcagttcagtcacctgcttggattgtttttgtagctcgtgcaggttgtgttttgtgctgcttaattggttggagagcaactcttggagtctatatataaatttcagtttctatatctcaacttagacaattatttaataaatatctttttatatctctcttgtgtcttccaagaactctttactttttattctatatactcttagtttctccaaaggtggttttggagaagatagagaatggtttag

SEQ ID NO: 3673 - DNA, 4828 bp, Sorghum bicolor
cagataaacaggttcacgtgaactgtaagtatgttcactttcttgtggcattattgtttcagtgttgtgctttcttcctgcatcgtcttatactttgctggtgtggtcttctccctctgtatagaatttgtatcatacggttctggaccttgctcataacaatggtagatagtttggctaaagataaagttgagttattctctcattgttatctacatgtttattctgaacattctgctctggaacctgacaaatgtattatcagacagtagagtctgagtcaatttttgctattgggaataagtggggaggtatctgtggaaagcaaccgatcatgttatctttgctaattcaaagtttatttaaggcttatgctttagtatttgtctttttactgataaattatgttaatgagatcttcacgatcttggacgcatggatggaaagaaaaaatagtaatagaagaatgtgtaaaatgtgccttttggttacttgtatatatacatgtcatttgggtatctaaagtctaaacttatatttgtgttgtctaaatcactctaatctacacatacctacctaaatttggatttcgagtggtacagttgacttattgggcatagaatagatctgcatcttgtttagatttgtttgtgaactctagaaaaatatacgtacttgttagcagtggaagcttaattttgataattgtgaaaaaaaaatgaacatgagaattgttgaaatgatgttttggatggaactgctagtcatgtaaaacacaagtttaagagagaaaatagctattctttttttattgcattaggccttgtttagttcacctcaaaaacaaaaaaattttcaagattctccgtcacatcgaatcttgaggcacatgcatgaagcactaaatatagatgaaaataaaaactaattgcacattgtaaatcgtgagatgaatcttttgagtctagttagtccatgattggacaaaaattgtcaaataaaaacgaaagtgctacaataccaaaaaccaaagaattttcggaactaaacaaggcctatgtttttttgtaggagtgccttattagaattaatttaggataaaagagcaccgttggagcatgctacctaaaatttgaactcttatatttctttagggatagtggagaggggttgtcttctttatttaggagatagtaggttgtttttaagatctcattaaattataattctaattataactataggagatgtattgcagcctacaacacttccatctcatataatgctattttctaggggaaaaaaatatcaacccacagggtaaatatagccctcaaacatttctgcttaaaataaaaggtaaccttctcatgcaggtcgagaaaaccctcaaacctgcactattgtcacacgagaaccgaggttggttcttcgacctatgctttaaggtcggtggtacctaaatcctatatttcatccatacaaaggggtaccattgaactgtgagaaccaagactggtccttagacctatgatttagacctagtgctttagtgtgggataggtaaggggattttttttaaccccatcttgacttttgctcctatggggagtatgagtgctactaggagcctgtctaacgaacttagctagatgtccattcgtctctatttctttaggtgtaggagattggatatcatataataagttgaaaatgcttttatctggtaaaatctgaacaatccaagataaaagggtgagttaggcataatctaagcatctctacgacttctagatttctagagagaaatgggttggattgttgtagtttgtgcctgataaagggagagtacgacttttaggttgagacgagaatgaagagtacgtagtatggtgtgtgttgactcctctgcatcttatttcgtctactctataagaggactgccttgagacaacaccggccacctcttaggttcctaggaaaagaaagcgagaccgaccatggtgatcacgtgagcacaacacgcctctctctcctctcgctaaatttagccatgcatggcttcttcgtcgtctacttgccctccatcccacggatgtctcgcaaccccacgaatccaagcccatgtttgcaaagcatttttcactctttacctctcccaccaaagcgcgatcctctcgttttggtgcaaaccgatcgactgcatacctcatttttttttcttcgatcatgtagaattttctcagagcaatgtcagggcgcataagaccacattgtgtcgatttctctcatcatttgccgctcaaagcattcatcaagattaattttactcgtcaggtttgtgtttactgcgtggtcaccatcttattgcaatgcaaactattgatgtgtgattcttttttgtttgcttggggtaagatgatcaatgcatgggggtaggtaccaaatccttatatatatataatttcaaaaagatcctgtcaatatatatagactgagcttaaggatgaacaggatgaagatttgtgacacaataatgcagggctgttgatgctttgccatgtgtgaagtttcagatagatcgattcagctagctgcctcccatcacggagcacggcatggacttcagccctcaaagaaagagcgccgaacgcaatcccggcagcttcgaacacgatgacagtgatgatgacttcggagctgaatccaccgcctctaagccgtctgcgcattcgcgcgacagcaacaaatccaacaagcccaagacgagccatggcggttcaacctacgcggcgacgacgacgacgacgacgccgatgccgccccaaagtagctccgaaccgacaggtggcgtcaccgcaggagcgacggcgggcaataataatgctgactccaccagcgtggacagcggcgggccgaggagcagcagcatggagagcagcagcagcggcacggccgcctcaggcacgacgccggccaacgtccggcgccacaccggcggcgacagccggtgggacgccatccagctggccacgtcccaggaagcgcagctgaacctgggccacttccggctgctcaagcgcctgggctacggcgacatcggcagcgtgtacctggtggagctccgcgccacgccggcggccttcttcgccatgaaggtgatggacaaggcgtccatcatcagccggaacaagatggcccgcgcgcagacggagcgcgagatcctcggcctcctggaccaccctttcctccccacgctctacacgcacttcgagaccgacaagttctactgcctcgtcatggagtactgcagcggcggcaacctccactcgctccgccagaagcagcccggcaagcacttcaccgagcccgccgccaggttctacgtcgccgaggtgctgctggccatggagtacctgcacatgctggggatcgtgtacagggacctcaagccggagaacgtgctggtccgggaggacggccacatcatgctctccgatttcgacctgtcgctgcgctgcaccgtgtgcccgacgctggtcaagtcgtcgtcggtgcactccaccgggagcggcggaggaggaggcgggggaggaggaggaggcggcggcggcagcggcggcagcagcgtcggcagaggagtggacgtcgcggacggcgacgtcatcaccgccaaccagggtggctgcatccagccctcgtccttcttcccgcgcatccttccccggcgcagccggaagccgtccaagagcgagctgggtctcagcggcccggccgcggtggagttcaacgcggagccgacggacgcgcgctccatgtcgttcgtcggcacgcacgagtacctggcgccggagatcatccgcggcgagggccacggcagcgcggtggactggtggacgctcggcatcttcctctacgagctgctgcacggctccacgcccttcaagggcgccggcaaccgcgccacgctgtgcaacgtcatcgagcagccgctgcgcttcccctccgacggcgcggccgggggcccggcggtcagctccgtcgccagggacctcatccgcggcctgctcgtcaaggacccacagaagcggatcgccttcaccagaggcgccacggagatcaagcagcacccgttcttcgaaggtgtcaactgggcgctggtcaggagcatgaccccgccgtcggtgccggacccggtcgacttccggcagtacggagccgccaaggagaagaaggcgtccgacagcagtacaacggctgccgtggaggcgccgccggccggaaagcaaaactccggcgagtcttacacggatttcgagtatttctaggacgtaccttactgtcgacatactacatattcttatacgacttccatatgattagattacatatcttgatcgaggtttgccaataacttctaacttgcgatcgatatacatacagtatcatgcattgatcttgtaatacaattcttccatgtaccatttgactgcaaactaaattttgtaaatttagccacgcaccttcttgtcatttaccattctcagcattgcagacaaaaaatattaaaattggcattctaatagcttgcataataaataagtcctggcattttgattgagaacaaaattgtcaggaaggattaatataaggtagtcacgcatcctgatcataaccatccttttctttttcttccccttatcctcttgtatgtaaatatattccttcgaacaacgcctttttttttatagctgcgttaaattggggatggcaagaaaattcccttttttgatagggcctagagccaaggacaaaggttaataagaca

SEQ ID NO: 3674 - DNA, 3718 bp, Arabidopsis thaliana
tcacacaaccaaaaacaatcttgaagtaaactggacataaaaatcaaaaacaaacagtctcgaagatgaaactctaaaataaaaaccgactgttaactatcaaatccctccggtgaaaagctagccttagacgtcaaaaagctttccacaaaatctagtgccaatcagaaaccagacaagaccacgatctcagttacaattcccgctggtcctaactcgcgtctgaaaaaacgtgttttacgaaactgcaaataactcaacgagtttaaatccaaattcacttttgtaaaatggagaatgacgatgaaagacgtggaaataactatactaaatttcgttacctttgaaaacgatttgatatgttaaaactgtttcctaccaaactctaacgattctgtcctttttcttctctttaagtggctaaccaaagccctaattccttcttttataggcatattttagggtttctattaactcaaccgattaaaccagacaatttaaatataaatcctaaccgattttatggttcacgggcgaggttaagttgttttattttttttattatgtgtttgtctttgtctagtttgttttcatgggctataattttctgcaaaaaatgtcgatttttgttttatgtaacttatgttgaagaggggaaaattccaaataagtacttcagtgtggagtaaaagctaaaatatctactaaatcttatttaagaatccaacaaaatttggtccaggccatatacttgcggtctctatgatcccatcatacctagctactccaagcctctaccataaaatcattatttatatttctgctgttctatagtttgtttgttttttctttttttctttaagcatatttaattttttgttagtaaaatgttctatagtttgttgatcgcaagacaaaaacttgtgccatatctgttgtattatgtaattaaggatactgttaagcctcaatgtccagggtctggggtatttggacatctcttggactccaagcgaggaagggaaagagatccactactatatttatatgttttacttaccatatcttggatccacgagggtaagagcagcaaaggaggacattttcctctctgctctcttcttcctttttttttgtttttgtttttgtaaatatgtgtgtggtaatcttatttctggttaaagtgtgttgtctcctgaaactctcaacgccaaatataactaaattattgtttgtattatttagttccatgttagtttttctactgtgaacatggaatttttgttaaacatttgttgatttggacgtttgtggaacgtttcaaagaaccgcttgtcaacatttgcacaattgcattctcttattggttaacacagtttccgggattctagaacgccaaaaaagcacagaaggtttaatacttattgttttgtctaaggagaaggaaaatgcgcaatactttcttaaaccttttgtaggtttatgaagtgtttgatttttcagataaaatgagaatcaagttcgatgtaccatgttcacatgtgactttgtactatttcgaatgtttcttggcaagtaatttcgaatccttttcgtaagtagaactaattccacatgtcacaaaagtgttgacttacctatagaaaaggcagaggaacacatacacacacacaaacgcttactaaactcaaaagtcagaatgataaggtcacaaactacgtgcaaaccatttcatcggtccccatctaacatcctaaaattgaaaaatcaaaccttatattttttccttgaattctcattttatttgaatatattttcgatctatagacacacattaatcatgatagtaaccacatgtcaaaatcttaggacaaagatagaaccgacatgtaagtcactacttttgccatgaacgtgcttaccattttcttttatattcctactacttatatctctatcctctccatattttttacccgtaaaattataaacccattttcaaaatctgatcttttttttttcgttgacaaatctagttatgcctcctccggcaatgcttgcgtttgacgatggtttagcccggaaatctaacgataatgagtggcaaggtttcagagtttttccaggagaaaatactaaccctaaccctaatataaatttcttggttaagaaggcaattctgcagaacgagaaatcaatcactcctcttttctcccgttcgtcggcaagagatgatagcttcagaattgtgttgccgccggcgttgcctcctcctagagactccaccgttccgcttcctatgcttccggagccgatgagagtccggaagaagcttagccaccaagaatcagtcatatttatgagcaaatcgcgtttcgcagagaaaatcctctacaaggaagaagatttcaaatgtaacgccttctgcttgtctctacctggcttcggaaagaacaagctgattagatcttcttcgaaacgccaaaattctatggagaagaagatgatcagagcttcttccttcacgggatcaactgtttctgtacgcgcctcgctagagaaattcgaatgcggttcttgggcatcgacgacagctcttattcaagataacggtcggttgtttttcgattttccggttgagatgacgaagtgcaacagccgcggtggaaatggaggaagagatgtgcaagaaccggtgacctctggtttcttattcgatagagaaacagagactttggctctgagaagcgttttaaagacgaggagtactcgtgatcaccggagatcagctgagtcttcaccgcaacgtcgtgttaggttctcgacttcgtcttcatcggcttcagtttcgtgccctacttcgcctcgaacttgtatcactccacgtttgcgtaaggctagagatgacttcaacaccttcttgaccgcacaaaacgcttgaataaggaaaacaaaaacagaacacagagttttatttataatatgtatgtatgaaatgagtgtaatgtatctacggatgatgtgtaaatattatggagagaaagagagtgttgagtctttgagaaatcaaaatcgataaagggtttatgattctaaaacaactcaaaaagtataatttttagtgtttgcttagaagctctatctccaatttttgagggtttgtttggctttgttgaatctttatgaaataaatttgaccaagagtagatgattatgagagtattttataatctatgtgcttcacttttgcatcgaagatctgttttcagactttaatctacaatttttagagtgtactcaatgaggtatcaaaatcaatgaaatgatggttactagagtaattgcaaaaattcatgtatgtttccaagctctgtttgtgacttgccttttcaggttttaaggtttatttttaggctattttccgttaatttttttggttggtttaggagatcaaaaacttcataaaactggacaaagtgttggtaacataacctaaaaactgtataaagagagcataatacgatattcagacccaaaacgccaaataacgcaaactcgataaggaaaagagggtttaatgggttagtgaattcttcagcgttttcaaaacggttgatttcagtttcttgtatcgtagatgacacgaacaacgtcaacaatctgagctctgcaaatcggacatttccctccactccaatgtagttcgttggcacatttt

SEQ ID NO: 3675 - DNA, 6201 bp, Sorghum bicolor
tagtttatacaaagctccatttctagattccacgtcgaagtaccaaaatgccacgcacccccacattataccgaggtgtctaccaaaaacatggcatgccaaaaacgtcaacggctgcctctgagtggctcaaaatatggcggttggttgtcgtgctgtcaagcccaaccctgttcatctcggtttcgcaccactcacaatcatagctaggatggactccgatgcctaaatatttagaaattacccaatatatgtatctaataaacaaattaatatagatatctatatttaaaccaattctaatatgaattttaagtaaacatctaaaattcatttttttttttaaaaaaaatggtattcaattttagaccaatattaaaaaaatatatgaaatactcctatccgataagatcagtatatgtgaagaataaagtagcaagtgaaactatatttaaaagttgtacctaggactaataactaatggtaaattatattaattataatatcacatacgactaaactttttaaagtccatctctatggataatgacataatatataaaggttaagtttaatcaattttaatatggttataattatgttaagtttaaatagtttaaagtatttatttacatattgaagattgatttatacatttactatattgatgaaaatatttatctatactaaattatttatttaaatctttgttttcatttgatatacttcagaaaatagaaatatttattaataaaaatgttgcttctatgcatcatctttatctacatgtgttatatactataactatataatataacttaaaattcctacatatataattatttgttttattaatatcatcaataacacaaacatattgttctttacaatcaggtagggatctgaatgtgaatccaaattaaaattatattttttacttacagtcaaaaacatttttatccacatttagttttgaactaaaatacaatattttaatttctacatgtataatattttttattaacataatcaataaaacaaacatatttgttctttacaatccgttaggtatctgaatgtgaatccaaattaatttatttatttacattcaaaaatttttgtatcacatttaatttcgaattaaaatttaatctctctattctaaattacaaaccgtttgaacttttctaaatatataatatttgttacacagttaaatatacactatatttaaacatatagtaaaagtaatgtatacagaaaaaaaccaaaatatctataattgagttaatctcaaattcatcttgacacaagtccattaatccgtgtctccatccgactggcagtcgttgccgcgcgccacacgtcacgtgacgctcgcgcaggagcgggccccgcggcctcctcagcgacacgccccgccgggccgccgtcctgtgtgtcgtgacgccccgtccacaggtccagatccatcccgccccgcacccgccccgccagttctttacccgcacccgacgcacgaagggacgtcacgtggccagcgagccacgcggggccacgggtcggtaactcgggcagcttggcggcccgtgcgagaatcatcatcatttttccttttttccttcgcaacccccccgcgccgccccctcggtccaactcctccaacgcctccaggctgtcgtctcgctgcgtggggcccggcggccggaggcgcccgacgagcttatcgccaccggagcggcaccgggcccaccatcacagcgggaggcaggcaggcgtgcgggccaccctgacatgtggagcaggcagtccggtccccacacgtcgtgacggccttgaattcgtcgatggctcagccgcccgtccgtctgccaggtgggccagatgaccacatgcaccgcgcggccgcgcgggattagggctgccacgttggcgaggacacgcgtcaccatatgattgggcagcgggactcggagacggcccttttctagaccccaggcagcgccgtctcttcgcgcacccccaattcgaacgccggagctcgacgaggacgacagcacgcagaggtacccttcgtgctccccttctcctgcgcccctcggcttctcctcctctcttgattttgggccgccgctgcttcgatcccctttctccactgacgctctgcttgtttttgcggttggatttatgacctaaacatctcgtttccgcaaggggttggggcgcgtctagtggtggttgggtccttttagatcgagtaggagcgaggacgggatccatgcccgcttgatctgatgttgtacgcgtacggatccgtcaaaagcctgtactccagccgaaccagttgattctgtgaagtgcttattaagcggcggggttttaccgctggaagttcgtacttaggtactcagatctggtggttttcaaggttagaggaagtgttggaagctaatagacatgcttttagctaggtttagttgtggttattgtaggcaaaattcgcccagcagatactgtagtagcctctccttttcaaataatgttaaatttgccgtgactagaacatgaatttccttgtttcatgctgagagttgtgctgtttcctctgagaaattcccccgtctgaatatgactagctggagatctcgactagctagtagctattcgtgccactgatcaatgaagtgttgtcccatatattgatgtatgttaatcgtgcgatgaagttagctcactgcttctcacaaccctgcagatccggcctactgcaagttttgaaaaccgaactgtaagatggcatcagcagagctttcccgtgaggaaaatgtgtacatggccaagctcgcggagcaggcagagaggtacgaggagatggttgagttcatggagaaggtagccaagactgttgactctgaggagctcactgtggaggagcgcaacctcctgtctgttgcatacaagaatgtcattggagcccgccgcgcctcatggcgcatcatctcctccattgagcagaaggaggagggccgtggcaatgaggaccgtgtaacactcatcaaggactaccgtggcaagattgagactgagctcaccaagatctgcgatggcatcctcaagctgctcgagtcccaccttgtgccctcttcaactgctcccgagtccaaggtcttctatctcaagatgaagggtgactactacaggtaatatgattatatgaatcccaataagacttccatttgctttgggattgtgttttcgtttgactgattcagttgtcatgattagataccttgctgagttcaagactggagctgagagaaaggacgctgctgagaacaccatggtggcatacaaggctgcccaggtgaacattttttttaatttattaatcagtgtgcaattttgtttgtgatgaaacattatgcttgtagtttttttttcacatcattattacaagtttgctgaaaaggggtttgttgtgcattcaggacattgctttggctgagcttgctccaactcaccctattaggcttggactggcacttaacttctcagtgttctactatgagattctcaactcacctgatcgcgcctgcagtcttgcaaagcaggtttgtttttcagcatttgctgttttgttagtatattatctatgtggatgtgcagtgcttgtgtggggaattgctgatctgtttttgatgatatgctgtacttatgaaatgacttagaccattgttaattgagcagtaaggggaaaatggcatatagggaattagtgtatcacaatatgatcactaaaggaccatatttgctatgttgcctttttctccttcgatgcatctctagactcgatgctgcaaccctttactttggtgagaattttaagttattttttctggtgtatgaactatgaagccctccagatattagatattaaaagtttaaaactgcatcaatgaaaaatactactccctgtatttttacatacatatattagttttgtcctatgccaaatatttctatctttgagcaccattttttttaaaaaatatatataggctaacaacaaaagatttatgtttttagattcactatgagaaatactttcatagtatatgtggttcacatgttgtgaaactacctttttttctgaaaattgttggtcaaagttagaaacacttgaattaaggcaaacctaatacattgtgcaaaaaattgagggagtaattgtttttcgatgtcacacctgcagttataaatgtgttctttttatacatggattggttggtgcacaagttgtgatatggacaggaaacctaacgttttggttcactattctgtcattgacttatacaacaatggaaatttcttggaaccaagtatttttgggagacaacaccttttaattgcagtcaactgttgtgctgagtgtgtgcacactagagcatcctattgggtgtacctaaccttttgttattatgtcctttggttggctgctactttgtattaagctattatctgcaatgaatttaaatatgtccttgaacagttattcaaatccttttagatcaatgtcaaattgactttaggaaaataaaatattacagtatattctgcacttgttgaaattgtttgttctaatagtttaggttttaggtcctcagtggctcacaaaaagttgggcattaagcaatattggtattctccatttttttttttgggtatatgtatttggtcagttttgtttctgtgagtagactttgcgtagtttgtcatgccattaaatcgcaatgtgtttgatcttctcaaatattgtagctagctcatgcgcttgaatgttttttttaccgtgtctggtctgaagtcttccacaactggaaagaagaatggacatcgtaattgtttttatagttcgtttctttgttgagagctgagaccattgacatgtgaaagacatcatgctgatgttccctcctgggcaatttgcaggcttttgacgaggccatctcggaactggacaccctgagcgaggagtcctacaaggacagcactttgatcatgcagctcctccgtgataacttgaccctatggacttctgacatctcggtaagatccatgtccctaatacaaagttctgttcgcactcttgaattggatcttcctgaaatcaaccttttcctgaacaatcgcatttccctaatactaacttgaccctatggctgcaggaggaccctgctgaagagatcagggaggcacccaagcgtgactcgagcgaggggcagtaaagccggctttacgtgcctagaaactagtagctagtgtttgctgctgtctaatgacactatgcaatgtgatctggaccctagtttcttgggtgcgacccttgtagccgtgttatgattattgtcgggaaaatttgggggctccccatatgagatgctgccgggcaaggcctcggtgtcccaccttgtttcaggcgggggcactggagccaggcctggttgggttgggaagccctttaaactgttgtcacttgcattttaccttttcatcgctgtttattgtgagtggtcctaaatcaatggctggtctctgtggtcttgcttttttgttctcttgattccttacagggtcagtgggacattcacatttgtctgttccattctcaatgatgaacgcgttctgtttggtgactctagaatccgtaaatcgctgaaatctagatgatctatctaaacacttggatcaggctaaaattctagatctagaaatctgtacagacgtacaattcaggatactctctgtctgagttgaatattctttttgtgagttgtgtagtaggactaaaaagagatcaaattgatatagcgattccgtgattcgtttcatacacattgagtgcctttgagcctgagcgagtcatatgtcgctattccatctttttaaaaggaagttctcgacctttgagaagtcaattagacttcagtttaactaggtctttgtatacaaaaatatcaaatttatatatatcaagtaaatatcattagaattgtcatgtcatatatatttttatacgtagaattggtttttttttttgtgggggtggggtgtaggtagtatcctaaataccattgttttccatatactttattattagtgtaatgaaatactcactctatcccaaaataaggactagtttga

SEQ ID NO: 3676 - DNA, 6801 bp, Sorghum bicolor
attgggacctaaatttccctacttgagcaccattggagcacaaatatatttaggcttaagactagatattgagtttgcattgaacttgttagcaaggtacaatattatcctaatctaaagacattgggttggtatcaagactgtcctgaagtacttattacaaggtacaccagacccttgggttatgattcctgaagaaccaagaccaaataatattagggtatgtggatgttgtttatacatctagcccacataatatgttagatcctagactagtttgtgttttctctttgttggtacaaccattttatgatggtctatgaaacaaactttggttgttactttaaccaactacttgagataatcgcgcttataggccacactagaatgtgtttgacccaaatagatgatcagacacatctagaaatcatgtgacctgggtcttaacacttcctcaaccattatctatgaagataatgttgtttgtgctacataacacttcctcaaccattatctatgaagataatgttgtttgtgctacataacatatatgggccacatgaagagcaatgtcatagagcatacttctccaaagttctttttatcccgcaagctctagaagagtgagataaatatcatgcaaactaagtcatgtgaaacatcgcatatttgttcagaaagtctttgtacacctttagccacaaatgtaaacatggaattggaatgagatggcttaaaagcgttacaaggttcatgggggagagaacctttgaagccgcatacccatggttgtgatcatgaagatcacaagctggcccataaaactaatcataaaacctaaattacgagttggttctgaagacgtgaccctaaagatcaactgttatatactatttctttcttagtgtttttttattaagctttctcacgcaaggttttttaacgagataacgggtgtaacacagcttgcacaatctactcttttcttttatcttttcaataaattttttaagacgggaagtttttaatgagacatgcacaaggcgagagatttttccaaaggggagtgtttgtaaatcatgtgtgcacacttcggacgcatatgtgtgcaatgggggaggatgataaacgataagtgggagaagaatctagatggctctactactcatcctaaatttatgcaatggtccatacatacgttaattgcatacacatgaacatttgtcatgaatccatgatagttgcccacgctatcctaccaaaaacagcccctattgaatgttttttctcccacttgtagggagtccatggtccttatcatagaaccagaaagtccacttgtggtaattaccaaattacatcgttgtcataggatggtcgttaaccagatctgtatagaagtcaacttgccctgtcggatcctctaggtgaaccagaacatctgtgttgtgacttgtgaacccttatgcttgagtttcaagagaggtgatcgagcactctctgttggcaaggcttaaataagtttggaggctaaaattatgtctgttgatgggaaaagggggcatatgaaatacataaatccgcctaacttgcatatggtttttcacaaaattcctaatgctttatctcgaaggagattacacaaaagcgagtacgtaataaatatctgtctcagcatttttcgcgagcttccttaccttgggaacaagaggtcaacactatgcacactatcaatagtctatcatacatgtgtcaattttgaaacataaaccagagaaaaaattgataaagccgtatcacctacaacttgggggtttgtaaagcccacttctacgagttcttaaaccgagctcacatggccacaacttatgttgcgattccggttcacattgtttgctatggcaaggattggagtagtggacttgactttgattgcattgatgatagggaagagtggcatgtcctcgcccagtgcaacggggagctcaatgcggagagcaatggtggcacggccttgtttactcctgcttgtccttaccgccgccactgtggtagtacttggagttcatggcgaggagtcgccgtctagcacaggtgatgagctctgatctcgttcgctctaacattcatcaaaaagtaagaataattcgagctattccgttgattgatactatactgatggtgtttgtgcatggatgattgagtccgcgctcaggattcataagcatagactgcggcctcccaggaaagagcagctacgtggacagcgccaccaagctgccgtacgtctccgacgttggcttcaccgacgccggctccaaccgcaacatctccgccgagtacatcaacccgtccttcacgaagcgctacctcaatgtgcgcagcttcccggacgccgcgcgcagctgctacaccatcgggtccatggcaccggggtccaagtacatcttccgagccacgttcatgtacggcaactacgacgggctcagcaagcccccggtgttcgacctccacctcggcgtcaacttctggcagacggtgaacatcaccggccccgacgttccgttgatcgccgaggtcatcgccgtcgtcccagcggactcggtgcaggtttgcctcgtcaacactggcaccgggacgccgttcatctccgggctggacgtgaggccggtgaagagcacgctctactcgcaagtgaacgcgacgcaggcgctggtcctgctcgccaggcgcgactacgggccgagcgggttcgccgtgatcaggtaccccgacgacccatacgaccgcacgtggtttccgtggagcgacccggaggagtggtcggagatctcgacggcggagggcatgaggccggtcgtagttggcagccgattcgaggtgccgtccgccgtgatgcagactgccatcgtgcccctgctcaacgcctccgccaagagcatcgacttctcgtgggacgccgagcctagccacgtgtatcccgaccccgggtaagggtaatggaccagtaaataatgccttctaaatatatattcaggactgactacgtatatttatttatttttttgctgatcgagttcttcccatttcttctacagctacatttgtatgttgcacttcgcggagcttcaacgcctggacagcaacgccactcgtcagttcgacgtgatagtcaatggcattgcttggtatcacgcatacacgcccatgtaccttacatccgatacactgtacagcaataggctacaccatggttccaacagctacaacatctcattaaaagccacggcgaactcgacgctgccaccaattgtcaacgccgtcgagattttcaacgtcatctccatagccaacgtggccacagatgttcaggatggtaagtaaagtttcgtgtagtctattgatagtgaactctgatgagtagcagctgtagaacatatggcctgataattgctactgtctctctgtcggtctgtctatcttgtattgttttactgatcaaaacgacatatagttgctgccattatggcaatcaaggccaattatcaggtgaagaaggactggatgggtgacccctgcgttcccaaggcactttcgtgggatggattgagctgcagctttgccatcttcagtcctccaagaatcgaatcactgtaagtttcattttacaagagaaaagagtccaattgtgtaggcagtaacaccacagtctgacctctgaacctttggatgtttacacagaaacctttcgttcagcggcttgagtggagatgtatcattttactttgccaaactcaaatcactcaagtatttgtaagtacaagtttccagtcacattatttttgcagtgaattttagtgagtgaagataatttttgtgcttctgatatattttcagagatttgtcacacaataagttggcgggctcaattcctgatgtcctttcacagctgccatctctcatggttatgtgagttattctgatccatgatgactttcaacatccatggtgactttcgtctgtgctctcccaaaattgacaaacgacatcaatacattttcagtgatttgacaggcaaccagctcaatggatccatcccgcctgggcttctcaaaagaattcaagatggctcgctatcactgaggttaatgtgcatcaagctattatctattttttctaactctttattgttaacccaaaataggggtgtgtgtgggcgtgagtacgggtgtggtatgtgagttcctgcctgcttctggccttgtacactccaaaaaaaaagaagtattgaagttgctaattgattgctcattgttccctttaataggtatggtaataacccaaatctctgcagcaacagcgattcttgtcagtccgcaaagaagaaaagcaactcaatgctagctgtctacattgctgttccagtagttgtgtttgtggtagtaggaacactagcactactgttcttcttcatgcgaggtaagaaacttgatactggcattaacacacgtaaatcgttgtactactctgtgcatctgtgacaagtgtaagcaataatgtcatcgaacggtactggttcgactctgttcttgctacttgaactgtcagtaaaaggcagtgtggagccgggcaacaacctgaatatcaagaaccgtaggttcacgtacaacgaagtgaaggccatgacgaaaaacttccaactggagctcggcaagggaagcttcggaaaagtctacaatggctccttgaaagatggtactcgtgtggcagtgaagctgctatctgaatgttccaggcaaggtgttggagagttcctggcagaggtaaaaagtacctgctttaccaagtctattcgatacaccaatgtgaaggaagtttgaagagaaatcgggaggtcctagtaaattacttcttgttgctcaggctgagaccttaacaaagattcaccacaagaatattgtctccttgatcggttactgcaaggatggtgggcacatggcgcttgtctacgagtacatgtcaggaggaaccctggaacacaaacttagaggtgcgctactccatcttttttttaagaaaaaaaggagctattccatctgtagcagcatcttaaatttccctctgaagctattcttctgatgaacttcttcagggagcgacgatggcagcactggatcattaacctggaagcagaggctgcgcattgcactggattccgcgcaaggtcatagatgtcttgtgcatagtagatatagatcatgtaatattgcaagctgcagctgtggtcgttgcctgacgattgatccccatgtacttgcagggcttgagtatcttcacaaatcgtgcaccaagcgactcatccatagggacgtgaagacgtcaaacatcctactgaatgacaaccttgaggctaagatcgccgattttggcctgctaaaggctttccatcgcgatgaggacacccatgtatccaggacaagggtggttggcacgctcggctactttgctcctgagtacacatgctttactccacctgttccctctaatgagttgtttcctactccctccatcccaaattataagtcattccaagattcttagagagtcaaagcatctcaagtttaaccaaatttatttaataaaataataatatttatgatatcaataaagtaccattaaattctttattaattatatttttatagtatatctatctgattttataattttttgtaattctttctatagttttggtcaaatttaaaatgctttgactctccaagattcttggaatgacttataatttgtgatggagggagtaccatgtagtaatatgctttggaatatgttaaagaaaaggatttaggagtaaatagcaccagtattttctttgtcagcacacatttccaaggatcttcgtgatgtaactcagacaatttccatggcttgtatgaacaggtatgtggaagctcagcgtctcaccgagaagtgtgacgtgtacagcttcggcgtcgtgctgctggaggtgatcacagggaagccggcaatcctagagtgcccagaggccactaacatcaccatgtgggtgctgcagcgcctcaatcaacaaaacatcgaggatgtggttgatccacgcatacaagatgattatgatgtcaatgttgcatggaaggccgctgacatcgccctcaagtgtactgagcgtgctcccgaacaacggcccaccatgaccgacgtggtgactcagctgcaagagtgcctcatgctcgaggatggcggcggcggaagagacgccatatagtatcactgcgtccgtgatggagcatataaatttaccagcagcaacaacgggtcccttcgtttccgtcttgtttgaatatatttctgataatttttcaagttagaataatgttgtttgtgtcacacgacgtgaaagcacacaggtgaagagaaggcacggtattacagataggtgaagatcatatagatcatctgccgattgcataataactcatattctgcagcaaatacatgatagatggagcctccaggaagtagcttcatcaatggcgtttctttattacacgtgctaacagggtcatatccgtgtggcccctatacgcaaggcatatgcataacaactaacaagagcaaaactcattgcgtcgccaagctgcccaggcacctgagctcagaaccattgtagtagtttctgtacacagttgtggtgcaccagcaatcactagatctctccatttgaagaacacgacgaagattgatcgaaagacctcgccacgcgag

SEQ ID NO: 3677 - DNA, 3858 bp, Sorghum bicolor
tcttgggtgtctctaaggccaatgcgacgcgtccatagtttctatgagcgtcctccccttgctgaagtggcctttctaccgtcggcttctcaggagtccctgactatacctgttgtgtttcatttccacttgctttggtctattctgcagttgttgatagagcgaatctaggatattatgtcactggggtcaaggactaaacaacggggtcaacacacatgttaattctctatttaaaagaataatttgcaggtcgattaaagagctttaagtgaatttttggcaagttatcggggtcagctgaccccaatgaatacacatagattcgcctctggattgttgaccttgtccgcttggtcatcgttggttatcatagtggttgcttagctactattgctgctctcttggcagatgctttgccgccgtttagttcgttggcagatgctctaatttgctgctgattggtttgttgatggatgctttgccaccctgtcgtcgacctcctttctactagttcatttgctaccgagactgatctggttcgttggcggatgctttgccgctgttttgttcgttgacgaatgctttaccgtcgttgttgttggacggtcctctgtattgacgaccactacattgttgcattgcaggcacagttttaggttttgggtcttgaggatagtcgctctcctctttgtatctttgttgttcctatatttattctagattactcaatattatcttagtggtttgtaatctatgagggttttcttatagctgacttataattcactccttttaataaaaaagtgggctatatccccaaatcgtgaaaaaaatagttaaaggggtgaagtagattttttttctcaaaagaatattgttgaatgaatgacaggactttgatgatatcaagttatctgctcctgaaaacaactgctcaaaggactatggccttgtttatatcaaaaaaaaatttagataccgtagcatttttgtttttatttgacaaatatttttcaatcatggagtagctaggtttaaaagattcgtctcgcgatttacaggcaaactatgcaattagtttttatttttatctatatttaatggtccatgcatgtgccgcaaaatttgatgtgcagaaaatcttaaaaagtttttgatttttagggtgaactaaggcctggtttagttggcaaaaaatttagatttcgagtactgtaacactttcgtttttatttgacaaacattgtccaatcatggagtaataactatacttaaaagattcatctcgcgatttacagataaattgtgtaattaatttttattttcatatatatatttagtgctccatgcatgtgccgcaagattcgatgtgacggagaatcttaaaaaaaatttggtttttgcggtgaactaaacaaggccatatattagtgtgctgtgtttccccctacgaagcattgtggagtcgtgcttgatccacgtcgtttgatctgggcgaggtgcacaaacgtcacatggctcttcttgctacttcagtgcaaagggagtgtatgcatgcacacaataatgcggcctgcgtctgtgtacggtagaaaaatactttatacaggatatgcaacgacgtgaatgctgcacctgccccctgcccctgcccctgcccgccctagtagctattcacggctctatccattccattgccgtgcgtcaacaggtccagactggcccgggtccaagcgagtgaccaacgcgggaagcctcccgtccctccctcccccacatgggacatggctgcctgatgaatgcctctcgccgcactgcccctgcccctgcccctgcccctgccctcactccatcggagggcggcggcttcacgagagccgagcaggacccagacccagcgggcatccgaggcccccacccccacccccaccccttcctccgtgtataaaagcggtgccagggtgagcgtctctcctcacactgactgcaccagaacaagagcttgagagtgagagtgaggatgatgggtggcaaggccgctctgctgctggccctggtggccgtgaccctggccgtcgtggagatccaggccgacgccggctacggctacggcggcggctacccgacgccgacgccgaagccgccggccaaggggcccaagccggagaagcccccgaccaagggccacggccacaagccggagaagccgcccaaggagcacaagccgactccgcccacctacaccccgagccccaagcccacgccgccgccggctactcccaagccgacgccgcccacctacacgccgagccctaagcccaagtcgccggtctaccctcccccgccgaaagccagtactcctccgacctacaccccgagccccaagcctccggcgaccaagccgcctacctacccgacccccaagccaccagctaccaagcctccgacacctcctgtgtacactccgagccccaaaccaccggttacaaagcctcctacacccaagccgaccccgccggtgtacacgccgaaccccaagccaccggttaccaagcctccgacacacacgccgagccccaagcctccgacatccaagccgactccgccggtgtacacaccgagccccaagccaccgaagccgtccccgccgacgtacacgccgaccccgaagccaccggctaccaagccgcccacctcaactccgacgcaccctaagccgacgccgcacacgcctatccccaagcccacgccgccaacctacaagccggcaccgaagccgacgccgccggcgcccaccccgccgacatacacgccgccggtgtcgcacacccccagctcgccgccgccgccgccgccgccgccttactactagacgaagaagtgatgaggtctcccactctgctgtcagtctcggagcatttaggtacgtgctacaagaatggagcatgcacatacatacatacatacatacattttctatatatgcttgtgtcaaatgtatcatactgtactcactaacaatcggttccgtttttttgtgttgcagaaggtgatcgatcgaagagtttgtgtcctagccagccggccaagatgagctgctgatgatgatgagaggcgaggagcgagtcgtacccctccctcctctgtggtgtgctgccggccgatccatgcatcatccccagctgcaggagaaaaaataatgcagagctctgctgctccgtctgtttcctgtcctcccgtgtgttagtttttgtgtgttcgtccatgtgttagcaggtgtatttgtgtgggtaatggtattgcaactattggtgtaaaaccataataaaatgtggaaatatatgcaaggaaaaagcttgttctagttctttttttttgggtatcttctgcagtctgtcgcaggctcgctgcaccgtatggccttgagtcctctcgatgctactgtagctctttccatcgatgacgtgactagatgtgtggtcacactgacacctctacagtaaggccttgtttagttcttaaaaatttttaagattttccgtcatatcgaatctttggtcgcatgtatggagcattaaatatagacaaaaataaaaactaactgcacagtttacctgtaatttgtgagatgaatcttttgagcctagttactccgtgattggacaatgtttgtcaaataaaaacaaaatgctatagtaccaaaaacaaaaaattttgcaaactaaacaagcctaaaaagatcggccaaggtcgcggcaagcatgttgcatgcatgcatgcaatgcaagtctgcggctgcggcgacgtgaggtgtcgtcacgcgctgcgactacggtctcgctcgacgcgacgaag

SEQ ID NO: 3678 - DNA, 4351 bp, Sorghum bicolor
gagattgcgtaatctgggttcagaaaccagacctgactgaaccttacgcgcataggacgcacgcccaatagtctaaaattgttaccaacacgtcatttggcccacaatgcatgtgcaagcttcaaattatttttcccagattacgttttacgagctccgaccggggtcaagagcagcatccacgaattgcaccgcggccaagaaattcggggagcaagaaaaagtaaactactctacccagagcaggatccatcggagccagtgtcggtcggcagaacggaaccgccccccatcccccttttgggatctgatgcggcgaatccggttggcacagcgtgggcgtgacctctgctccagctgctgcctgcacattcacaactgctcctgccgcgcgagcccggcacgtcacgctcacgcctgcggcctgcggggctcggggcgccagcggccgtggccacgcggccgccgtgacgccgggccaccgacgattccgccggcgcccgcacgtttgtctgcgtgggtggagcgccggccgtcccggtccggtttttcacgtgtcggtcgcctgctgccgcggcccgcggcgctgtggcttccgcgcacctgtcccttggatccatgtgaccttgcctctttgcctcgcaggtgatgatgacctcctcaacaggtgtactaaaactaaacaaagcgcataggcaatgatataagcggccagttgttttttttttcttcgttcacgatcggagtacatactacatcgtatgacaaagtccaagacagaatgtaggtcggctgaagtccagtggtgcttctgcttcgtgtacagaagtacattttaatgtccttaatttctaggtcaactggaatctgcgaatggctgacttcgaaaatgtatttgttcggagagtctctgctcttgagtttgttgtcgcaaagtcgacgctgctaaaatcgtactagtacgtcgtgcgtgcattgtggtccatcaattatagctcggtggttagcgacatgttgttcgtcagtgctaacatagcacttacgcataccaaatgctggccttgcccatgacagtggtaaaaagaggtgacgggatgctctcaagttgaagaacgctactgtacttgctgatgtcaagacggtgtcacctgtcacggtgtcactgtgcaagcctgccactgtcacggcacaagatttcaactttgcggtcacaatcgtttcctgtttcgaaaggcgggcgtcagtttctggtagcacaagtcgcagcaagacacgacacgagcacggtccgcgtgccacagctgtagaccaccgctccaacgactgacgccggtgaccggaaatctggagcaaaattggccgatgcccgggtagtctctgcagtcacgcatcccctcccggttcgcacatattcgttgcttgcttcctccctcccgttctcgtcccagcagccaccgccagccacgtccaaaggcggccgcggctacgcgcacgccactactgccccacgtcccgcgcaaccggccggcccaacaccgcaacaccgaacacggccgggcgccacgtctcggccgtccccgcctccggccataataaacgcccgtcttcaaacgctccaaatccgaacaaggatacaaaatcccacgccggccggacgctaaccaaagccgctcgcgctcgtaataagccccctcctccctccgtcgtccggagcgcccccgtaaagccaaaccaaaacctcccttttcccctccgttccgccccccacccccacctctcctccccttccccggtctcgcgcgatccgccgatccggtttccccgcgcccggtcgcggagcaccctcgtcccgatcccgccgttgtttcggcggcccggtccgttcgtcgccttgttgccgggcggtctgccgttgatgcggcgtggcagtggcacggttcctgtgctgtgaattctgagaggtgtcgtcggtgcggtgttggctggcgcggcggtcttccatgaggcggcggtcggtcctgccgtcccaccacgacgacatggagaagggcggcggcaagccggcgtcgtcgcgcctctgcttcctcgccacgctctgcgccatgttctgggtcctcatcttctacttccacttcgccgtcgtctccaacgagccggccgtttcggcggcgcaggccaccggtgtccgcattgaccgctctcgcatccacattcccgaactcgacggcgcgtcccgcgtcgacgttcccctcgccccgcccgcccgcgcgtcggagccaccgccgccacctcctgtcgcgcgccccaaggagacggagacggagacggagacggagacggagacggaggcggaggcggaggaggagcacgccgcccaagtccgccgggaggaggcgccgcccaaggttgcggcgccgtacccgttcgagcgggcgctcaagacggcggagaacaagagcgacccctgcggcggccggtacatctacgtgcacgacctgccgccgcggttcaacgaggacatgctgcgggactgcgagaagctcagcgtctggaccaacatgtgcaggttcatgagcaacgacgggcttggcccgccgttgggcaacgaggagggcgtcttctccaacaccggctggtatggcaccaaccaattctccgtggatgttatcttcggcaacaggatgaagcagtacgagtgcctgaccaaggactcgtctatcgccgcggcggtgttcgtgccgttctatgctgggtttgatgtggcaaggtatctctggggttataataccacgacgagggatgccgcgtcgcttgatttggtggagtggctgatgaagaagccggagtggagtgtgatgggtgggcgggaccatttcctggttgcagggaggatcacttgggatttcagaaggttgacggatgaagagtcagattggggcagcaagctgcttttcttgccggctgcaaagaacatgtcgatgctcgtggtggagtcgagcccgtggaattcaaatgattttgggataccatatcctacatacttccacccggccaaggacgctgatgttttcctttggcaggatagaatgaggagcttggaacgcccatggctgttctcgtttgcaggcgctccacgtcctggtgatccaatgtccatcagagggcagctcatcgatcaatgcaggagctcaagcgtttgtaaattgttggagtgtgaccttggggagagcaagtgccactccccgagcacaatcatgaagatgttccagagctctctgttctgcttgcagccccagggcgactcctacacaagaagatctgcctttgactcgatgttggctggctgcatacctgttttcttccatcctggttcagcgtacgtccaatatacatggcatcttccaaagaactatacaaggtactctgtattcatccctgaagatgacgtccgttctagaaatgccagcattgaggagagactaaagagtattcacccagatgtgatcaagcaaatgagagaggaggtcatcaatctaataccaaaggtgatatatgctgatccaagatcgaaactggagaccttgaaagatgcatttgatgtttctgtagaggcaatcattaacaaagtgacaaagttgagaagagatatcatcgcaggccaagaagataaagattttatcgaagagaatagctggaagtatagtctgttagaagatggacagcggacaattggacctcatgaatgggatccattcttctcaaagcccaaagataaaggtggagattctagtggttcatctgctgaatctgccaagaattcttggaaaagtgaacaaagaggacatagttgaaacatgagtttctcgtctttgagatgagatcaagggagcagagttagcgatgctctctgaagatgctctgatgcatatacgttgcacataggtcaagatccaatagttatggtgatcatgaacatcattgatgatctatgtcaccctacagttgtatgaagccattccaccaaaaatgctttggggaaatttggaacacagcctttgcgtacccaccctctataaataccatttttcacactgattttgctgttttttgctcaataatcctttgtaagcccttacaggatttagaggtatatcagtttttgttcctatattactttgtttgttttgctgtgttcaaacttagagctatgtgttttagaatttgtggatattactaacaatttgttcacatgttcaatatgtaatccaagaggggcatatgtagacatgtttcctcatacatgctgctttcatattgcactgtatgctttaaaaggaagaggtttgcaaat

SEQ ID NO: 3679 - DNA, 6392 bp, Sorghum bicolor
acatgcacaaatggatgctctatttactttttctagttttctcaggaataattcagcaggtgctcttgtgggcaactagttactggagctctttggcagggctcctgtatgggcttcagctctggcttgtagcctcgtacaggagctgtgccaaacgcctgttttggaaagagctttgcatggggagctagtcaagagccagagccattttttgcctacgcaagaaaagtctcaaaaacgagtttcgcgtggcttcttgctaggttcgcatcatctagttccgaatgagccattttgtcaaacatttttcacaacggctttagcttctccagaggagctgcttcttcagaagagctagagccgaagccatttctggaggagccagagccctaccaaacagctaagtcaaaaacggcggtgtggtatactccttcaagtttttttcttctttctaaacaaagaataattcactgaacatgcaaatggcagcgacctttttttgcccccatggtacaaggggttaaggcttcctccggcggtgtttgctcttttttttgttggtgtccagacaatacgcacttttgtcattatttgactatagaaaaaatatataaattatctgttctttaattgtaccaattgattgtacagagattgctacctacaaattcaagcacatggaatatttttagcaacaataaagaacatagtataactagtagctagatatctaataatccacgaaagaatgtagttttagttgcattctttgttaaggcgtctaaatattgaccaaatatatatacatatatagatataaatattaatgctcatgaccccaaataatatagtataaaaaatatctcacgataaatataataacacttatttgatattataaatattttttttatttatagttagtcaaactcgagacactttatcttggtactatgccaaaattgcattattttgtggatagagagaccgagggagtagctaataagttatttggatctacctactaataagttactaataggcacgaagtagttggtatctattggcaccttttctcagaatcacgcaaaacttttatgcgtctttgtatcaaggaagagaaaaaatttaatacaacacgccttagtggtgcccccagtgatcagaaaagttgtatgtggatgctcatatcctccctagtgtactaaaaatgtatctcacctattagtagttctaaaactatacttatagaattaatatttagcaactctctaattaatagttagtagatacattactaggacttttgaatgcattagtattaattttagccactgattactagcaccaatagatcaaatgaaccctaagatactacccctttctaaaataagtgtcattctcgcttttcggggagtaaaatgtttttaactttgattaaatatatatacaaatattaatatttatattacatgattagtatcattagatatatagattattgaatctatttttaataaagtttttatttagagatacaattattgctaatattttttctacaaacctaattttaaaaggattgacgtacatggatacctatagcgacatttgttttgggacgttatggataatgactcgcggttccaaatgtcaatggcgtggtacaaaatgtcaaaaaacgatgcccgaccaaatttcgatagattgaacctgaacacggcacttctttgaagcatcaataaaggctagtcgtagcctgaaacaaaattccttaaacaaggagccctttggtgcaaaagtggcggtaccagaggaagtatataaattttcgtatccttttgcctgccatttctgccgcgcccgctgcctgcctgccgctgccgccccctgcttccacttctttcccctcctcgtcaagctcccctgaatcgcggcagcagcaccggagcagccaggcgaaggattttccccgctccgaatctacccggctccgcccgatgggctcgctgatgtcctgcctctccgacccctgcccgtcggggaacaggtccccgccgctgcaggcgaagcggcgctcctccacctcttcccgcggccgtggcgggagagactccgccaaggcctccgtgtcctttgacgaggaggcgctggccgcggcggcagcgctcgtgctggggcagaggggcgccgccggtggcctgggggcattcgagcggtccgcgtcggtgcgatacgctgccaagcgccagagccagggcccgccactgccccggagcagcagcacgcgtccgaggtcgctcgctgaccccgagctccaaccgcagcagctcctcgccaaggtgagaaccctgccatactactccttcctccatagcttgcctgcccctctcggcctttactccccattacttggtttggttggtcattggtgtgcgtgccgccgcgttgaattctttgtgcagtctcgtctgactttatgccttattttctgcgagtttccactgcgattggctgtccttgcgtcgaatgtaaggaaagcaggggctatgggatccccctactcggttctctcgttgtcgcggttcaattttcttacgtttctttagatgaaatttagtgtttgctcgattcagttgcagaaaggcacgatctttggtgattcagattcttcttgtttttctgatttattgtattgcatcatggcatgcgtcaatgcctggccagtttgcagtttaattcgatgctccctcgtggacgaatacacccctgatttgtttctatgaaggaaagtatgaatttggctctggtaagaactaggcaggcgattacatttcgcacttcgtgactttgggaccgggcaatctggtttacataagccataggcgagagaccgttcaattccacctgcaaatccgaaccggtgcaatgcacgtgcttgcttccatctgtagttatcaacatatagactaagacctgactttaacatctgtagttgatgaatactcttgagaggagtgtgaacaagtagttatctcacaacgaccaagcactgatttggtcaaaatttagaggaactgggaaacttccgttgttgactgatagtagttggtcgtacattggttttgttcagaagctcttatgcataggggctgtagaaactgatcgattgttgtttctagctctggtgggatcatattggcttgtgtgttcattgctctggagaaaggacaaaggagagcctaggaggtcccaacttgtgctggtgggggatctggatattgtttacttcaaattgtttcagtatcgacacaagatatgttgttcccaggtttgccctggctatgaatgggatgggcagccagcgtggctactaatttgtcttgagtatattatatactggcatttctaattactataacagtggtgttgactagtaagaggataacggccatgaaggaaaccgaggatgattgggattgggaggtttgtgtttgacattttcaaagtcatctgtcagctaccgaattcgatgctggtatgctaaatttgttggaaactgtgaaaagttgaacagaatcagcatggtatttgacatttcgaggtgtttctttcttttcgtgcttatcagcaaacagtcatctccacagtccacatttgtgactcagtatattgtgtgcatatttatcaggacctcagatactttgtcgttgtctagtttcctacccatttgattttagtgtttgataatttgtgttcctagattttatcttactgcaatttttgacttatggttcattctcaaacaggatttgaatactaaggatttggaaaccaacgtcattgttcttgttcatggaggtggatttggcgcttggtgttggtacaagactatatcacttcttgaagatagtgggttcaaagttaacgccatcgacttaacaggctctgggattcattcttacgacacaaacaagattagcagtctttcagagtacgctgaaccacttacgtcttaccttaaaggcttaggtggtgctgaaaaggttactctctttccatatatcaagttacgttccatttgggatattgtagtatccattgactattgtggcactgtgcatgatatttggtaatttacatgctttcatgcttcgactgtagtccttaacaatcttataataaaaactgggatgacagcgactaacctatcattagatgagagttctataatggcaaagtaatacttgttcctgcaaaaaattgtattctacatttctgcataagccatggtaagttgcaggcacatggatttcagtacagcgccatactttaggatcttgtaggccgccaatgctatcttcttccatctcacacattgtaggtaaaaatagctagtgcatcagcatgaaaaatttgagtgaattgttaatctaaatgtcaatggacttgggttggactttaatcttttgagatggtaagattttagtagtgttacatttaatcactcaatttacaaatactgaagtaggaaaaaccataggcataagtacaatatgcctgacattctggggaatcaattttgtaagtgctaaattctgtagactttttctttctgtaaagatcacaatcataacatgaatcatcataactaattctcaaatcccagactgaagtggtcccagattatggtgcagaacctaagcaccacctaactttagttatgatttgatgcttggggtgacattattattatgtatgcaccagtgacttaggtagttgcttgccactcaagtcgatctgtatctcttaaaatgatcctggaaatattttgtgtacgataaaatgcatcatctcgatattttccaagattttatagataagtctttagcaatgccaatattgatatttcaaagcatcatatgaagttttcaagcgacttttgtactggcatgttcagacttatgtgaagatccctgctttgtttgattttttttttgagcatattcttatctgaccagaaatataacaatcgaatacctccaacattatgcaggtaattttggtcgctcatgatcttggtggtgtctgtgtatcctatgcaatggagatgttcccatccaaagttgccaaggctgttttcctttgtgcagcaatgctgacaaatggaaacagtgcccttgacatgttccaacagcaggttggtctcctggcccagcgttaattctgttgaacaactggcattataacgaatcaaaaagacaaggacattaaacgttgccttgtctggcatcaaagtagcattgtcttcctatgattatgtcctgatgccgtccttccgctccagatggacacaaacggtactctccaaaaggcgcaagaattcgtctactccaacggcaaggaccgtcctccaactgccatcaacatcgacagggccttgcttagagacctgttgttcaaccagagcccttccaaggtactaggattttggagtactttgttactgtcaccgagacaatcacctccattcacatcactgaatcctacttctgaattctgaagttgtgatatgacaccccctaccttgtgactgtgcaggacgtgtcgctggcctcggtgtccatgaggcccatccccttcgcccctgtgctggagaagcttgtgctcaccgctgagaactatggctcggtgcggcggttctacgtggagaccacggaggacaatgcaattcctctgcctctccagcagagcatgtgtggtgccaacccaccggagaaggtgctgcggctgaagggggcggaccacgcacccttcttctccaagccgcaggcgctgcacaagaccctggtcgagatcgccaccatgccgccgccggtccaggcttcgtgagatggtgtttgtttagcttcaggtttcgccggccggcgagcttgcatggctgttgtacatgctgaggatggtatggtttgtggcggtgtggcagcaagtaggggttctagaatttcagcgtcgtctcaacgaaaggcatccttccataatatactcacaggcatcagttttttatatattagaaaaaaaacaaatcttattctggcctggagaatcaatcagttcattattatagttcagcctcgtgctagatataaagcaaataaaattgaagagtagtaaacaaagcattataaaacctattacaagagaactgtccaacggcaatcttcattaccataatcttcaacattgacattgcccatacatctggcgtcgctaactcactatcgtgatgagctcgctgcagttacctgcgtctgctctgcacgcaatggataggaaaaggagagttttcctctggtcgggggacaagtcagtgatttcttctccgaccggct

SEQ ID NO: 3680 - DNA, 6306 bp, Sorghum bicolor
agtgaaacacgcaacgcgcactactttgggctgggccgcctagcgagcccactcttcacaggtccagcgggagttgggctggtcacagcccggacgctgcacaaattggcatatctcttccatggaactttggaaatatccaaagccggctgaggaattgatgatgatggtcccaagaaaaagaaggttgcacgagtatctgcacactagtagtatgatttaggccctgtttggttcgcgtagttaaactttaactttcattccatatgttgggatatatgtatgaagtactaaatatatattatttataaaattaaaaatatgactagagaataatttgcaagacgaatcttttaaaactaattagttcatgattggacactagttaccaaataaaacaaaaatgctatagtatctgttaaacttcaataccccaactaaacactcccttataccttgcatgttttctcaaaagttatagtagaaacttgcgagtacctaaactcggcattcgtagctatattttcctttcatttttgcgtggggttttaaaaggttgatcttggtttgaagaaggattaagcaactcatgaaaatgtcatgggccgttatgactacagcagcccatcttagcatgttcactttgatagcccggttctaaagaaaaacatagatacaggtgatttttttttaattaactttttttgtgagacccagttacgctcacctacacgagcgcatacttactcctataaacgcacacacgcacaccctacccgtatgagtaccttcgaagaactgagttgtgatcatagatcagttgattgggttccttgtggtggaacctacccacccaggttaagtcattgacttgtgctcgtattttttttgaatttattctcagagttaacggcgctatgctttcagtgctagatgacgtgcccgtcgacaacgagacacatgtggtgacttcgtcaatcatgagatttttttagttgactttaaaaaactccaagacttgttgcgcttcattagccggggccacaaagccatctcaacaagatttgtgctaatatttcaaatagagagggaattactcttgtcaaatatcacttcacttaagatcgagcatctacactagaccgagaaaaaaagtcgcctttttctaaaatctatcatacagggcaataaattgaaaaatagctccattagatccccttttcttaatcccttttccctatattcttttacaatccctcaaaatctcccctcagttcctcaaatggaggggatccaatagactttttttgccaatcccttttcctcctctttatgtcatcttaggcccacactggccatcactgtcatgacattgagcaagcatgtgggaagttgtcgtcgtgtcgagcaagcgcaagccatgccgctgttgtgtcgggcaagcgcgagccacatcgtcgcactaggcaagagcataggccatgctaccgctgccatggtgagcaggcatgccatgaatgagagagatgcagagaggaaacagtggaagaagaaggtggtttagacattgacacgtgggtcctacctaaaaaggatatgttttctcaatctattgcatagtccccctaataacataaagttagttttctcaatcccctataggtggttttaaggggaagagaaaaggagacctggtggagatgctcttatgctcttgaattgggggcaaaggtgttggatcctcactagttttcactaacacatgtattgatatgtatataaccctttgcaaaacataaattctatatggcatctgcgtgttttggacaaatccaacacacgattctccacagcatgcaactgctcccaccacgcccgtgcccatgcccccacgtggctcctctctctctcccctccggcggtagcggcaggttccggtagcgccggcgccaatgaggtaggcgggctcccctcctcctcctggtttgtgcccaccgaagatgaagatgatggcggcggtggctatagaagaaggcgatcagggggaggcaggtaggccaggcagtggggatggtggccggacggtttagggaccctgacgatggtagcggtggccaggccaggatggggcaggggagtctcgaaagagttggagaagatggtgacgactgagctcgctagagttggaaaagaaagcggcgatgagaggagaagagggtggccacgcaggcatgctagggtctcaccggagctctgaagagaccctaccacgcctgcggcaggggcggcgggaggaggaagaagacgagtacaagaaaaaaaatcgagtgttcccggcctctcaaacactagaatgaaagataggcatactcttgcaatatgataaagctcaatcctatgcagctcttgcacctgcatgtagctaaatttagcatgtgtatgaaatcttgcagagaggtgaacagccaagtgacgtgtcaatcactgcccgcgcgttgcttcgtcgtcaggaactcaatcaaacacattcaagttagcgccggtttcttcctgcggccgcccagatttctcgatgctcccctccacccatccaagaaaagcaaggcaaggaaaaacagcgggggggaaaaaaaaaaagaaaaattacggaggaaaaccgaaaaggggcacgagcacattacgccgcggccgtgttgtcgccaaggcgaggcgcattccgtgtctccaccaacgctgccgtgccggctacctcgatcggggcctgccgtgccgccggacggacattcgtttacccatccatgcctatgtgagaggcggaatccggccggccgctgcccccctccggtcctcccccacctgccgatcgatgcgcggctcctaaccactctccctctcccggccgaaaacgacgacgacaccgccgagcgcgcggcggccctgtgatgccgcgcgccctcatggcagcgtcaaccgagcatctggccacgtcccccgcgggagggccgccagcgccgaaggcacaggcacccccgccgaaggcttcctcgtcgtctccgccgccacctccaccgaaggcttcctcgtcgtctcccccgccgccgacaccgtcgcctccacagcactcaccgccgccgccaccgtcgaagcagtccccgcctcctccggcaccttcgtcgaagacaccagcgactccgccgcagaagtcgccgacggcgtccccgcctcctccggcctcgccgccgccatcgagcaagtcctctcctcctcctcctccttccccgtcgtcgacgcctccgtcgtcaccacctccgcgttcttcgccgccgccgccgcccgcggcatcgacatcgacatcgacgccaccatcgtcgacgtcgcagaaatcgcctccgaaacaggaattaaccaagtcgccgccaccctcgtcgtcagagaagacgcccggagcagcctcacctcccccaaatgcgtcgtcagactccggatcaaaatcacagccgccgccgcgcgggacaccgtcgacgtcctcggacaacaccgccggtcgccagccacctccagcgtcgtcggggacaccatcctcgcccacgcagatgctgcctcctccgatggcggtgacggtgatcgtgccgggtgcctccggcggcccacctgcaagcggcaggtggaggggcccgcctggcccggcactgagtccccccgcaggtggctcaggctcaggcggcaacatgaagaacgaggtgatcatcatcggcatctccgtcgccgggctcctcctggcactggcctcgctgctgatcatcgtgtgcgtcaacagcaaccgggggaagaggaagcggcgcgcgcaaccgtcgccgtcgcggaggcacaacctcgtcgtcgtgccggaacgtgagtgcccggccgccctgtttgcgttgctctctgctgccaccatgcaagcgatgtgtaacgaattcacacggttttgtcgtcgtcatgaattaatggatgtgcagcggcggtctcgccggacgcagcgtaccaggcgtcgccgagcgggacgaactcgtacgagctgtcggggaccaagtcgtggttcacgtacgacgagctggtggggatcacgggcgggttctcggcggcgaacgtgatcggggaaggagggttcgggaaggtgtacatgggggcgctgggcgacgggcggcgcgtggcggtgaagcagctcaaggtgggcagcggccagggggagaaggagttccgcgccgaggtggacatcatcagccgcatccaccaccgccacctcgtcacgctcgtcggctactgcgtcaccgagaaccaccgcctcctcgtctacgagttcgtggccaacaacacgctcgagcatcacctgcacggtgagccgtgagcagagcacattatatatgcacatatgcattgatcaccttaataatattcctcttgcattgcattggcacatacatacgtattatgcatgaataatgtgtgaaatatgttgtatacattgtatatattgatctgcaggaaaagggctacccgtgatggattggccgaagcggatgaagattgccatcggagcggcgcgtgggttgacgtacctccacgaagactgtaagtgaggagaggacagctacctcatcttgcgatgcacctgcccgtccttgttggtagctactgtagcttgcttgtcgtcagtccggctaagagctgcctctgcttgtacacgcaggccatcctaggatcatacacagggacatcaagtcggccaacattctcctggacgacgccttcgaggccaaggttaattaatttgcagcacgtacaggatatactaatgcactacccaaacacttgattctgtactgatcatgattaatctggggcgaacaggttgcagatttcggccttgctaaactgacaaacgactcgctgactcacatctcgacgcgcgtgatgggcacgttcgggtaagttagcagcgttcagagcacagcctatctctcgtctctgaattaatcccagtcacattattctgtctctgaatccacaggtacatggcacctgagtacgcacagagcgggaagctgacggacagatccgacgtgttctccttcggggtggtgctcctggagctcatcaccgggcggaagcccgtcgacgcatctcaaccgctgggagaagagagcctggttgaatgggtactacgcgaatataatcctcttttcctttaatttgtgtctacagggtcgctagctgttgactgatgatcgatcacgtactacgcccgcaggctcggcttctcctggtggacgccttggagacggacgacttccgggaggtcgccgaccccgcgttggagtgcaggttctccaagaccgagatgcggaggatggtggaggcggccgccgcctgcgtgcgccactccgccgccaagagacccaggatggtgcaggtaaatatatatataacgagcacacacacacttcttggaccaaaacacgtacgggagtactagctaactcttgatcatctcgctgctgtatctgttccctctctctctctctctatcgatcggaaggtgtggcgatcgctggacgtggacgagtgctcgtcggacctgaccaacggcgtgaagctggggcagagcatggcgtacgactcgggccggtactcggcggacatcgagctgttccggcgaatggcgttcgccaacgacctctccaccgccgagttgggcgtcttggacgaggacgaccaccacagcagcagcagcaaagccggttccggttccaggcggcacaagtagtgattcaaacacctacgtacacgcgtgcgtgcgtgcgtgaacaaacgtgtgatgtgctgcgtgtacgtcggggcagctcgatcgaatggcgcaaattaaaggaccaaaacagtgccacggcggctgtgcacgggggacgtagtagcggaggatggatcgcagaggagaagctgacgtgagcgaggcagcaggtggcatgcagcttcgtttgagctagctagcacggtgtctgtgtacgttgctattccctgctcttgtttttgtgtgtacagccgtgcattcttgtcgctaataagaaaagaaaaccgcttggcatatacggtaacacgtccatctggttagggcagggccaaccgcggctaacactctgcagtgatttcatcagaaagtcacgccacgtccaccgaggagtatctaaggcatatgatcttgcaacgcgagctgtctaagagatgttttgtggggctgcctgttgcatatcttctcttgaataatgtatt

SEQ ID NO: 3681 - DNA, 6306 bp, Sorghum bicolor; identical to SEQ ID NO: 3680

SEQ ID NO: 3682 - DNA, 3810 bp, Sorghum bicolor
tttgaggattttgtgtgtgtatgaacaacgctcggtagtcggtacagtacggacggtactgtgcgtgctgtaggatgaacagtattcggagcgctgtgagggcagcagatcttgcatggtcgaggaatcttattataatatggagctattaattagtatggtacagttaaaatttatatgatgtgattttccattatatcacaacaaaatgtacgaaaatcatcaggataactactgccacctttggtggccaaaaaatattaaatggtgaaacaagtctaatcgtttgagtttatctaccgaatctattagctattcaagagtgtttttctctcataataaattagcgaataatacttttaaccatgactttgctgtcatatgtgaacaagcttctaatcagcgacggataaaactatgaacaggtagtatcattctctccctcatcccatcagcaccgattgaaacaatggaccagtgtttataaaaaaaataatcaccatgggatgaagcaacgaactgttggtgatcattaacttgtcattgttggtttaagcaaagaatcactgttcatataaataggttcatcgccggcgttggttataagaaactgaccaccaccggttcatacaaacagtggccgtcggatcaaacgacgagctgctggtgatctattgctggttgcaacaataaaaacggtagtacgtagatacactgtgatcgctggttaatttcatgcaacaataaaacggtggtgacaaattaatactctcatcagtcatcaccaccgaccggattaaacttgactaaacatcatcatcgtcaacacgaggggtttccgacccggcgcgataaacgttctctgcagtagtagtagtagtgttgtatatatgcatgtaaataagttgaacgtgtgcgtatcgatcattaggtcgtgccttgcgtgatatatatccagcgtctccgtgcaacaatatacgtgtgtcgtccttgccagtttccgtggctgtacgtacgttgacattcacgtccgttaataactggacgacgattaattgtgtggtagacatatataactcatacgatcgtacgtacaacaactaacaagaagctagggcatcgagtcatcatgtgtgtatatatgcacgtaccggtacgtaccagcatgtgtagatggtattagatcgatcgtacacgtacgctttgtacactatgtgtagttggcagctgttgacgccaaaataaaataacaaaaacttcttgtcccggcaactaccgcaacattgatctaattaacgtacgtgtatacctatgcatgtagctagcttggaagactagcttgtgtgagatcgcgcaggatcgtgcatgcatatcgatgaacgcgtcaatcatgcatgtgattgggatagagtcttaagagatacatatatacttgggatttgattgccgtacgtacgtgcacgcatgcgcgtgtgtgcagggaacgaagggaaggaatggaatgatttgctccagctccatgctgcaattgctaattgcgcctaaccaacaaccatgcagtaaccaccactcctttatttccatatagttcgctagctagctagctagaaggttcttccttcgtttcaattaattcatgccctgcacgtcgtcgtctactgatgatatatatgatgcctaatggatgactcctgcgtactcctaccactcaactactgcgctggtagggtgctagccactactcccccgtacgaaatatatatatatatatatatatatatatatatatatatatatatatagagagagagagagagagagagagagagagagtactacagcacaaccactggccttgcacttgcatatatatatgtagggtatacgctgtagggtcctctggcctccacattcctatttgcagcggcattttggcgtagtagaagaactagagttcgtgtccttgctgggcaccgggacaagggacgacaacaataccaatgggcaggaggctgccggcggcggcgttgtgcggtggccgggcggcgacgcgggtgaggaggaagcgggtgcagcgggcgtcgtcctacgcctcgccctccaatattaagctccccgccgcggcactgcccggcggcggcggcggtggaaagaccggcagcgcagcagcagcaggaggaggaggaggaggaggctgctacgtcaatggcaacggcgcgctgatggtggaagtgcgcaggcctgccgccggctctgggacgacgacggtgaccggcaagaaggacggcggcgggcggcgggtcatggtgctggcggacggccgcgccgaggccgccggcgcgctccagtgggcgctgtcgcaggccgtccggagcaacgacaccgtcgtcctcctcgccgtcgccaagaccgtcgcccgagacggtcggtctccgtctctctcgtgtgtcgtcgtgtctcgtggcgtcgggccgtcaatcggcgataaatttgttagtttctttcctcacgctgactagaatttcactgactaattttctgtcgacctctgcagccgtcagtgattcttgtgtcaagatgctgggcaccaagagccagcaacacctcgccgccttgaggactgtctgtgaatcaacaaggccagaggtacccacccacacgcaaatgctacgtcaacattgtaattaatttaatcaaatcaatctcctagtaaattattactaggataggatagaatataaagcttgccagatcagtgctctcactgtctaccatataataactaaacgaggctaaattgtttccgtgaaattcgaaacgaaggtcatcagccaatgatttgtgggatccgcagaatgatttcttgccgtccaccaccaccaaaagcagtagcccacttagcggattttgtggggggcgtggcgttggcgccaaaaagagaactcgcaataatatgtgtgtttggatggaggagttgggatccgaggcttgatcacaattcataatgcaggtgaaggtggagacgtgcgccgtggaggcggaggagcgcgcgccggcggtggtggacgcggccaggcggcacggcgcgtcgctgctcgtgctgggccagcgcccgcggcggcacgcggtggcaaggtggctgcagacgctgtggcggcgccggcgcagcagcaggggctcctccggcggcggcatggtggagtactgcatcgagcacgcgccgtgcgtggcgctggccgtgcgccggaggagctccggcggctacctcgtctccagcaagcaccacagggacttctggctcctcgcctagtagtagtaccatgctgattcagcatcaaagatcttttcttttgtgtcgcttcaattcgtcgtcagttcaaaactattgcctactgctggtaacttaatcagagcgatcgagtttgcctctgatctggctgatgatgctgtaaagctagctatatatccaaacggcgaacaatcaaaacctcagcttgtttcagaaaattgttcggtgtggaagatggacaaaaagatatagaatgctttgactttgcacaaaactagaatgacaactaatatgaaaaggaggtactatatatatgaaacagctttgtcaaattaattattactaacatgagtttttcaatcttgagagtgcttttgtagagttcactgacagtttattatgaactacccaaatcatggtcatgttgaagctaatcatttggtaattgactgaacagaaggcctgaatgatttagataatgaatcacaacgttattcacgcaaattactccttgctgaaat

SEQ ID NO: 3683 - DNA, 4713 bp, Sorghum bicolor
tgtgtgtgtgttggacatcctgcacgcacgcaaagctactcctaacataacatacataaatcacgcgccgcgccacgccgcgcaatcagcggccgacccacaccgtacgttgcctatgccgggcagcctcagctagctgctgttggccatccgatccgatcgatcctgtgatggcctacgctgcaggtggactggtctcctgggtggttagcacatccgtcgtcaagctgggagctgggactgactgttctggccctcgcacggttcattttcgttggctctggcctctgcgtcgcaccgtcatttcgtgcctgcctgcctgcctgcctggcaggctaactaatcctctctttacacagctcatcgggccatgaatgattgctcgtcacctcaccaatcctgtcctgcgatcccccaatctatcattgccgatccggttgctttaacaaacaatctcacgccgtgacgacgcattttgttttcgtttttttccccccattgttcattcagtttcgggttgctatataaatccctctttttatttttttgactaataaacttttttggaccgctgtcagcgagaccagtattacgctactattattttccgagcacattaaactgttttgcctcaacaagattgtttaacatgtagtactccatctagtaggcggataatactagcaaccacttaattccagggttgacccccctctcgaacaatgcataaactgtgtgtatgctcatgcatgttcctgaagcaaccgtaatcttccccctaattttatacacattcacttccattccacgcatgatactaataataataataacaaaaataataaaccaccaatgtctcctctgtcaaggccaggctactactactatccgttccatgcccaggacacacacacacaacaacaacaacaaaaccaagcctgattcaagacaacgcatcctcctttcacctctcaacgcctcatcgtcacctttttctttcaatcatcaatcaatctatcaaggacagagttgccaaagctaaagaggagcgttatcagacagaagagcagagcagggaggagttttcagtgtttgacgcaggaggagcatttcagggacagcgacacaactctctcaactctggagagatctgccaagccaatacatggcaactgccaaggactgctgatgagcagctgctcgtcaaaggcgtatagcgcgtagtaggaatccaaaatcagatcaattcggcggcgtcaggaaaggtgagaaagggccaatcttttgcttccttgccatctttagcgcccctttcattccatctttgcagcagcagccgagcctaccacaaggcgtgcttgtttctttccatgttttttttttgttttccatctgggttgagtctcgtctctgggagatgagatgagatgatgaggagaatgacatgcgccgccgcactgttcgatgatacgtatagtattcttttttagctctgctgcatctgcgtcgtttaaaagaaggttcaaaggcaaaggcgtctgaatctttagccgtttcattttgtttgtttgccgtctcgtcccttttccgactcctctgctgcatctttatctgcatgccatgatataaccatgatttagtatggagtcgtcgcctcacaatcccctcaaaagcagcggagctcgtgcagcataaacaacaggaccatttcgccaaattcctcaccattgtctcccatcaatcctcacaaaaaaaaactttgaaaaaataccgcatctgctgcaagacgacacggcagtttcgaatttaaacctgcgaattttatctctagtctagtgcgtgcgtcggcttctcccgttttcgatggatttgtcgtgtccattgcagcagctgggcgaggcctttataaagccagccgttgttttctgcagtgcccaactgaaagcgtgacggcggaaggcgaaggcgaaggcgaaggcttggagcacacaagcgacgccatggacagggacagcagctcggtgtccgacgggagctcggaggccggcggggagcgcggcggcgggtgctgctcgtcgccgtccacgcggagcctcgtcgacgcggcgggcggcaacctcagccgcaccgtgtccgacgtgtccacgtccgccttctcggagcagtgcagcagcgtcagcgtcgacgtcgaccacagcgggccgttcgagcccaccgccgccgccgtggccaagctcatcgcccggtcgtccccggcgtccgccgccgagtcactcagacggctcagcatcaagccccgcgccgacgtgcttgaccgccgctccaccgacgacggtacgtacgtaaatacgcaatgttcttggcacagagcgatcaccgtgtcgcgtcgcgtcgcgtctctgatcgatcggcctgggatgtgcgcgcagagctggagctggtgaaggagaggttctctaagctcctgctcggcgaggacatgtccggcggcggcaagggcgtctgcaccgccgtggccatctccaacgccatcaccaacctctacggtaagcaatgcaagcagactccggacgttttcgtgtactgggcttctggcacgcatcttcatcgatcggtagattaatttcgtgtaacatgtcgttcgattggttctcgcagcgacggtgttcgggagctgccacaagttggagccgctgccggcggggaagaaggcgatgtggacaagagagatggactgcctcctctccgtctgcgactacatcgtcgagttctacccgtccacgcagacactgcccgacggcaccaaagttgaggtgctgcattctgtttatccatggatgtcttcttgcaagattcagttccaagaaacttgaggaatgtcatcttctcttccaatcgacattattgctgatcaggacggatcgattcgtgcaggtcatggcgaccagaccaagatcggacatctacatcaaccttcccgcgctcgagaagctcgacgccatgctcatcgtaagatcatatcccaatcactgatccctccattgattctgcttggtctcagtcagcaatgatgatcccgatcatgcgcgacggacggtgcaggacattctggacagcttccagaaggcggagttctggtacgcggacgccgggacgaggtcgttcggctcggtcacctcctcgtcgtcgtcgaggacgatgtcgtcgtcgttcaggaggtcggctcaccggaacgaggacaagtggtggctgccggtgccctgcgtcccggacgccggcctcaccgacaaggcgcgcaaggaccttcagaagaggcgcgactgcgctaaccagatccacaaggccgccgtcgccatcaacagcggcgtcctcagcgacatggaggtgcccgagtcgttcatggccgtgctccccaaggtacgaaacgaaggtggaacagtatacacatctttctcctcgctgaaatcctcgggtaaataaaatcatggtgttcgttcagagtgggcgggcaagcgtgggggactcggtgtaccgcgtcatgctgggcgccgacaagttctcgccggagttcctgctcgacacgctcgacatctcgtcggagcacgacgcgctggcgatggccgacagggtggaggccgccatgtacgtgtggcggcgcaaggcgagtggcagccatgggaagctgccgtggagcaaggtcaaggagatcgcggccgacggcgacgacaagaacgtgacgctggcgaacagggccgagagcctcctgctctgcatcaagcaccgcttccctggcctgtcgcaaaccaccctggacaccagcaagatccagttcaacaaggtaacccaaaactgtccaatcacattggccagcacacaagatcatactagttgacatctgctcatcaatcatcatactcaacagacaaaggcatagttatctgcactcgcttatcttactttactttttctgctatccagcagtgcttttctctaatgataaatcagcgaacaatactttcagctacagcaaacagtgttcttgatctgaatttgatgaaatgaactgacaaatttgcaggatgttgggcaagcaatcctggagagctactcaagggtgttggagagcttggctttcaacattgtttcatggatcgatgatgttcttttcgtcgacaggtcaattaggaaattgggtgacaacctgaagccctgagttcttcagcctgcactaaagcttcccagcaaaggttttagatgactgttggtgaagttgcaaaagaagagtacgtgactgtagcgttagtagggtgagtttcctgacctagagaaaatgtaaggccatcttcttagcttgcaagaatgcagaatgcagagtgtgtctgaccaacagtgaatgtgtatggagtgtgttttgatttttcctgtccttttattttgagctctcgccctcttatcacagcttggtaacatgaggatgagtaaaaagggatcaaaatgttcagtagctataaatgactggtcttgcatctttttaatactgtgcatttcgcagcaggcaaagctgcacaaagccatccagttaaattaaactcgtgcatatcatcagagttttggaaacacggtgaattgaatttcaagatcagacagtgatagtctaagggcactcacaatgcagactctatcatagagtctaaagttatttattacctcgaa

SEQ ID NO: 3684 - DNA, 4979 bp, Sorghum bicolor
ccaaacatgcccacatcttcttctacccctatctgttgctgcttatgcgcacaaaaaaagaaaaggattatcaaaagagactcaatcaacagttatcaaaagagcgagactcgatcaacagtttggtttgtttgttggaaagaagggagtataactatctacgaaagaagagaatggagaagggataagggcagcggaaaagaaagattaaataagtaggctagcttatatatggcaataagcgagtcctatccatcaatattgtaaacttatataaataataaaaattatagtctaaaaaagacaaatcctagttatattgctcctttgattattacatatttttcatcaacaataaaagagttaaagtccaaacacagaacatcaactaaaagacaaaaaaacaacaccactaaaaaaattgtccagtgatgataccgagtccagttccaagatatattagactcggtgcaacgtacgaacatatttgctagtaaaaataaattcacattaatgatggacacaactatttcacatatatgttatttccattagtttcagtactcactttgtatctgtagtaactaactacatttttcatttctcatgaatattttttatttgcacacacaggtaatatagtactccatctccttcccccccccccaccccacacacaccaaaaaaagttcaactcgcatttttaagagttataaataattttaaatttggttaaatgttataaaagcaaatgttaacatttatgataagaataagcatcatcaaaataatagtagaatatatcttcataataaatctatttagaaatactctactttctataaacttaatgaacctttttttacttggtttgaaactagaatataattgcactttttttaactatcggtcagggagcacctagggctactagcctactacgcagacctgaaggctaaggtcagtaaaaggtgagattccattacttcttcttttttttttctttttcttttttctgagagagagatgcgagggttgcagaacattgcttgttcagctaaacggtgccaaagcctgcggcccatgttacgatttggacagctcaagactagtgcgggccttcagggaacgcgcatgcaggcacggcccttttcctagctaaaaaaaagcacgggccgttttcgccaagagaaagcccatcaaggggcttgcaggctttcagtttcaggctaaggctttcagcagagcgtgacaatcaacttcaactgatcgactctacaaaacgaaaagtgttggcgctgaacgtattatctatatatcattcgtatgatcatcttgtgctgtaaacctgtgcttttgtccatttgacactgtgtatgcatggatgactgtgacttgctgacaccgacagtattttcctactgtatcagtttcctgtcgctgatattgcaatgcactaatgccttctaaaccctgctactacactacatcggctgtgaagtctgaataaaatgcgtagcacgcagacaacaatggttttctcgattgttgtaatcctgatgaggctcaaatatgaaagatggtcaaacaatgatatatataggagaagcgatttattaactatctccagtgaaatgaatcagtagagacattgaacatgcactttctataaaagctgggttcttcttctcgctcccgaaaaaaaaatcaggagggagaccttttctcctccattacttattgtaccatgaaaacaaaacaatggcaaccacgatggagagagactggcatgcaaccagtggaagccagtggcctaaactaaacagtcggaaccccacaccaaagcagggtgcttcagccaagaactgctcgtgtccacacgctacgccggggacgccgcgcggacctccggtgccgggtttataaccgccacgcctcgtcctctcagctaccacccactccacccccttcctcccttcccggtgacgtgatcgtcagccatggctaacagggtcgccgtcgccagcgtcatcgccgcggtgggcatcgtggccgtgatcggcaccatcgccgcggtgaccagcgccaagaaagtggacgacaacgacgccggcggcttgttttccagcgtgaagctctccacggtgtgcgcctcgacgctgtacccgcagaagtgcgagcagagcctgaagcccgtcgtgaacgacacctccgacccggaggacgtcctccgggccgcgttcaacgtggccctggacgaggtcgccgccgccttccagcggtccgcgcacatcggcaagggcgccacggacaacctcaccaagaacgccatggaggtgtgcaagaagctcctagacgacgccaccgaggacctcggggccatgtcgaggctcaagccccaggacgtggtgcgccacgtcaaggacctccgggtctgggtctctggcgtcatgacctacgtctacacctgcgccgacggattcgagaagcccgagctcaaggaggccatggacaaggtgctgcagaactccaccgagctcagcagcaacgcgctcgccatcctcacccgcctcggcgagctcctgccggaggaagccaaagctctgaacgccaccttggcgggtgcggggcacggccgccggcttcttggctggcagatgggcgaggccgaggaggtgaccagcggaggccgcgggcttctggccgtcgatgacaagctgggcgagatcgcggacgtcgcgagcgcaaaccggaagctcctgtcggacacgctggacgagatcgccggcatgtcccacggcgcgaacggccggcgcctgcttagcaccctgtggtctcagataaccagcacccagggagaggacgtcctcgcccaccaacaaaagctgggcgtgtcgccagacgacgagaccgatcacgccgcccggcgcaaccttctgtcgaccgagctcgacagcatcgccagcacgtccgccgaggcaaaccgccagcttctcgcggcggaggagctccccgacgagctcgccggcaagcgccagctgctgtcccggacgctcatggggatcgacgaggcggccaccgaggccaagcgccagcttgatgaggcaacgacggagaacaccatgtctgagactgagcacagggtactgaccactgacctcgtcggcacgttcgacgagatccaagacgggcgcagcggggcgccgcccggcaacttccccaagtggatgtcggccacccagcggaggctcctgcagctgcccagcctgcagaagcccaacaaggtggtggcccaggacggcagcggcgacttcaagaccatcagcgaggccatcgccgccgtgcccaagaccttcgagggccgcttcgtcatctacgtgaagtccggcgtgtacaaggagtacgtcaccgtgcccaagaacatggccaacatcttcatgtacggcgacgggccgacgaagacggtggtgaccggcgacaagagcaacacaggcgggttcgccaccatcgccacgcccaccttttccgcggagggcaacgggttcatctgcaagtcgatgggtttcgtcaacacggcggggccggatggtcaccaggcggtggcgatgcacgtgcagggggacatgtcggtgttcttcaactgccggttcgaggggtaccaggacacgctgtacgtgcacgcgaaccggcagttcttccgcaactgcgaggtgctgggcaccgtggacttcatcttcggcaactcggcggcgctgttccagaactgcctgatgacggtgcgcaagcccggggacagccagtccaacatggtgacggcgcaggggaggacggaccccaacatgcccacggggatcgtgctccagggctgccgcatcgtgccggagcaggcgctcttccccgtgcggctccaggtgcccagctacctcggccggccatggaaggagtacgcgaggacggtggtgatggagagcaccatcggcgacctcatcaggccggaagggtgggcggagtggatgggcgacctcggcctcaagacgctctactacgccgagtacgccaacaccggcccgggcgccggcaccagcaagagggtcaactggccgggctaccgcgtcatcggacaggccgaggccacgcacttcaccgccggcgtcttcatcgacggcatgacgtggctccagagcaccggcacgccaaacgtcatgggcttcaccaaatgaacgaattttttttttttgcagtgatttttttttcattgttttttgcagtagtatgttgcatgcatgcagcatgcttttgggtttgtcagggaacggctagcttttttgttattatagctggagggaagctcctgtgcacgcatgcacggtgaatataggtgatctaaggaataaagtatcagtcagatgagagcgtgactgtgagagaaagacagcttaacaaagaactaattaagcaagttcaggattacctttttgtattaattctactgtctttttttgcatgcacgtttaatttattttatttaatttataagagtttaactatatgtatatatagttatattttggagaggagattaatgatttgccacaatacgtactatagatttgtgtcattttaggataaatcaattctaatccggcctcgcactcacaaaatgcacttagcctctgagcttaatgttttctgtatggattaaattaacaatgacaattgtggttgggaaataacaccgacaacaatgctaacatttcaaaagaatacatgaggtttcaaacacactaaaatgtcccagcttgtagctaaattgatgaaatatgagcatgaaaattatgatttcataaaaacataaaatacaaaatgcactaaatgactaaaattccaaaataatcaaaatggtttgtaattacaaaattatataggcccacctacaattagggtcgctacttcataataacccatcgattggaagctgt

SEQ ID NO: 3685 - DNA, 6222 bp, Sorghum bicolor
acattggtagaatgctgccaaaattgtattgatcatttgtgcccggtacggattagcctgatttgcgaaagcaacttgtcagctgatcgttgcacggaggcagccagccaattattgtacgatatccgaaatcctcagccacaggacgctaggatcctgggcggttgggacaacatcatcagattcatttgccaagatgaaatgatgatgggaattaatggatgttataatgttctcggagcatactggcgttttctcacgcgatcgatctgcagggcatttttatttcagcagtgctgctctggccaattgcacattaattcttagcactcgttttttttttttttttttttttttttttttttgccttcagcttcagatgtgagtctgtatcggaggactccaaacgggcttagtctgaatcggggtttcatcacaatagtatgctttcatagatgaaagcatgcttttatatatagatgaaaagcccaggaagaagatttagcccccgcgagattccattggcaagcagtttgaggatccatcttattctaaatgaggcggtgcaaatttgatgatcccattccttatactagtgactactaatttgtaggaaatgagatgacgatagattaactcattaattacaagtaaaaagatgatggctaattcatacatgaaacacaaaagaagagtacatgttggtgacttcagcatcttcattagatctcttatactgcgtcttctataataggagagtaccttaaaatctttaggatataagtgaacaccgttgaagccgatttatcaaaacatgtctccttttgttaggatatgtgatggatatgctgttaagtatgtatgcctataataacacataaaaagaatcaaatatctattcatgtttacaaaggaaatatgaatcaacaatgttaaagattattttttcgctaaaacacaaatatacgtactccctccgtataggaattagaagtcgttttgaacaagatttagatcaaaatattgagaatataaatcatcaataacttttaaattgttgagtttgcaaatgcaaaaattatatgaatatatttgtcttaaaaaatactttataaagtgtacatatattattattttttaaatattttataaaaataagaggtcaaagttatgttttgaagactgtgtcgttgttctaaacgatttctaaatcctacacggagggaatacaataatgggcatggcttaattggcaggatcaaacctatatcaatccaagtaggtcagtataagtgctctcattttcctataatttttaatttataaatttatgaaaaagcaacattgttatttgtaaatttatataggagtataagatgtgtgttttttgaaaaaaaaaatgtgaggaagacgaagatccctcatcaaagtgacctcggtaacagacgccgtcacgggcataaattcgcagcccctcggtaagcaactcccccccacaccccgagcgttgcgtcgcgtcaaccgctggggaatttaagctggtcatgcgttgcattgcatgggggccagccatttccgttgcgcgcacgggaagcctgacgcgacgccgacgcgcccccgccaccgtttcgtcgcctctccctctccctctccctctccctctctccctgccccgagagcggcggcaacccctttctccgcgcggggctcttgcctcttgcgttgcccgccacgctctcggtgctctggcagcagcgagagacgtcgctctcactccccgcggccgctatcgtctcccacttttttgttgcccgtgccgccggaggagagactgagactgagagagcaccacataaatgagctcgccgacgccattacgccccaccgccgccgccggcggcggcggcgccagcagttactacaccgtccaccggcggcgggggcgaccgggcccgggcgcgggcgcgggtttaagaaggccgcgggtgcgccggtgcaagatgaagctcatgtacttcctcatggacagggacgagcagcgcgagaagcggctggagctcgaattcgaggtcagctgctgcactgtctcttcagacttcagtcttctccatggggtggcaggcatcgatcggtgctgacgttgtgtgtgtgtgtgcaggtgtcggagctggagacggcgctcgagaaggagcagcagctgggcagggtcctgcagtgctcgctgcaggggcgcgtcgtctgccattgctgcctctccgcgctggttcctaccaacgtaagcacctctcacaccctctgcatgctcacttgcactgcactgcatcggtcgtccaatgcgaaatcatctctttagtttgctccatgcctggatgtggcggcgtctgctgaatgttcagtcccgacagtgtgagatcgatcatcatgtaattgccacgcttaattagatcgaactgattcctgcagaactatatatcccagaacattctggcttttttacagcttaattattacatgttgattgtgttggagttgtgagttgtgacacatgttaattaacactctggtcactgaaaagctgaaactctggtcagtctgaaagtctgaaccacgaggaacaaacatgattgcaagtgtactgtcactgcagtcccagaggaatttccatcatatagcatgcatttcacctcgccgcatctgaactttgatggtaatattgcacacgtgaagctgtcacctcacctcaccctcgtactcgacccaaacataacatgcactctagcagtacttgtttagttcgtgaattttttttggatttggctattgtaatattttcgtttgtattcgataattattgtccaaccaactaactaggctcaaaagattcatctcgcaaattataggtaaattgcgtaattagttattagttattttttatctatgtttaatgctttatgtatgcgtacaaagatttgacagtcatagagaatattgaaatttcttgaaaaccaaggcctcagcagtgcgatttccattccaagggccaggtgcaggaacagtgtgtcctttggattcctgcctgcctgccatccgatgtcacctgcctctgacttgtgaaccaaggacacagagttactgtgtgcgtgatctggagctagcctcgcaatctcggcttgtctgcagacaatcactattcattagtacctcttatctatcagatctggttcccttggatgctgccttcttgtatcgtactacctctatcagctggtcaatcacccaaatgcttgcgtggtagaaggggagcattaatccgacttcataattgtagcctgtaacctgcaattacattcctttttactgcattgtctcacatgaccatatcattgccttgtgtatatcaactgtaaattcctctggcagtaactttgtgcttctctgctcataccaattaccaaatgaccgcaggatctgaaagctcaacatgttgctgaactgaaatttttactttcttttatctgcactgcaatgatgtaggttaggggcctccttgcggagctcgcagtggtggaggatgagatattctacctggagaagaaggtcgacgacctgcgcctacgcctgcgccgggagcagaagtggacggaccattgcatccttcagcagcagcagcagcagagctggctgcagaaccgccagcagcggcactccgtgtccaggagggagctccagcagctacccaagctgccatgtccaggaggaagcgacgaagctctcgagcgcgagagcaaggcttctgtcggatccgccaaaggtaggaagcgacgtgacgaagtgttcggcaagagcacgtgcagattcagggctcatcggattcgtccggccggagctcattatgtctgacgcagactctgtctgatgcgccacgtcgatcatcatggtgtttttgatcaggagatgagatggagcacgtcgtcgtcagcaggagaagcagccactgccactcgtcgtcagagaatccgaacccgacgcctccggagaggaagacgacgacgtgcgtggtgagcagcagcccgaacaagctctcggaggagctcgtcaggctgatggtgaccatcttccacaagctcaacaagacgacgacgacaacggacgcggcggcggagctggagctgagcggcacgtcgtcgtcgtccaagctcaacatctcctcgtgcatcggacccaggagcctcgtccccaaggtctccgtgtccgtgaacggcgccgcggcggcggcgatgagcccgctcaagaaccggagagcggcgttgaccaagggcggcggcgcggagaaggaggctgcggccgctgggaccgggtgccagaagaggttcgtcgagttcacgagggcctccgtcgacgtcacccgcgtctcgctgtgcctcgtggacatcaagaacctgaggtgagctgagctgcactcccaatttgtctgtgcgacggtcaggagaagcttcaggtctgaataataatggcgttcgtttaattgttttgcctctgacagaggcctgatgcaaaagctttcgctcgtcgatccgagccttctgacgaacaagcagaagctggcgttttggatcaacatctacaacttctgcgtgatgcatgtactgtaagctaatcctctaatttcatcttaagcgcagcttgacgagcaattgattgcatctcctggccggctacaaaaacttcgtttcttgatgattttttcaggcgtttcttcagcacggtttacctccatctccagagaagcttcttgcgctgctgaatcaggtgcagtacaatgctctttccactgactgaaaaagaaaattgattgcttcaggctataaatctttacgcaaattggcttttcgaagaaaaatctttacacaaattggaattgctaacggcaacactgtcattcaggcttcagtgaacgttggagggacagtactgaatgtggtgtcgatcgagcacctcatcctgaggcactctcctgacgccaagcaagtatgcaagactagcccactgcatcgtctcccttttcattaaaattgtaatctgaacaagggtatctcgatgatgatgatgatgatgatgataagggtatcatggacgacgaaggacggatggatgtgctgcactcgtacgggctagggtaccccgagcccaacgtcgtcttcgcgctgtgcagaggcagccgctcgtcgccagcagtacgtttttgccgtctcgtccctgtcggcttcgatcagcgtcgtcctggaccgagaccgacctgccgtcgtttctctccttcctcacgtgctgttgcgtttgttgtgtgcagctgcgcgtgtacacggcggaggacgtgtcgaacgagctggagcgggccaaggtggagtacctggagtcgtcggtgcgcgtcgccggcggcggcaggaagcagcgcgccgccgtggtggtgcccaagctgctgcactggcacatgcgcgacttcgccgccgacgacgtcgcgtcgctgctggagtgggtgcacagccagctgcccagggcgtcgggcccgctccgccgggccatcagggaggtcatcctgggcgccaacattaccaacggcagcggcagcggcagcagggccgccacgccggcgccggcggcggccaagatggtggaggtcgagccctacgacgccgacttctgctacatgctgcccgtctggtgatcatgtatgcgggtcaagtcagtcaagttttgctgtgacgatggctgttgcttaggtttgtgtgcagcattggggcagacgtgcagtgcgagactgcgaggtggtgataatgtcgtgaaacgtgaactactaccgccgtttgatcgcgtatatagattttttgtttgggcgtcgtctttccgtgaagaagtatcaataaaaaggaaaacacctactatatatattgatatattttttattttcagtatgtccacaaaaagtggtactatttctctacttcagatttatatacttaacaaaaaaaattgtataaaaatagctgaagtggcggttgaaataatggaccaactctgggaattaatttgttgttctaggcttggaccttggaaccaggtgatggttgaactagggacaaccctttaaggccttgtttagttacaaaattttttgaaaaattgacactgtagcattttcgtttgtatttgataaatattgttcaa

SEQ ID NO: 3686 - DNA, 7903 bp, Sorghum bicolor
actgggaaaattcattgatttgcaactggtaaaatccacgaaaactttgatacacaatttgttagtaacattaatgtacttgcatttagttatatatattatacatgtggtaactaacaaattatatcaaagctttcatggactctttttctgatcataccttgcaagacatagtttatacatgagaaaaaaaagaactaccttgtgatttaatgacaccttgtcttataataagtaggatttttatggtacaagtaattgactgttctgacctggtggaataattcacaacaatcctcatgcatgcatatctttgtacagtaagagcaaaacaaatgaagcaatgcctttttaatcatcatattgcaaaagaggggggggggggggggggggctcataccctaagtgagtggtcgaatgaaattaacaaagttccatttgcaacctattactctaactctaaattacaattctaggaaagcctttttcattgggagaaacacatgtcattcgacctaatgataacataatatttagcttataaactatatctcttttggccatgcacatgatcactaacactggattaaaggcagaaagaacttagtgcattaccacctagagattgcaggtgccattagtgtcgtagatgttgttgtagatgtgtagcagattaactaacccaaagtttatatatgctaatgttaataatatcgattgtacgtgccgacatcacatttcaataacaatgcacatgaacgtacacactagatttcaatagtaatgcttcagatatcgacagacatgtaatccgagagagggaaatggtatatatagcacggaattatgagctcaaaatctaaatcctacatgaattatggaattgaaactgtgtcacatatggtggggatgtttagttctcctcttttaccaaatttttttactgttttagcctatctttcggcaaaatggatccaaatagcatgggtaaaaaagagcaaaatttgagctataaaacttttggtatttgagactcaagaggctaaaactagacaaaaacatcatgaggtgtgtgttgtgtctgtatggctaaagttttttaatacatctaaataccaagatgtttggccttgtttagttggcaaaattttttgtttttggctactatagcatttcgtttttatttgacaaacattgtccaatcacggagtaactaggctcaaaagattcatctcacaaattacaggtaactgtgcagttagtttttattttcgtctatatttaatgctccatgcatgcgaccaaagattcgatgtgacggggaatcttgaaaatttttacgaactaaacaaggccaaagtttgaataaaaaaaattatagtaaaagattagggataaaagttttgtaattccagaagcatttaaacaactccataagctaactgttaataaaatatcgtatattttgatagtttatttgttaggagaaagtcagttgacacatgtatatccatttcaatctccatggaagtagatgtacggacgacatgggaagccaagcctatctgtggggagggcccacgtggcgtctgaccggtcttcacagccgcagtttcggttaccctaaagtcaacggaaccaacaaagaacgtgcaattttctttttttttgacaacaacaaagaaagtgcattgtggcgacagcgagagaagcaaactggaaccttttgccatttaaccctgctaagatggtttaatcgcatctttttaaggtttcagttaaaccctctcagtcctcgttatttgcggactccgttcacaaacgaccacggtgacggacggcgtgtgttggaattggcgggaggcagacaacggcacggcgaatgctataaaaccggagcacaaggttcaccattgctgcttgcctctgaattgacccgtcttctccgccggacacggccagcaggcggcggcggccacagctcctctgctcgctcgcggatggacgccccggcccccacgaggggccctgcgagcttcctcacgcaggccaacgccctcctccgcaagaacctctgcttccaggtccccctcctccctcccctgtttcctcttgctttgtgctgtctgtctcccgatgaaagttagactgtttgtgcctttgctgcactgcaatgcaagaatccaaggagcacccgatgatgatcgtcgtcttcttggctgtgcgatgtgtgcagaagcggaacctcaagaccaacatcgggatcacgctcttcccggtgctcctctgcgtcatcctcgtcgtgctccagggcgtcatcgacaacgagctcgacaagcccaagtaccgctgcggttgcgcctgcgtcgacccgggcccggacgcggtcggggacgcgtgccgccggacggagtgcggcgtccagcactccaccctggaccaggtcggcagctgcccgatccctagcccgaccccgtggccggcgctggtgcaggtgccgcggcccgagtcacgcgccgtcaggaccgccggccagccgttcgacggcttgcctgacccgagctgccgggacactggctcctgccccgcggccgtcctcgtcaccggcaacaaccgctcgctagctcaaagtatacattcctctttattttctactcctttcattccatgtcaatgtcatggtagcaagcttccatgctacacaagtcagttacgtgacgatttgttgttcataatacgcgtgctgttgccgtgtgttcttgtttcaactggcagacctttcgggtggactgtttcctgcttcgacttcctccttgaatttgacagattatctggatgaactctccaggatcgttgctgtgagttcctgccagcataactgcaggccttgaatatgtagtttattctttgttgcacatactatgttcattttcctcttgttggtaatggatggagttcttggttggattggttctcttagggatcggacacgtggccatggacaacagaattaatagaatcagcgtttatcccagggaataacttgtatcggctgcaatctcggtgtttgtccaatctaacacagacagtttcattcaatgccggggtcataccccttcagctcagtaagtagggccttgtttagtttcgaaaactgaaaagttttcggtactgtagcattttcgtttgtttgtgataaatattatccaatcatagactaactaggattaaaagattcatctcgtgatttacagctaaactgtgtaattagtttttgttttcgtctatatttaatgtttcatacatgtgccacaagattcgatgtgacgaggaatcttgaaaactttttggttttcagagtgaactaaacaaggcctagcatttcctaattcctaccttggtcttggtggtccactccttttcgttttaaagatgcatgaacataaggataggaaaggcacaactgaatacttcgtcaatattgtctacaggataatcgtaggaaataaaatttgtgcctcatttttgtatatgctcatgatgaattcacttcttcagaacattgtaccaatatatatttgttggttctattcacaaaagggccaactgatcagttgtccaagtgtcatcaaatgttgcaatgttatctatgactgggtagatgggatttaatttatccccctaaacaagctagatattaatttttcttttcctagagaggttttttctgttactgttgaacttttttgctatatacaaggatgtcaacttttttgtacatattgttttctatacttgatatattttctatttctgattattttctctttcaaatgtttagacatagactgcgttcagggtttgccactatggcgtgaaagtgcatcatttgtaaatgatgaactctttaagggttacagacaaaatggtggaggtagtggaggtgggaagacaaatgaatttgttgcaggtgatctaatcttctgatcagacttcaaccaaatgtttcctcttcattgctttcagttttcttatgtgtataacttgcttctgtccaggttatgattttctgaacacaaatatgaatggtcttgaaatgaatatttggtacaactctacctataacaacaacaccgcatacgtatctatttcattactacgagttccacgcttggttaatgcggtgggtttgtactacagcacagtttcatgaacagatattcatctgtgtgcaactacctctaacacttgatttcttacctataggcatcaaatgagtacattaaatttctcagaggaagtggagtggaaatgttgcttcaatatgttaaagagatgcccaaagtaggaacaaagctgaaatttgacctctcttctcttcttggtgcattgttcttcacgtggatcattgaactactatttccagtgagtgcaagatatgaccttttcttaaggaaagaggtaaaaatggattaaatattaagtcaatgttacactttttgcaggtcatattaacatatctcgtgtatgagaagcaacagaagctgaaaattatgatgaagatgcatggtctgaaggatggtccttactggctaatctcctatttttacttctttgccctgtcggctatctacatgatactgtttgtgatttttggctccttgatcggtaattaactcgaaatttattcaagttaatgcaaattatgcaaatgaagtatgtacattgaaatcaactttcctcgatgtatgcaggtctagatttctttaggaaaaatgactatagccttcaatttgtcttctacttcatctacataaacctgcagatttcacttgcatttcttgtagcttccttcttttctgctgtcaaaacagccacaggtttgtgctcggctatttatcttctgaagaaattctgtggtgcttaaaaccaatgatctgattgactgttttgagaatcattgtgctgcagttgttggttacatctatgtatttggctctggcttactaggggaatttcttcttcgcttttttgttgaggatactggttttccaagtaaggttctatcgtttattactactatttgactattggacaactctcttttggttttatgcatgacgatatctttgtttatgtacaaagagggttggatagttttaatggagatcatccctggattttcattgttccgaggattatatgagtttggtcaatatgcatctgctggaaactcaatggggaccactggtatgaaatggagtaatctagatgactctcttaatggaatgcgtggtgttttgattattatggttgtggagtgggcaatacttctacccttggcattctatgtggatcaagtctcgtcgctgggtggtggattcaggaaaaattcctttttcttcttgagctgctttaaaaggcgtgctctatcattgcggagatatagctttaggagacaagaatctaaagtagtcgttgaaatggacaatcctgatgctgttcaagaagtaagttactcccttacattgtctctcaattataccttctgtattcttattttctaaattatgttcagagagaggtggttgagcaacttctgctggaacccattgcaaaccaagcgatcctctctgataacctcaaaaaggtttaccatggaaaagatggaaatcctgacaaacttgctgtccgagggttgtctcttgccataccaaaaggccagtgttttggaatgcttggcccgaatggagctgggaaaacatcgttcatcagtatggtacatcaatatagcctattacatttattttttaaaaaaatttaggtgagagtgcactcctcagtgacgtatttttccctgcagatgattgggcttattccaccaacatctggtaccgcctatgtacatggaatggatataaggactgatatggatgagatctatactaacatgggtgtatgcccacagcatgagtaaggccttgctctcaaatttatattttctatccgaaaccccctgagattaccattgcattctagttctcatttcccttcactttgatgcagcttactttgggaaacattaacaggaagagagcacctattgttttacgggagacttaagaatcttaaaggcactgaattattgaaggtatagttctgtaattggcatgttttaatattagttcctatttaccttcactgagaaatagtctgtgttgaaaagtcatgtgcaatgaaaaatgcaagcaatgtttgttgaccctatactgcagcaaaaattcacatgcctctagagacatgtatacgaaggccaggcctggtgcagtggtgagagttgtctcactgagtcaccaggtcgtgggatcgaagcaacctctctgcagattttgcggggggaaggcttgcctcgttttttcccttccccggaccccactcatgtgggaggctccggcactgggtctgactttaaagacatgtatacatctatactgagtttacaatattctgtactgcaggctgttgatgactctctgaagagtgttaatctgtttcatggtggcgttggtgataagcaagtgggaaagtacagtgggggcatgaaacgaaggcttagtgttgccatctcattaattggggatcccaaagtaccactcccacttctgtttatgttttggggtgcaaattatacattggcatgtgcaacttataatttgacacctttaggtggttttcatggatgagccaagcaccggacttgatccagcatcaagaaacaatctgtggagtgttgtgaaggaggcaaagagaaaccgtgccatcattcttacaagtactgagctctccttatactctgtctattgcttctatagttctatatacacaataatggcaactgatgaagtaatttttgacagcacactcaatggaggaggcagaagtactatgtgatagacttggcatttttgtcgatggtggtttccagtgccttggtaacccaaaagaggtaacttacctatttacatgtatggagcagacatgtacatttttgcgtagctgtttattgatcactttgcaaatgtttgccatgaattgttttgtagctgaaagctagatatggcggcacctatgtactgacaatgacaacatcttcggagaatgaaaaggaggttgagcagcttgttcaccacctatcaccaaatgcgagcaggatataccacatttcaggaacccagaaatttgagctgccaaagcaggacttgaagattgctgatgtattccatgccgtcgagagtgcaaaatgccggttcaacatatatgcttggggcctggttgacaccaccttggaggatgtctttattaaggttgccaagggagcacaagcattcaatgttgttacgtaagtagtataatcgatttatagatgtcactctcttttttgttgtggaatatgtggtgtttatgcttgtctgaactatggttatagtctccataggattgaggttgtggtgtatattttagtatagttaagttgtatatatattctgtaatttgaatgtcatgtgttgtcccttaacaaatatagatatactttgttcatagtgttaaatctttataatgttcgtaagagaagtctagtcgaatacaaaaaggatccacgccaccatcgcagcgctcatgcgatatcttaaatgggtttcatctaaataaaactttataaaactctatctctctctcttcataattaacgaaccaagtcatcaaatctcctgcgatgtgttaaaatatttaatgcaaataaaactcagattaaatttccattgagactaggcttgacaagcagcttactttaaaaaataaaaacattcaatgaaagaaagtcttcacttttgtttgcattatt

SEQ ID NO: 3687 - DNA, 3364 bp, Arabidopsis thaliana
gaattttaggcgacaaagagagagagagaaaagaagacgtgtttgatcttctctttttcttgatactgttttcgctacaagtgacgtgtttatgttagaggagagtacatgtgactctgagagtgtatgtattttattatataaatgaaagcagtcacagtttaaaggaaaagtaaagcagtggaggctccggtgtcgtctcttttgctctgctttgaaagcggtttcaacgagataatcagagcaagaagacaactggtgctctgctttctcgccacgtagtttctagagaaaaaaatgatttttgattttttgcatgatttcatgaaaaggaatgaataaccgatcaaataatatttttaattcctaaacagatgtgtgaatcaaaattttgatggatctcttctgagttacttttaatatgtttgggcctacgtgaaccttattgggcctctaatctatataaattacttttattgtatctaaagagaaaaaatcagaatatgttttggtcttttgggcctttttggtaagctgagcacaattgtgcattttagtaatttaggagattcgctcggatctacattgaattgttcggaagaaagaagaaggaattgtttggatctttgggaatgttaaaacaggctatttgggcccaatctagcccagtccaacacatcgaagcacacaagttgctaaattggtccgattagtcttagagcttgattggttctccctctgtcacccgcaaacgctgcgtttgcgggtggtagcagttgttagcgtttgacaccaatcataaaaaccgttagataccgctttggaccgctcgaaatcgccatattttaaaagttccttcccgcaagcgtttgcggttgcgggcggtagcggttaggttaatttttttttttaattaactaaaataattatgtcttccacccaaaccctatatatcttattcttatcagaaaatcctaatcaatatattgaaaccctattctctcaattatggcatctacccaaactaacgaaaatcaaaatcaaaatcaagaatcaaacgtaagtatgatctatcctttcatccattcattagctagtgtaattctctgagtattttatggcatcgtcattttatttattttgtatttttttgagttttttgattgaatacatgttttgatttgttttctcgattagaaaattatttggtcagacgagatgacccgtttcttgttagaactttatcatatgtatagaggcaatccggaaaacccacgagttcaacgttatttacagtttattacactacttgatgcaatttttggtgatgtaccaaatgcataaagtactaagctttttcttacaaaatttatttatttttgaatttaatgttttatttatggttttaattattaagcatgtttaatttttctaatattatcaatttatcataataatatattgtatttttttcttttactagtaatatattatatttattttggttattttttatttaattactatcgcacccgctggtttaccaatcataaaactcccgcaaacgcactcattatcaaacgctcaaccagtcgttcaaaacacttgataacgcttgaaaccgcaaccgcctgtttccgcaaactcccgcaaccgcaaccgcatccgctgcgtttaaaccagtcaggcccttatttgttagagacatccgaacttttaaaagttaaaactgatatgcttgtccatccataatgttagaaccgtctttggaattggtaatccacacactataatgcgactcacgtcgggacaataacactattgtctaccgtgcatacacgttgttcttatttcaagttttgtttggttttactattacaagttgctcgttttcttattagttaatgtacactaaaccaaataatttaattagaaaattaaccttctttttcaacgcaattaatctataaaacccaatagttagttttcaaaaaacttcacttgcttaagcaacatataaacaaagcaagcaaaaaaaaaaaatggctttctcacgcctctcatttgcagcttctctcatcgtcttctcatctctaatcatatcttcagttgcttattacggcaatgaagctgacccggagaccggaaaattgattcccatcgccgttgaagggatcatcaagtgcaagtccggtggcaaaacttacccaattcaaggtaacataacttctttaattatatataccaagacgaattggtctaatggtaggagaaaattagagcatagtaaggtctaaccaaacgaatatcgtattgttgtttgtttgcgacaggtgcaacggcaagaattgcgtgtgtgaaggtcgatgcatatgggaatgagttagttccaatatcgatattgagcagcaaaactgatgctaaaggttacttcatcgccacgatattcccttcgcagcttcgtgcaggaaggacagtgaccaaatgcaaaacttacctttacaaatctccactcgctgattgcgattttccgaccgatgtgaacaaaggtgttagaggacagccattgagcacgtaccgtattcttcaagacaagagcttcaagctttactgggctggtcctttcttctacacgtctgaacctacttactactaattatgatcttctgatgaacatgaaatttaacatgttcttggagaatcatttttcgtttgtttgattattcgtcgtataacgttgtctgcaaaatgatctaagagtttgttttctttatcttatatttcatgttgcatatatgactttgtcatgtatcttatgttttaatattttcttggtaaatgtatgggtttattggatttgttctaatcatctaactgcttattttgactatgcataatggtgatcgtacttaattgtgttgaagctcatggaggcatcggtattaatatttagttaactaccataaaatgttacacaagttttagtttcaaaatatcataaatttggaaaaatatttatttttttatttcttaaacaagttttttttggcatccgaaatttattataataaaaaaaaagatgaaactaagcctgcaaaatgttgaaatccctagagacaataatcctaaagagaaacacttttggaaaaaaacctaaaaatacaaaccaaaacattaaagctaagtttttatcaattaaatcttaatcatatttaccagttatttcccaagatcagaaattgtcttcatgtcgatggaaaccacaaacctaaatttacaatccaattttttaaaaatcaaaatggcaaaatcagaggtatttttcgaattttattggtcataagaaatggtatttttgagaacc

SEQ ID NO: 3688 - DNA, 4074 bp, Arabidopsis thaliana
atgtacaccattaatcattattgtacaaataataatatttttaatgtgttttcacaaaattaatattactaatatgctacgaaaattaacatactacgaaaaaatgtgaattaatattactttgcctgtaaatttttacctccataataatattagcataccacgaaaaaatgtaacgtatttcttttggtgtaatgtgaattttgctacggtaaacttactttacaaagaaagaagagcgttttccaagtggaaaataatacattttgcggtttatatattataggaacgactattgatttgtttttttggttgtagcaccgtcacgagtctaaagttgatgaaaggagagggtgaagcaaatgagaatgttctgaaagattgcgtcacaggctttgcgattgcacaattacgacttcaaggagccaacatcgatttgataacccttaattacgataaagcgtacgaattggtgaaaactgcgttaaactatcctcggacttgcgaagaaaatctccaaaaactcaagttcaaagattcatctgatgtttatgacgatatcttggcatatagccaactcacctctgttgctaagacgttgatccaccgtctctagatcaatatatatgtcgatctggttatcaaaaatatatttatgtcgatcgtttgctaccactaataaaataaaactccattatgtatgtcacgcgtgatttaatttcactcatcaacaaataaaataaaataaaataaaatgtttagaaagtttatttatttaatttagtaaaaagaatctggagataaatcttcaatcatgttgaaaagtatgattagggggaaaagagaaaaagaaaaaagagtatggttaggacttaggagagtatataccatatgcattaacgtacatacacacgattatcaacatcattggagacacatcaaataaaactatataataacgaaagttatgttttgtatatttgatattataatacgaaattttacatattatctgcatgtattttaataattattctaattatatttatctttctttttgtttatgtggaacttgtcttgcgacttatgttatgtaatagtgggaaaccactcggcgtagacttgttattatctgtttttttctttcttggattggatttgatagacaacatataaccatgtgaccatgccctagaaatatagcgttagaaattcacactcgattttgaacttcaaagattttttatttgtttttacgtaagaaatgttgtctatttggagtgttacttttttcatgtagcagaaaaacattttcgtgtatgattggccttttggatattttgaatgttgttctattttcttggctatgtgccctttcacactacctattgaagacaagtatattgaattgtgcaagctgttttcgatttataaaatcgatcgattgcttattacgtgagcaccatgaaccataagtgttatcacatcaaatttttgtaactagtatcactaaatcctttgatcagcaaaattctcagaagaaaaaaaaatgtcaccgtacgtgtaagcattgactagcgttacttaaatcgatattatgttgtccgtacatatataatcggttttgaccaagttcattttacgtcatcggttataggtaaaccaaatgtttttacacgagaaattcgttaacttgaatctcatagatcatatctaaactatagccctgcatatgaaaggcataatactatgataaattccaagattctattgagaaatataaaagatgtttaattaaaacttacaagttgaagcaaacaaactctaattaatgtttctatatggattatatatgtatctgataagaatttgaatctgaacaaaaaaaaaaaaaggatatatacactatgacatggtcaatttgatgtatataaactaaagatgactcacgaaatgacatccattttattttattttcaataattttgtaacataagaagatgtccacacataaattgtatataaatatctttgtatggcaatatgccaagataaaacaaaacaatactatcttgaaaatgtcttcaccacagttgcaaagagctatggagaatccaactcttgagctcaaaattgtatcagctagtgacgtcaaccatatcgatgccacggacaaaatggacgtatacgcagtcgtttcaatcaacggcgacacaacacaacaaaaacaagcggccaaaactcccattgattacgatggtggttctaatccgacgtggaatcacaccgttaagttctccgtcaacgagagagaagccaacgaaggcctattaactataacggtcaagctatttagctactggctagaaggtgataatgacctgtatttgggagaagtcaacgtctcggttcaggatcttcttgcctcaaatccgattccaccgtttactaacggtaacatcaacaaaatgaagtcaatgacttgccctatcaaggccaccgaaaaaagtaccaacacaacggtgagcctttcataccggtttaaacctgtaccggttgaggaattttaccctccgtcaccggattctttgccatcgattggtaaacccgtttaccgagacctggatccagcaaaattaagtcagcctcttgtattttctcctcggtttcaagccaccacgacgaaactgatcctagagctcgtgatcaaattcgccaagaacatcgaagatgtcaacgccttctcgtccatggacgtatacgcttcggttgcgattcttaaggacagaaaagttaagaataggatcaacacaccggtggcttttgccgcttatacaaatccaaagtggaatcaaatgatgaaattttctattgatgagaagtcagctcaagaagggcggttgatgctccttgtggagttgatgagccaccggcctttccttggtgataaggagattggatttgttagacttccgatgcaacagttattggtctcaaatccgccttatccgttgaccgacaatggtgatgctaacggtatgaagttggagacacatgctttgacgggtccttatggaaaaaaaggtgtcgtgagcttcacgtataggtttcttgcagaacaagttacagcaccatctacaccaggccagccatatattatgtatgtaccggtatcgcctcagccatacgcgtcacctgatcagcttcaggtgacctcgagttacgtgactgttcaaccaggggctaattctgggccaagcaacggtctagtaccaatatttatgccgcctacatatcaatcacatggataccaacaatattcaccaaggaagtcgaaatcgcaactacaaccgtcaccacgacagttgcagcttcaacccctgcgtctgcagccgctctcgcagtaaataccggatacacaatcacatggataccaacaggcaattacaatccttagcataatgtgtcgcacccgttttttatttatatgacttggcttatcatttcattttattttgttccttgtttttaattagcttgaaactcaacataaacttaatttaatttgcttttaatcatcgtatactttgttctgatatattatatttcttgttacatttttaaaaataatttcccctttataattgaagtattttattattgtcccttctcccccggattggatccaaccaggttatcttactataatatgaaagtatggttggcaattaaaaagcaagtataataccactcgacaaagacatcttatttctcttaggaaatattctatatttaacaaatttgatcttcaaatctatatatgaattttcaaatattattataaattactactatatatataactggccaaattgatgaatacaaatagctaacgttgctcgagaaatgacatccatttatcttattttcctataataagaaaatgtccacgcagttgtgtttattaatatctttgttcttttttttctttacaacattactcagtttaagatacgtgcatatggcaaatatatgttttgatattttatccttcataaacaaattagttttagg

SEQ ID NO: 3689 - DNA, 5801 bp, Sorghum bicolor
gtcattaattacaaataattcttcactaagcttgttaaagcaatgttgttagctgatttgttatgagaaaaaaatattgttaaatagctgatagattcgacggataatctcacgtcaataggtcggtccaggtcgagctgatccgtgcgcgtcatgcccatgcgctatacaagggctgtagtcttggccaagcctccaaagaaaagcactgaacatgattatcttatcccaattcctaagccatggatggatatctccttttttgcgttgggccttgtttactttcaccctaaaagctaaacttttttgagatttcccatcacatcaaatctttagacacatgcatagaatattaaatatagacgaaaataaaaactaattgcacagtttggccggaattgacgaatcgaatcttttgagcctagttagttcatagttggacaataattatcacaaataaatgaaagtgttatagtgtcgcgaattttttttttgttgaggaactaaacacggccttggtgtggtgaatgaatctacagaagcaaaggatttttgtagcttacgcgccgccgattcttggtcctcggcggatgcaatgcaagcgaacgggttttggttttggcaagtaaagatgacgttgacgtgtcctacggacgtggaatgcgtgctttcacggaacggcggtctcttgcgggcgtggtaatcctaatctggggatgattgctgtgccaagcatgccattactagttttttcttttgcgatgttcagcgatcgactgtcggtctcaactctgaacacagcagcgctaacagcaccagcttagtatcgatcatgccaaatcatcgttttgctcgcaaacaaacaaaaaagagatcattgctctggcccgtgacgcagtcagttgggctgtagtagaaaccgaaatctaacagcacggccgttcgcaccgacctctctcacgtagagaagctgaacctaatttgccatggttagaaacttgactcaaatcctactcgatatgtttagttaaaaagtagttctcataaataggacgagtagttaaatttgaaattaaataagtcaaacaacttataatttagaacaaaagaagtataattctaattttacttttaggtcttgtttagttccgaaaaaatttcggatttcgctaccctagcactttcgtttttatttgacaaatattgttcaatcataaactaactaggatcaaaagattcgtctcgtgatttacagacaaactttgtaattagtttttgttttcgtctatatttagtacttcatgtatgtaccgcaagattcgatgtgacggagaatcttgaaaactttttggatttcagagtgaactaaacaagggcttagctaaataaatgttctcgtccaaaatcaaatttaagactgaaaaacaataagtgttttttctactgagggagtaataatggttagtgcaagaacgattatactttccttggctccactcaacaaggcatgagaaatcggaaacaacaattataccgagctaaggaatggatcgcgtcattcaatcaagaaaaagtagagaaacaaagaagaactcaatttcgcatttatctaccgttttggtgctagcatctcccgccccacgcactctctcgtctcaccctcaaacccttccctttacgtcttttaacaagcaagaaatctcccccaggtgattccaaaccacctccctctttctctctctctcgggtttctccctccgtctctctgcgcctcagacctcagttcgctcatccccttccccattcacactcgcctgctcccatagccacttccccccccccccccccccccaaatgccattggggccccaatccaagctcaaagtctcaggagcttcgtccccgaggcctgaatccatgcccccactatcctcactcccctggattggtataaaacccactggatcttgggtctggcccatctaatctgccaaggaaacatggcccggccccccaaaaccaccgggattgccttctccccccccctggggggaaccgccgccgccccctcggaactccttttcctcaaatccacgctccccgaacccgccgccgttgtcgccgaattggaaaggaacatcagtctttttcaaactgttggcgctgctgcaaagttgcagccttttgttttttataaaaaaaaaaaaggggggtttcgctgatgctgaatgcgttgccccgtctactatgacgggcagcaaggtggcgatgtcgcggcggcggatgcaggaggccggcggggccagcggcggcggcgggtgcctgacgggcaacccaatcgacgactgctggcggtgctctgggacggactggcggcaggaccggcagcggcttgcggactgcggcatcgggttcgggcgcaacgcgctgggcggcaagggcggtccggtgtacgtggtgacggactcgtcggacggcgaccccgtgaacccggtccccggcacgctccggcacgccgccatccaggaaggcccgctgtggatcgtgttcgcgtcggacatggccatccgcctgaacgaggagctgctggtgaacagctacaagaccatcgacgggcggggcgcgcgcgtgcacatcggcggcggcggcgcgtgcatcacgctgcagtacgtgtccaacgtgatcatccacaacgtgcacgtccacgactgcgtccccgccggcaacgccaacgtgcggtcctcgccgacgcactacgggtggcgcaccaggtcggacggcgacggcatctcgctgttcggggcacgggacgtgtgggtggaccactgcgcgctgtggcggtgcgccgacgggctggtggacgccatcatggggtcgacggccatcaccgtgtccaacagctacttcgcgcaccacgacgaggtgatgctgctgggcgccagcgacgcgtacctgccggactccgggatgcaggtcaccatcgcgttcaaccggttcggccccgggctggtgcagcggatgccgcgatgccggcgagggtacttccacatcgtcaacaacgactacacgtcgtgggagatgtacgccatcggcggcagcgcaaaccccaccatcaacagccagggcaaccgctacatcgcgcccggcgacccaaacgccaaggaggtgagcatgccatgcccattcgccctctgccatcagaactgctgctgctgctgctgctgctggcttctcgccgtcatgccgtgccgtgtctgctctggccgctgccgtgggttacgcggcgctgctcgcctgctctgttctttgcttggagggcagagcagggcacgggcagcagcaaacacgcaggcttggtttccattcttttattttgcagcatatatattgaccactgtcccaagtcgagttgcagaaaaagggacatttctaggcatttttgcagcatattgacctgtttgttcgatctggattgaaagattgcctgcctgtctgcctgcggtgcggggaatgtttggtgcatcttcctcatctttttcctttgacacaaacaccacctcgcatcatgttttccccaatcggccgggggtcccagccagtgttgccgaccccagcaagcagcagcacccgaggcgcgtgcgggagctggcactggcagtgttcccgtcgcccgtgcgcgcgggcaccagcacgcaggaacgagagatcgagttggaagctgatgaatgcgacggtacgtgacgtgcaattgtgtgtggcatggcaggtgacgaagcgggtggacacggcggagggtcagtggaacgggtggaactggcggacggagggcgacatgatggtgaacggcgccttcttcgtgccgtccggagagggcctggaggagatctacgacaaggcgtccagcaccgacccaaagtcgtcggcgctcgtcgacgtgctcacgcagaacgccggcgtcctcggcgatcccaggtaccatctgaccctctcccacaaggccctggtggaattttgggaaatatctctcggacgggtggaccccgggtaccctacgtgggcccgcgtaaggacgccccccgctcgtctttttatactactatacgcggcgcttttgacttttgttaccttcctccaacggccatcatcgggtccgggtccgacgccgcacgccggagtgccggagagtgcggcccctgcttgactgactctgcgggaaagcgagacgaaatagtccctgggagcgagctgggacccgggtagtttgcatgggacatggcgtgcggtgcggcggtaggcagtctgcgtctccggtccggccacatgcgcgccaccggtccatggttttggttttgtcgcccggatcctgcgctctcttgcaccctgtttgtgaacttgtccactctcccttgtccctgacctgtttgtgtgtgcgagcgagtgaccttgtgctgtggagtgtggaccagcaccgtcgccacttggggttggggagaggctgctctctgcggcatgacgagtggctgtgattcagggctgcgatgctccgtgattcattcatttcagtcattcttatgcacatgctagaatagcaattatccttctactggcactgggatgctatacactttcagttcagcgttcttgttcttgatctcaatagtgtcctttgctaaaatagtgaatcttgctgctaagtatcataacaagtgaccttttaggaacggtccaaccggaacgaccgaaccgaacggttcactcctggccccactctcccagctcagcgaaaaagaaactgccgtgtcctgtggcttgtggcttttttcggacgttctattccatcaccctcccctttcccagtcctagagagcacgttcctcggaatcgaattcctattccttgtgcgctcgtgacagcggtggtagatctaagcttcaccagcacttaaacacacacagaagagtctatctaactcgcctccagtttgcacttgtgtgggataatttagtacagtagatgctattctcgcggtgtatattattgtttatgtgtttttgctttttgtaataacgagtagtgaggagctcattctgttttggcaggaacgatgccgaagaaaccgggtacaggggtgtcaactacgccggcgtgggaactggcggcggtggcggcaacggctacggctacctcgggatggtctatgccaacggtggcggcgatcggagaagcagatcacagtcggcgctgtcattgatttcttcagttaccaccctcattgcgctcggatgcttgcgcttgttgtaacataacttatatagttcatcctagcttcattcaggcgcttcgttatgattctcaattggaaaagttagcaaaatgggagaagggaaagcttgtagctggggtggtggtagtagtagcagcagcagcagcagcagcctagtagggaggtaggcaggcaacagaaaccatgtgtaaagttgcacatggctgggaggatattgccaagctaatcactgtacttcttacaaggagaaatggacgattccatcctaactttactacctctggtctctctgtgatctctaagacattataattctgggagcaaaaatgaaatggaaaagcaagttcaaccaacataaaagtggcagagaagcagcgccatgactaaatcatagccacatttaacactataacactaattcaaaaattccaaaaattcactgcttcatcgactatataaaagccatatgacatatggaataatataaaaataacaacatagcatctaaatcagatca

SEQ ID NO: 3690 - DNA, 5698 bp, Sorghum bicolor
gcgccgatcacatatgttttctcttcattctacatcaatcataacccttcatgtctttgttctcgtatagatatggtttttaatttagactcggtttctataatttttgctctctctttaataactatcttaccacattagtaaaaatgtttaggtgccagtatacctaatgtctatataaattatgatattttttgcattgagtatcgtcacccaaaatagaagacccatttgtcctttgggtagcactacaggtaaaaggttctatacctatttttagtcttttctaacaacacgacctaaaagacaacactctctgcaaatgggtctcgaggagagaggatatccaaatttggattatgcctctcctaatatccaaaatggatcttctgtatggatactctgttgaaggctatagatattgtgttggagagcccttttaggtttaggttatgctgttggagacagcaaatagatcttttaaatatatacggtagttaacttgaaagcatgggctctggagacaattatttttgaatggttgaacgcatctcgcagggattattcctagaatatacccagccgccatgaagatccctccaacttgtgggctgtgtgccatgccaaggcctcgcagcgcagccgcagacaccccgtgtgcccacagaagatccgttcccgcgcccggctccgcgcggcccagctttctccgggacagtttcgaagcggggcccacaccaccccgcgggaacgggaagcggcgaaagagaacagcggcgcaggcggaggcgagtcgtggcctgtgcgtgtgcggtgcggcgcctgtgggcccgtgtggtccgtgctgtggccttgtggctgcgtgacgcggcggttgggtgtgggggccaacggccaacagggaagcggaagcggaagacccgcacggcacgcgagggataattccagtggcgggaagggaatattcggagcttggttcgggtcgcccatgaatttcgatcctcctctctattttccgattctacccctgcccccgtcgccgtttatacctgcgctgcgttgccctccctgctctggtttgtttgggactctggttttggagcaaaatagattaatcgaagagtgtttttaactctcctctctctctctctccctctgtgattgctagaggtatgtatactttatccaatccttctttaaaaccttttgtattaaacagtgcgtatgtttctttctatgcacaattgtatgtcgtttttgctctgttctatattctagactaaatttatctaattttataaaaaaaatacagtaatgtctatatactatgtatcaaataaatatataaaaatatatatttttattatgtatctgattaatttagctacgtattgtaggtatatgtgcattttttataatcccgatcaaagttacagagtttgatctatgataaagctaaaacgatttattagtacaacacatgaagtaatagagcacatccatacttttcatagtctaatataatagaagctatattatgtttttttttaaaaaaaaaggcatggcaacattggacggcgcattgaaggaaatcaagacaatcagcttcttccaacgtggattagagacattggacacgaggtttcatcataacacacaagtgagcaaagctagtggagttacaaacaggacttgcacttggtcgtatgataatttgtcggtttacctaattgccctgtccgcctttgatttggcaaaatgccaagtgataaacaaacacccatcgtgatccatgatgccagcttaggaaaagggccttcctttcgtggccgtgtgcgtggtgtcagcaaagcaaaccactttgttgttgtctgcatccctccaagagcaccaaagcaaaaggggtagttccgtccaagggcatcaccgtaaatacccccggcgcagcttccaataaatgcccctcgcctggtggcttcgcagcactcgcaccacccaaaccgagcttcaagaccaccacgacgagcaagaaagaagcgcacgggcggcgggggggcttctttctccttctccacgctacttcccccattgcgtgattccgccgcgtcgcgtcgcgtgtgcatttgcgcggcgcccaatccgtccccggcgcaggagccgccctctccgatccggcgaagatcggccgggctctgaaaaaggggaaggaaaagaaaggtccgtgctttgtcctgttcttgatctctgcggcggcgattctgggctgaatctgcagcttgttttgttggttcttccttcttcgatttcgatgttattgtttttcacggcggtgtgtgtggttatgtgctactgtaatgggttttaggccttttagggggtttggggtggaaattgagggaaattttggtgaaggatataatgggagtttggtacaaggtggtgttttttgttacatccctgagttcggggacgtcgtcaggtgtgagatcatacctgttgagttggaaataggatggggccagctcctgtgacgggacttgtgaaatctttgcaaggacggtggagtcgaagtgtcaaaatcagctttttacctgcgtccacatggaaacttccttcttcttgtgcaggtttcataaagtatatgctacttgagactcgggagttaaagtctggttcattatcgtctgccacacacgcagttaggctaatattaggaatttacaaaggcactgatttggtgaaattttgatcagtggggcattttgggccatgcaaatttaatcactgtgtgtctctgatccagagtcacagagtaacaaatgtcttgcatctgtgatcattgaatttgactactaaataaccaggttaatttgaaatatgctgagatgctttggatcattcagtgcatcagtttccctcttttttgtggtgtaactgaaacagctgtacgagactgcattgagatcactgttttccaagctttttttttaactgtgttttcccaaccttttagagcatgattgcatactatcaactaagagttgcataacatctgctgtctcaataatcaacatagaattcataagctccctgcacgcctattatcctgattacatcttcctttgttgctttcaggtggtaatcgctgttgattccagaaaggtgtccctgcactgtgccctttctcagcaatcttgtattctcatgtctcactctcacgagatgacgagtaggaaacctcctggtcttcagttacttggtggtgccggttcactaagaacataccagacactagtcttggtccttacattctttgcatacacatgctttcatatgactcggaagatcacaagcatcgttaagagcgctctcgatccccagacgaaggttggattctcccactggggacgactgcacatgagcaagagcaacgctcttaacactggctggttgccatttaacactgttgatggttcagcattacttggtgagatagatgttgcgttccttgctgtatattccatcgggatgttctttgctggacatattggggatcgcatggatttgaggatctttctgacaattggcatgattggcactgccatattcacaactctctttggtgctggatattggctgaatgtccacagcttctactatttcttggttattcagatgctttctggcctgtttcaatcaattgggtggccttcagttgttgcggttgttggtaactggtttgggaagagcaagagggggttaatcatgggcatatggaatgcacacacttctattgggaatatagctggctcactgcttgctgcgttcctcctgaagtttgggtggggctggtcatttgccgtccccagccttatcatggctcttgttggtttgatggtgtatattttcttgccggttaatcctgaggtaatggagatagacattgacagtggtgagtttaattgtgagaaggacgctgtgaaggagccccttttggaaccaggccaagaagtgaaacatcaggcagtgggtttcttagaggcatggaggattcctggagttgcgccatttgctctttgcctcttcttctccaaattggttgcatataccttcctgtattggctaccgttctacatcagccatacacgtaagtcctcatattcaaccttcgaatctgtctgacatcatgctcatttgatggttcagtctacatattagaagcctttttctagaactgcaactgttccttggaatggcctttctaataggccttcacttgtttcaggtattggtggtcagtacctctctgatgctatggctggcagcttatcaacaatctttgatgttggtggtgtgttgggaggagtccttgccggtcacatctctgatcgcttaaatgcgcgagcaatcactgctgcaagcttcatgtactgtgcgatacctgccctcttcctgtaccgcacatatggaagcatgtcgataatgtggaacatctccctcatgttcatcactggaatgtttgtgaatgggccttatgccctgatcacaactgcagtgtcagctgatcttggcacccacagctctttgaatggcaactcccgagcactggccactgtgacagcaataattgatgggacggggtctgtcggagctgccatcggaccgttgctaacaggatacatctcatcgaagagctggagtgctgtgttcacaatgttgatggcagcagctctccttgctgggctcctcttgacaaagcttgtatgtgccgaactaaaaggaaaaacaccttccaacgcgagcaaggatgtcgccgatgcagaaggtacctactcagatgaagtgtaaatccaaagctgattgcgccatggaagcagttccagtgaatgcctactaagaagttgaccggttgctgcttcccactgcctttcatggtggctagcagtctgaagactgaaaagggaaagagatttggctgctgagtgacttgctcaaatgccacttcagatgattttttgtgtctgttcaggtatagaggcgatagaaggcaaaagtgtgcgctttagattagttttcaggtttactagatagaggtgagaacccctcaaagctctagagcccaaatataggcacattttaggcaccttgtattgtaaatatgttgggcaataaggtcgggcttgtactggttgcactgctgctagttacgtaattgtatgtgattgttgttagatctgggtagattgaaggggggatgaacaacgacccttctgtacaaagattatacctgaatggccagctctgcatttacttggaatgttggccttcttttgtacgtgtaaacagtgtcaagaagattcagagaactttaaattgaagcaccagggaagtgttgattcaaaagacattgtgtacatgtttcttcagttgagtttttctttattacagtatttagcaaattttgaaacttggaagttataggcactcgtttgctagaaacagacagtgacacaggtgccagataactgcatcgacattctgcaggttggggaaaaaaaacatagccagtctctctaatctatcacactgttgtgttggaggctaatgctatacagcagattgctacataaccaggcaccagcaacttctttgcaatcaccttggacggtattcattgcagaagatttgacaaactgtt

SEQ ID NO: 3691 - DNA, 6557 bp, Sorghum bicolor
cgtgctgctagagctggtcgccgggaggccagccaacctgcgtgacccagagaacaccagcatcattcattgggcgcggcagcggctagcccagggcaacatcgaggccgtggtggaccctcgcatgggtggcaaccatgacatcaacagcgtgtggaaggtcgcgaatatcgcgctcagctgcaccgcggaagcgtcggcggagaggcccaccatgaccgacgtggtggccgagcttcaggagtgcctcgagctggagaagggccacgccagcggggacgacacgagtggccacttctattccgccaacggcagcgaccggccgcaggacaatgatcactccactgatgtaagccggagtagcactactttcgaggtggaggtggagcgtaatttcgggagggtgccaacaatgcccacaggtccagcagtacgatgaagagctttgctgcctagggctcgtagcgtgagagtagctagtctcttacatttattggatcgttttgctttaaaacatcaaatggtggtaatttgtgcctagggccttgtttagtttcaaatttttttggaaaattaacactgtagcacttttgtttgtatttgacaaatattgttcaatcatgtactaactaggctcaaaagattcgtctcgtcaattctgactaaactgtgcaattagtttttattttcgtctatatttaatacttcatacatgtgtctaaagatttgatgtgacggagaatctgaaaaattttgcaaatttttctggaactaaacaaggcctaggaagatttcaccgtgcgtcctgtgtagagaggcctgtagagactgaggttacacgtacggatagcagcacacgtaacaaagaaacaccatgatgaatctagcgaatcgttgatgtaagggtacaaagaagatgcattcgtttcctgcagaacatgcatcctgctatcaggtgacgatatatattcctgtgctatgtctggaatgcattgcattacaccaccatgcccggccttctgtaatgaactcatttcgttacgctggggtccatttcagttaactcctccagcttagagcaagtattataatacagccagctgttggctgtaagatatctttacagccttcttgcagcccacctatataatagttagctcatcactattaatacatggtctacttatctgtgtcacagatttttttggtttttatgtctgagccggctgtaagcttgcagcccgcttttactctctttcctcttctctctcctccacatcagcatttagctggcttacagcctgctataatacttgctcttagagacatggcggcatatttgttagtctactgtggtgggaatgttggtaccagcagaatacgttcagttatgcaacttcaataatttgccacatgaatggctatacagagtcaagaggaatgcaatttctacacaatcttaagtcttgtccgtagtatgctgcatcatccttctcattgtcaatggattctttccggcgcgagctggcacaaccacatcagtacctctctgtaccaagcacgatccaactcccctacaaaatttagatcgcagtttccggcgctgcggcgaaaaagtcagaagtccacgggcctcagccaccgaagtcgtgctcgcagcaagcccggccattgaccggcccctaaggcaagtcaaccctccgctcatgtgatccactgccactacaataaacagccactgacatgccggcccacaaatgacgtggcaagcgactgtgaacatgcatggcccacttgccaatgactcgtccaggtatgttttctcgtacaggccagtcgacgtcgtcgacgtcttgcaagttgccatgcaagttgcaacggcaacgtacggagttgggccggatagctgtgctgagttgctgtgacacggttaaccatagtggtgttgatgtagtataagtgtccttagctaaaccgtgttgcatgtgcgatgcagcaatccacgccgcgaacaatggcaccggcagtactgtcgtcgtcggggctgctgcttctctaccttgccgccgtcgcgtccgtcgccggcgtcctccaagctcgcgcacagcctgacagcattggtttcatcagcatagactgtggcctgtccgggacggcgagctacgtggacgacaccaccaagctgtcgtacgtcccggatgccgggttcatcgacggcgacgccgggtccaaccacaacatctcggccgagtacatgtcgccgatgctctcgaagcgctaccacaacgtgcgcagcttcgccgccggcggcagcgcgcgcaactgctacacgctccgctccatcgtggcggggctcaagtacctcctccgcgccaccttcaagtacggcaactacgacgggctgcgccggctgcccgtcttcgacctccacgtcggcgtcaactactggacgacggtgaacatcacggacgccgacgcggccgtgatcgtcgaggccatcgtcctcgtgccggacacctccgtgcaggtgtgcctcgtcgacaccggctccggggcgcccttcatctccgggctcgacctgcggccgctcaagagcacgctctacccgcaggcgaacgcgacgcagggcctggtcctcctcggccggctcaacttcgggccgaccgacgacacggagctcgtcaggtaccccgacgacccgcacgacaggttgtggataccctgggtggacacggccacctggaactccgtgtcgacggcgcagagggtgcagaacatcgacaacgacatgttcgaggcgccgtccaaggtgatgcagacggcggtggcgccgcgcaacgggtcgaagagcatcgagttcaactgggactcggagccgacgcccaaggacccgacgccagggtacgtcggcatcttccacttctccgagctgcagctcctgcccgccggcgccgtgcggcagttctacatcaacctcaacggcaagccgtggtaccccaaggctttcacgccggagtacctctacagcgacgccgtcttcaacaccaacccctacagggggatcgcccgctacaacatctccatcaacgccaccgccaactccacgctgccgccgatcatcaacgccgtcgaggtgttctccgtcatctccaccaccaacgtccccacggactcccaggacggtacgtacgtacgtacgagtggacagacatgtagataaggacagcagattagtactgtgatggcagtgttgggcgtgttgctgaaagcttattttcgtggaatttgtgacagtatctgccatcacggcgatcaaggccaagtatcatgtgcagaagaattggatgggtgacccgtgcgttcccaagactcttgcgtgggatgggttgacgtgcagctatgccatttcaagccctccaagaatcactggcttgtaagcactgacgactactcactactcagatttgtacagagcactagctgtgtttaaactgagccataccgtctgttctgcaggaacctatccttcagtggtcttagcggcgacatatcatcttcttttgcaaacctgaaagccgtccaaaacttgtaagtatagagctttctgatcttttttttttaatctcgcattggatatttgaaagaaaataatgatgagcaggtgacatatcttgttccacgttcttgcagggatctgtcgcacaacaacttgacaggctcaattcctgaatccctttcgcaactatcttcactgacagttctgtaagtctgcgaacttgtgcattcttcaccgatccttggtaagttggtatgtttcagagatttgactcgcatgaatattttctttggtatatatttcagagatttgaccagcaaccagctcaatggaacaattccctctggacttctccaaaggattcaagatggctccctaaacctaaagtcgcttccttaccctccaatacatatggttttaacatccatgaaatttactgcttgacatttcctgtttttgttttttaatcaaatccttttgccatctgtttatagatatggaaacaatccaagcctttgctccaatggcaactcgtgtcagacaacgaagcggaagagcaagctagccatctacattgccatcgctgtagttctggtggttgtggtattagtatcagtggtactgctgctttgcttcatccagaaacaaaaaaagcaaggtgacacatcagaacgctctagcaattttccccatcctgaacacgaaaccgatgcttgccgtgtcactgccactcgatcaggaccagcgaagaacgccgtgaagcctcagaacgagacgccactgagccctgcgccagcaggcgacgcgtattcgcagagctcgctgcagctcgagaaccgacggttcacgtacaaggagctggagatgatcacgagcaacttccagcgcgtgctcggccggggaggcttcggctccgtctacgatggcttcttggaggatggcacgcaggtggctgtcaagctgcggtctgattcttccaatcagggcgtcaaggagttccttgcagaggtaaagttttcgtcttcagatgggacttcatgtttttgcacgaaagttgacttgctatgtatgatcactaccttattcaggctcagaccttgacacggattcatcacaagaatctcgtgtctatgatcggttactgcaaggatggggactacatggcacttgtctacgagtacatgccagaaggcactctacaagagcacattgcaggaaatggtcgcagcagaggattcttgagctggagacagaggctcagaatcgctgtggagtcagcccaaggtacgacccatttgtgaatttcattttttgctgtcaattttctatcaaagttttgattatgctagggtaataaagaacaccgatgtgcactcagggctggagtatctacacaaagggtgcaacccgtccctcattcacagggatgtgaaggctgccaacatcctactcaacgccaaactggaagccaagatcgccgattttggcctcaccaaggctttcaatcttgacaacaacactcatgtatctacgaatacacttgttggtacacccggatacgttgatccagagtatgtcatattttgagtcctaccgtcctacgtgggccttttactgaaatctcttgagttttttctttcttggtttctgacgatgttaattcatgcaatacaaacatgcaggtatcaggctacgatgcagccaacgacaaagagcgacgtctacagcttcggcgtcgtgctgctggagctcatcacggggcggccggccgtcctgcgcgacccggagccgacgagcgtcatccagtgggcgcggcagcgcctggcgcggggcaacatcgagggcgtcgtcgacccgcgcatgcgcggcgaccacgacgtcaacggcgtgtggaaggccgcggacgtcgcgctcaagtgcaccgcgcaggcctcggcgcaccgccccaccatgaccgacgtcgtggcgcagctccaggagtgcctccagctcgaggaggctcgcgccgccgccgccgccggcgacgtgaacggcggcggctactacaccggcggcagcagcagcagcgccggcggcccatactccggttacaatgcgtacggcgccggtgagggtggcctgtccactgacgtgagccagagcagcaccgggtttgaggtggagcacaattttgggagggtgccgacgatgcccacgggtcctgccgcgcggtagaggcttcgttgcccgtctgctcgtccaagccgctgtcttgtacgtacgtattttgtttttttgcttcacgaaatcatcgcgagctttttaaggacttcgtcaagtatcgtaaacgcgtgtgtacaaatgttcagacatttgaagtttgttcagttgcctttttttttcttcggcatcgatgtactactactactacaatgtaatactgtatgtattggatctttccgctgtaattaggacactccgacgctattcttcggtcagtgcatgtgtatacgttccattgtttgcggatatttgcaactttgaatgtaatggaccaataacaatcgatctagacttctttttttttgaaaccacaatcgatcaaacttgatagcactgcccaactttgattggtcgatatcgtagctttatccatgaacttttaattttaaataatagccatacatgttgacggactagtttgatgacaacttattagatggataggtagttagaattctttgaggtctttgtgtaaatgttgttagattcacctcaatccatatgtgttggagtgaaatttgttcatgtgtaggtattcaaaagaccatgccaagcagtccttctatttttgatgaaactatactgattcttgtgtactagcttcgtgatgatcaactataatctgttggctagcaattttgtaagaagttttgaaattggtctttgtgctgggcaatctggacgtcgacgaatgacctgatcttcaaaggaatacaaccttctattgacggcaacaaag

SEQ ID NO: 3692 - DNA, 4880 bp, Sorghum bicolor
gaatgttaggcttggcaaaacacgatggaatgttctgcgaactgctgagataaattatagtagcaaaaggggccgggttctctgtataaaacaatgcaatgctcacggacagactttcggctaagcgagcaggcgactagctagtgctaatcacaagcctccccatatatataaaaatgaagcagtcaagtggcaaggcatgcatgaaccatgcacgacacagctgaataaagcaaaacaagggggctaacgacgttgacaattgggtgccttcaaaccgtagtgcatttctccgattcaaattataaagtcagtcttagtggaggttttgtgagaatagtacattaaataagataatatggtatagtaatagatgaagagagatatgatgaaagtttcatgtggaagaaacttgtctagactgtttctagcatatgagagacttgaaaacagcaacataaaacccccactgatactggtaagatgttttgttttttaaatatattacttctactatatatatatacatatatatatatatatatatatatatatatatatatatatatatatatatatatatatatatatatatatatatatatatatatatatatatatatatatatatatatatatatatatatatatatatatatatatatatatatatatatatatatatatatatatatatatatatatatatatatatatatatatatatatatatatatatatatatatatatatatatatatatatatatatatatatatatatatatatatatatatatatatatatatataatgttttagcttttgtagatatagattgtactacatactttatttatacattatatatatatagtaaaaaacgtatatctaaaaatgtcaaaatacagtaccaaatgtcgagagttgatatatattgtatttcataataaaaaaattgggaaattaaatcataggatattatttatttttattataacagagaggcagtgaatttagaaaaaataaaactttgaggtttctctcgtttgaactagattttttttttttgagagtgtttggactagaaaattggaaagatcaacacgtacggtgctttcttccaatggtcctttacccaattagaaagagtaaagagataagatagaatagtgcacggccaattgagtgtagaaaccgcacttgacacttgtcatttctgtcccggtcgtcctttcttccctaagttggtctcctgttccttggtccagtacctatgtgtgacaagtgaaaaatcaacggtcagaacacaaatgtgtggagtacgttacgtagggcggtgcctgccaagcttgaatctcttcctgccaaacagtcacacacttacacgagtcatgcgtcatcgatctgaaccaacaatcaactagtatttcgtcgtcccaacaacgcgctgcgaaacaaggcacgtacgagcgagacttccgatccggccgcttccccagcgtagaaattcctcgatacgcgtacgtacgcacgcccgcatacgtccgtccttctacaccggccggcgacgtggtggcaatcagctacgtcggagtcgcgatcgcaattcgcgcaagcgaaaaagccagccaaacctggcaagtggcaccgatcgaatggatgggctgcctgccgcggaaaacagtaggttttccggcccatgcatgctgcccatcacgccgaagcggaagtgcggagcgggactggacttttccaccgagcaagcccagaaaaaaatatcgcggtttccactactccactcgtgcgcgaccttgacccgatccttccttcctgcgatctagctatcgtcgtcacgccaggccaacaccgcgacggcgaccggactggatcttctcaaagggccccgcgtacgtagtacgtgctcggctgatcggctgcctcccctgtgttcactctttgatttgttcaaaatatgcagctttcggactcgtcatcatccattttcctttggggactcacgaacttcgacctcgatctcctagctagtatctgctgacgaaatctccagttttgattcagtaaaccccccgtgttgccccgttcgttatcgtttaaccctgctcgatctccatcggttataaattctcctgcatcgacccagctactgctacatagcacgaatacactcgctcaatagccaacagcacaaacgagcatctcctttctccgagctagtgaggtgactgaggtctggtctgtctgattgttgattactcggtgatcgagtgaacgaagtacgtaggtcgtagatcgtacgtgtcttccatggcgccggtgtatgctggggagctcgccggcaccagcggctccggctccggcctgacgctgaacccggtggcgcggcgggcgctcagccgcggcgcgtcgacgtcgacgctgggcacgcccaagtcgcctccgccggcctacgggagcatcgtcaccgtgctgagcatcgacggcggtggcgtgcgcgggatcatcccgggcaccatcctcggcttcctcgaggaaaagctgcaggttcatgatgattcatacacaactctgttctctctccgatgcaccgtaccggccagctctgaccatgcatggatttcgtgactgcaggagctcgacgggccggacgcgaggctggcggactacttcgacgtgatcgccgggaccagcaccggcgggctggtgacggccatgctcacggcgccgaacaaggacggccgtccgctctttgctgccaaggacatcaacgacttctacctcgagcactgccccaagatcttcccatccggcaggtgaggatgatccatatatccaaaactttgcatgcacgcacgacgaacctacacgagtcaacgagtcatactactcactagccttcatgaggaaggcgtacgtggtgcaaatgtttgactggatcaatcgtcttgtgtgttgtgcagcggcggtcctctggggttgttcaagagcatggcagggcccaagtacgacggcaagtacctccactccatcgtccgggagctcctcggcgagacgagggtcagccaggcgctccagaacatcgtcatccccaccttcgacatcaaactcctccagcccactgtcttctccagatacgatgtacgcgtccatatatgcacaaagtacatctgtgataagataggtgcatgcatgcacgatcgtcgatgcatgcatcatgttaatttcaccgtgctaatgctccggtgattattcatgcaggccatgagcgatgtctccaaggacgctctgctctccgacgtctgcatcagcacgtccgccgcgccgacctaccttccaggccaccagttccagacgacagacaaggacggcaagccccgggccttcaacctcatcgacggtggcgtcgccgcaaacaatccggtgtgtgatctaccgaacatccatatatgctagtactacgtgtatacttgttgacttctatgaataatcgtacgtgacgctgacgaaacttgacaaattttgcagacgctgctggcgatgacgcacgtgagcaagcagatcctgctgggaaaccaggacttcttcccgatcaagccagcggactacggcaagttcttggtgctgtcgctgggcacgggctccgccaaggtggaggagaagttcgacgccgtggagagcagcaggtggggaatcctggggtggctctacaacaagggagccacgccgatcatcgacagcttcagccaggccagctccgacctcgtcgacatccacgcctccgtgctcttccaggcgctgcactgcagcagcaagagctacctccggatccaggacgacgagctcaagggcgagacggcgtccgtcgacgtgtccaccagggagaacctgaaccgcctcgtcggcgtcggcaaggcgctgctgaagaagccggcgtgcaaggtgaacattgagactggcaggaacgagccggatggacataggggcaccaatgaggaggagctcgtccatttcgctcagatgctggtagatgagcgacgtgcgaggcttcagaagaagggcaacagcacagtactggtgtaaaatggatgggctaggatactctttttgtgtcaaatatttgtgtaggatatagattattacatgatagcatgcatattgcatatgtgagcatgcatggtccctatatatataattcattccttattcatgttctttgtccacacgttggttagtacttgcaaaaaaaaaacacttgcacgtaaatgttttgtaccactgttagatctctcaaaaaaatgtttgtaccactgttaagcattcaaattttacccacaaatataaggaatgtttgtgccccagaaaaacgtattctgtttgtagttaatctgtcaatgcatccgaaaaatctaagaaattcttatattttttgaaccgcaacaatcatactggcagtgatgagggggacaatcatgtggtttctaatgttgaatgtagtggcactcatagaacgtaaaaataaatttgatggcactcatgtgtccaaactatttttttttcaagggcttctccggcattgttgaatcattcgatggcacacacaaaattctctcttgctaatattgctgcggccatgtaatgtgatactctctgtcaaaacaagaaaacaattttagtacggtataacaagccaaaatatcataaatttaattaaattaaatttataaaaaaaccaatagttgtgttactaaataatgttactaaaatctccatcgaatacatatattaatagtgtgttttctaatagttgagctggcctgtgggtttttatatctatctcttcgaaaagctgttgtgaactat

SEQ ID NO: 3693 - DNA, 4705 bp, Sorghum bicolor
agagtggaataaaaagttcatgtacaagaggaatgaattaaaagctcaagcttgggccagcttaagggctctccccccgaccccctgcccccaaatcataaagcaacaaaagtttactcctcaaggtctagcgcccttctttgccaactccgcgacctgcagcacagtgcaatactaattttgaaagaatcttcggtttctttccttccataagttccacatgacgtaaatggccatcccattaagggcctattcggttaggcattcctggcctggaacggcccggaacatttccagcccagtacaaaatatcgaatggttccaggcccgaaatagttacgaacggcccctaaatatgcgcctttggctttgatgaaatgaatgtgctgcatcttcccaccagtctttgatattgtcgaaatcagcaggtagcacttgctgccagatcaccaaattctctcaggtggacacttgcaaccagaccatctgcgcaaaggggcaaaggaggcaaagatgatggcctgtttctggaggtccattgcataatgggcagctggttgggtgcagccaacccctgatggtgaggttatctgctgttagctgtttgttttgaattaggatccaggcgaacaacttgcatctattttcagtgtgagcccgctgcccgctaaatgagttttgtgtgatcccacttgaccaccccaaagaactgtgcacagtaagctgaatgggtggtgtagacgccatccaccgtccattttgaaacgatgtgcatataggttcacctaagtttgcattatcagttgcattaattttatgttctaatgttaactattggatccacaatactccctgcacagtcatcttcattcttttgttctttataccttttggaaatcaaacatctatcctttagatttctctttacccaaagagtcttgaatccttaatcatgagatgatatcttgtcttagcatgtgaccttacataatatatggaatttgattacacctttaggatatggaaacctggaagtctacaacttgtcccttcattgagccaaggaaaaaaatgataacctttctgttagttcatgtgatgtggagaacagaaaacaatcatttgcgtataaaaggaatgaacatacctcaccgatgatgcaacaactatccatgtaataaaatccgtgataaattaaatgtaatatgctattctggttgtttcccctataaccgcatgatgtccacagtcatgcagcagcgagcttcttcctgatcttggtatcttagtcaatcagcatgaaacagcatatgtaatttgtcacctttgacagggttgcatgcatcagcgcaagctgaggttgaaaacttgaaatagtgcacagaggcttgctttcttttggttctgaataagtgagtactacttttccatcataactaaagcattgaattgtaacaatttcctttttctagcagtgccttcagggcattagtagatcccttagctcaagggcaactcagaaagggatgcttattcccccaaaaaatggttattgtttctcacaaatgcaagcatctcagtcgttacaataataaagagaaccacattttccattcctagaaatattataatacgcattaaaagtttacttaggtgactatttgtgttcctttaaaacaccctaacccttaacaatgtttcaaacatttgacttgtacgtttgcacctaggaatggagtatttgacaattgacatgttgccatattgggcacgatattatcccacgtttaagttgcgcataatggttaaccactgaatgtatagatcttcttggaaacatctcgtctctttatgtttagccagttcctttgcctgccaataccttgaaatttctcatcttgaagcctataaaaacttgtcctgtatatatatttcagcatcctgattgtccttggtgaaggttcaattgtgttaaactggcccttagagagacttgtaatatggagaaaggaaaacacatccagccaccgacttatggcaaccttgtaacgattctttctattgatggtggaggcattcgaggaatcattccggctgttgttctcacctttctggaatcagagttgcaggtaaatctgtagaagcagaactgcgcaatgtggtttcatgtgtcgtatgattgcctaggcaacactaacttagtgagagatatgatagtttagaactccctactgcatatgttgctcgcatgagggtgataaatgcatttgtagagtccaaagtttgttgatatgctagttcaaagtacaaaccatttagaattaaacccaattcacaactataatccatcgtgagcgataattctggagaagtattgttaacttaaaccttaatagattatgactttcataaaacctgagtaaatcttgaaagcctgtcgcaattgcattgcagtcagaattaggagtgccatcctatttttaatacgctaaatgttctattgattgattcttatgtaaaactgttcttaattgttaaagaaacttgatggagaggaagccaggttagcagattacttcgatgtcgttgctgggaccagcacaggggggcttgtgacctcaatgctggttgcaccaaacaatacaaacaggccactctttgcagccaaggatattcaagcattttatatgaaccatgctcccaagattttcccacagcagaggtgaatatgttattgttcttgttaattttttttgaccgaatattgttcttgttgattggattgcaaacttttccggccaatgtatttttggtctttctttaggggtccatttggtaagataatgaggatattccgatcgctgtcaggaccttcctatgatggtaagtaccttcatgatgttgtcagaaagaagttaggaatcaccaggctgcatgagactttaacagatgtggtaataccaactttcgacatcaagcggctacaacctattattttctcgtcctatgaggtgtctctctctctctctctctctcacccctaccctatccatccctctcaagcctgtaaagagtggtgattcataccataacacattgtatgacttatgaatagttctctgcatgtttatgacaactagttagaaccaaataacttcagctgtatatgaaatgcttctactcaaatgagaacacttcaactggttgttagaatatatcaaaaaggggaaagatctaggagtgaataacagagacttccattgatcctccatgcttaaacttaaacatttacatgagctttctttttatatcataggttaagaatgagaagtacaacacaatggatgctctactatcagatatttgtatcagcacatctgctgctccaacttatcttcctgcacactacttcaaaacagaagattgccatgggaacaccaaggagttccatcttattgatggaggagtagctgccaataatccggtgcgatatttatcagtaattatgcatcagtatcagaaatttgcacttcaatcatgatgcaaggcggatacattatttacagttcttctatgtgtaaaatcttgcaatatatcaacataatatgtgattcagaaattaaaattaactttgaactttttaaggaaacctaatatacctttctgttgtttaggctttagttgccattggagaagtaaccaagcagatattcaaggaaaacccagatttcttcccaataaaacctatggattatggccggtttttggtcatttcactaggcacaggctccgcaaagtttgaagcaaactacaatgcacaaaaggctaaatcatggggagtgttgggttggttgcttggcagtggatccactcccttggtagatattttcacacaggcaagtgcagatatggtggatatccatatctctgctgttttcaaagccttgcattctgagcaaaactatctgaggattcaggtgagtacagtggatacatttagtttgcagagctaatagatttgctttatctcaaaaattactatttcaaaataacaggatgatactctacaagggacactgtcctcggttgatgttgcaaccaaggaaaatatggagaaacttgccagagttggagatatgctactaaagaaacctgtgtcacatgtgaatttggaaactggccatatggtgcctgcctgtcataggacagagatgactaatgaagaagctctaaagaggttagttttacctctacacctcctatcataatgatgattgcattggaacacccaattaggatgtacttagctgtttaacatttacagatttgcgaagctactgtctgatgaaaggcgaattcgcaaggcaagatcgccaaaatgaagaaagccctcatgcttgtttcaacacactgagagaaccctgcattacttcaattaggaattatggttgctattatttgttgatatgaagttccgttgtaacaataaaacaattcgtaggtgatcaggctgacactatgaattgatgatgttagcttctgccatctggctttcgtagcgtgtaaaaaaattagaaaaatactaaaattctttttaataaatatcagtattgaattacttgcatcattgttttgttattagtgttgttggttttaattcagcggttcagccgacaagggaagaaaaagtttccaggttggccat

SEQ ID NO: 3694 - DNA, 7134 bp, Sorghum bicolor
gaatgaaactaaaatgtgggcacgacacagcaaacaaacagatttttcggcaagccaattatgaagacgacgaaaccctcaaaattgagctcatatatgggtgggccgggaccaggttgaaattgggttgatgattgatggtgacttgccttctaatccaccctctcagcacataatttgctgcccttttgcgtgcacagtttgttgaggtctccgtcgccccagcgttggctccttcttagctccactctgtgcatcagacccttgtttttgtaaaataaaaacgtgtagtacggcatccaccacagtactagcatccatccatgcccgtcgggcaggccgtcacatgcgcatcttgtaagctagttctctggtcacgttcgctccaggctattgttctcaatagtgatgggagcatgcatagtacacttgaacaaattacactaccgaaaaaaaaaacatgactttttagagaacaacagaataaataatttgaccgataatatacgctcataaacataacccaatagtggacccaacgcttaattattgtagcccgagcgagctcaattgtgccgattaggtcgcatcgcatgatttggagctccgccactgaacataactcaaaatttactgtcggtaatgtatgatcttatgtcttttcttatagaaagttaggaacaacaaacttcggatatccgcagggtttatgtgcctagatttgaaactagcagtggcaagtactagttaagatttttcttttaatatcaaaaggatcttcaaatgattggccctgaataatattcgagtgaaatggtacattggacacagagctttatttggatctatctagccatcttgtacaacgctatggctgcacttctgaccctctggaatcgcggttgtttctctaatgcaagctgtcacgggctgaagcatgcatgtgtgcgatcttgcatgcgaatcccaaacaaccttttccattttttttattacccgagaatgggatactgctgctagacccttttttttttgtagccaatgatgatggcgtacgttcgtccgtagaaaatttccgcttgtatgttccacgaatccattcacatgaaactgggctggagcacagagtcctttcgagaacaccttttgtgtggcacacggaaaggcgagcgagtcaggcacgacacaccgatcggtttgctcttgggatcggatcggaaccaaagtacacacacgcacccagcaccacatggactgttcccttcgtgcaattttccccctcctgactgtgagagaaagcctgacccgaccgatgacatgtccaaaatccgtgtcatttacctccggctttttgatgagacgtgacatgattgacgtccaacacgtcctacagcagcagtcacccacacccactgtagtagatggtacaagcttaaccccaaacaccttgacatttgcgtgacacaagatattgaaaaagatcacaggaacaaaaagaaaaacgtgcaatatctgatacaatgaaaaggcaattaagcactaaatggtctgcacattaaatatgctcgtagtcaaatctatggctggtgattaattagtagtagtatctttgcaacggtaaaaatctgcgtaattgtatgttacgtccctaaactttacccagtgtgactgactaataataaccagccactactggacacgcatcatgctactcactagccaccaactcaccctctcataagagacatcgacagaacaagccagatcgatcgactcaccacggaaagaaaacaaaagaaatcaatataatagtgttaataattgcatgttaatcccgctttatagcccaaaccagcaggcgcagcaaatttaaatattgaaaaaccgttgctagcgtgcgaagattcctctgatatttatcagtaagtatttttttttcttttggttttatttagttgctggcccatttcttgttgcactccaccccctgaaaccccggcgttttctcagttacagcccccgcctcgcccgccgcctcgtgctcttctcgttcacttgccttgcctcgcttcccatttccgagtgccgcccgcccgccacccggttccgcctccgccaccgccaccgcttggcgtctctcccgcggccgcgaagtgcgcgctcgagtcatcagaggggggcgcggaggaggtcggtcgagaagaggaggccccgtgcgcgaagagtgccggcgcggggaccagaccagcagaggcggcggcgtacgtgcgcgccgcgcgcgcgcgcgcgtacgtgcgtatggggtcgaggcggcggcggcaccaccaccacggccggtgggtggtgcccgccgtggcgccggccgcggcggcgttcgcagcggcggggttgctcttcctcgtcgtcgcgttccactgcttcctgtcgccgccgcaaagcgacggcggtggcggtggtgccagtggcagctcccgtgtcttccggcgcccgaacccgccgttcctggtacgcttcctacgattccgggggcgacgggggtcctcggttcatcaatggtcaaactcggctcgtcgtcgatttcgtcatcctccattcctcctccttgcttaacgcgcggctcctgttcttctctctccccccttttgtttctccgagcagttgaacaagccagcggaggtgcgcagaaatgtaatcggcgccgtggatttcgctgttcccgtgagtgcagaattccgtgttcggttcgttccattctttccccgctcgggggggattgagccgtcatttcgccgaatttcgtgatggttggtttgcagagcggtgggagcaagcttggggagcagctctgggagtcgaaggcggcgggcaacttcttcggctgcagcaacgccaccaagcaattcgccggtacgcgttcctcgcaacatatggcgatttctttttgtctacgttaacgttccgctgggagaagagttgattgatgttgcgcgtgtgttgggtgccaatctgccaataaaagcttacattttttttctatctctatctctatggttcggtagatgccgaggctgtgaccaagtcggaccgttacttgatgatcgcgaccagcggcggactgaatcagcagcgaacaggggtaagaacaatacaaactgccaaatgaacagtgctggctggtatagcatcaggtcagggcaactcattcatcagttaaaaaaaaatccaaagctatctggttgtgctgtggttaaatttaaggttatgcttggttccagtacatccagagtttctctgaattcttattctccgtgcctatgcctgataattattagagatattgggagcatgtactaatctaggaccttgtttagttcctcaaaaattttgcaaaatttttcagattccccgtcacatcgaatctttagatatatgtatgaagtattaaatataaataaaaataaaaactaattgcacagtttggtcgaaattgacgagacgaatcttttgagcctagttactccataattggacaatatttgtcaaatacaaacgaaaatattattatttctattttgcaaaaaaatttggaagtaaacaaggcctaggagtacatactaccattgtagcttttcttcagttgtactcgtccagcgtgtcatttaatccaactagtcatttaatccaactactatttgatgcgatcggcaattggccagtcactcctatacgccaaccacttgttttgaacggccccgtacgtcaccgcgcccgtgcatttctgtcttttgttggtatgctccaactactttctggcgccctcagcggctactgtatatgtgtttcatttcctgccagttggcacttgcgtacacctactgtcagaaatgtgtaaatataaataatgcttgccaactcgggtcgtcaataatcttatcatgtttccaattctgtagcataacccatacaaaagtataattacactgaagtaattttgataactaatctaaatagtatgtttatgttgatttatttcaatgtttttgaaaagttagccattttgcaagctagtgaatgtttgtgagatcacgtcctcgtttctcaataggagaataaattaatcataacaaaaaaagatcttctcttccaacatcatttgttttggaatgatgatttgtcgatttatcatttgactgaatctttcgcccataaataatgggaaattctgctacttatctgatttccagatcatagatgctgtcgttgcagcccgcatactgaatgcaacacttgtcattccaaagctggatgaagaatccttctggaaagatgcgaggtcagacctcagagtcattactctctcttgttagttgcaacaaagtacattgtcctaatctttagttctgcattgcagcgactttgcagagatatttgatgttgattcattcatatcctcactctcgaatgatgtaaagatcgtacgacaagtacctgacaggaatgggaaaccaccttcgccatataagatgcgtattcctagaaagtgtactcctaaatgctatgagagccgagtgttgcctgctcttctaaagaagcatgtaagcattaaagtttttgaatttcacatgtttccttaagtttgacatttttttttcagtgaaaaaaatgctcagttctgacatcagttcttgtatgttgacccacaggttgttcagttaaccaaatttgactaccgattatcaaataagctagagactgatcttcaaaagcttaggtgtagagtcaattatcatgcactaaggtttacagacccaatcttcagaatgggtgaaatgcttgtccaaagaatgagggaaaaaagtgggcgcttcattgctcttcacctaaggtgatattagatcactttttttttcttgtccagcacttcaggtttcatatatagtacacactaactctgatgacctatctattgacagatttgagcctgacatgcttgcgttctctggttgctactatgggggtggagacattgagagaagagaacttggtgagattcgtaagaggtggaagaccctgcatgtaagggagtagtattgtattccgttttaactagtgatgcttctgaaagtaaaatcattttagtttttttcttatgtgacacatttaaatattgtacaggcaagcaaccctgacagagaacggcggcacggaaagtgccctctaacaccagaggaagtagggctcatgcttagggcattgggatttgggaaggacgtgcacctttatgttgcatcaggagatgtatatggaggcgaggagacactggcacctctgaaagcactcttcccaaactttcactcaaaggaaactctagcaaacaaggagttagctcctttcttaccatattcatctcgcatggctgctcttgattttattgtatgcgacaggagtgatgtttttgtgacaaacaacaatggcaacatggccagaatgttggctggtcgaaggtaccctttttctttatgtttttcctttagactttagtgctaacctagactcagtggcaattgattgaacaaagtggatttgttttatctttcttacactctaaggcaacggtgattgactgataaattgtggattttcaggagatattttgggcacaagaggaccataaggcccaacactaagaaactttactcattgtttctgaatcgaaccagcatgagttgggacacatttgcatctaaagttcagaccttccaaaagggattcatgggggagcccaatgagattaaactaggaagaggcgaattccatgagcatcctgcagattgcatttgtgcaaaatcgaagggaaaaactggacagagcaggcctcacctagttaaaggagctggagaagctgtggagagccactctattgatggggaacttgactggaaggatttggactacggagagcatacacccttgggcagggattcatctaatgaaacagaatcagatgatattcgtgttggtggatcagacattcctgaattggaggatatgatgtcagactagacacagatagatagttcattatagttataggtttgtttttatttacaaagggcttggtgataaattattttgaggacagaagctgctacataatttatctttctcctgtttattcttggagattggagacacatagaaacagctcaacaaagaagaaaggcctggaagagcttccttcagaaaagacaggtaaacacaaaattcttgaagtaagcaaatgttatttggtttcaatgcatttgattctttgaaaatttaagtttacctcatcaaaatctccgtatatttgtatcatcacataatttcagtctcatcatacctttgacccaattggcattaaatcatcagtattgacacactctgtcttgtgaatgcagaaggaagcctatatatagttcagtacgaggtagcaactgtacagtgtttgatcggtcctcaaacaatgctgactggagaaatggaagtcattttgacagtcatggtttctctttcatatagcttgtaccgtagataggaacaaaagaattccctcttatgttttactgtgtagtattataatgcgattttgatgggtctatcaccattcttgattttgttttttcataatgtccgttaccaattttgctgacctccatttaaatctgtatatataacctgaaacatgagagtgtaacgggaaattttgtccgagcatacatcatttcgcaaatatagaattgtcttacgagattttttacggtgcttggaggaaccggtggttcctcctgttaaccttctttgcggcaggtgttaataaaaagttataattaagggtagtttagtactttgcctaatgtactgattctcagcttctaaatccaattccacgaactgcttcgtgtcgtgcttcgcgagatctacgatgtctcccagctcgtcgccaatcgagtcaacaccgccaaggtggatgcctacagctaaagtttgggcatagaccacggcgctttctagtagacttgcaggctgaaacttgaaccggcgactcgagctggaggagcaacagctgccgctgaccttggatgcgcacacacc

SEQ ID NO: 3695 - DNA, 4749 bp, Sorghum bicolor
ggtaatacgtactacttcagagttcaaacataagctaatcggttttattataaggtcaatcgagttttatttgtatttaataggctgtcacataagtttttttatgatgttgcaacatttctaagaagaggaaggaattctatttcgaagaaactctgttgacacgattactaactctaatgagttatgaaattaaatgtatattaaattatagaatgaaactatgaattgagtatgggtgtttcatttatattttattttattttaataatattaaaagcagcgttatcaaattctccattgaaaatagtctaacgaatataaagctcggtgggaaatgtactttactgccggtttagtacaaaatctgtagcgacaatttgttgtcgtgcataactgtataacaagttaggttattagactcctcttttttttaaaaaaaaggtaaaagctttgttgtaatttctattagataaagaaagaaaaaaacgacaagtgctagcttagtttttttaaaatgaaaattgggccagaaaaaatatacaactgagtagagtgcttcactcatcgtgcacaactttggtacaactatcataacttacaacaccacttacaatttggtcaaatcaactaactaaggccttgttcagttcgcgaaaaattttggctttgactactgtaacactttcgtttgtttgtgacaattattattcaattatggagtaactaggctcaaaagattcgtctcgcgaattatagacaaagtgtgtaattagtttttatttttgtctatatttaatacttaatgcatgtgtacaaagattcgatgtgacggagaatcttgaaaaattttgaaaactaaacaataacttggccgaagaaaaaaaaaactatgatgcctcaactagaaaagatcgacaaaattagagcaccgggcaccatcaacgagcacctatgaaagttgtttcaacaattaagcaaatgtcatctttttttattgtctcatgtgagtttccttactggaaatcaataaaatgaaattgcccattgcgatgggcccagtaaaacttgatttgaaacaagagtgcgtggtgagggggaaacgaaaagcagaagaacaaaatacggtcgttgtgaatactaacatttgtgattttttttttgtgtgtgtgtcattgtcatttctcaacatttcagatagtctaaacacaaaactaatttcagtaggccaagaaccgcattgacaatcagctgatcgtcgcacgtcaactacaggcattggaccgaccgatttggcgccaaggagaggagtgggcgggagccttgtcccgccgtttttcccgggctctctctctctctctctctctctctctctctctctctctctctctctcccgtccccgtcccgtccggtgcggctcatcatcaccaccgcaaatctactccttcgtacctactaggaggaggagctccagtacgtatatccctccctcgtgctggtgccccggcccggccgagatgcgccgcacgttcgtccccggcttaaattaggcggggccgccgccgccctccgctcctttttttagttttccctcgggccggccgtgtccatcgccccgctcgcctaattcaacccccctctcctcggccgtcgtgcgcgacatgctctctcctcctccatcccgccccgcccaccgctgctcccttgcgtgagctgccgcccgccgtcgccgtgggatcgatcggtacgaatcggtccagagcgcggtgcagcgagcggccgggagcgagggggtcgtcgtcgcgtcgccgtcggccgtacgtccgtcgtgcgttcttggcctagctttggtcgtccgcgcgcgcggcggcggcgtcatcaggtgtgggagcggagccggagccagggtggcgcctcgtgaggcggcgcggcggtgtaagaccgccgagtgccgcgcgcccaggccttgcgcgccaagctcgaggcggtgagctgggtgatggtgcgcttcctccggcgcggacacagccttgacaagaccggatcgcacaacagcagcaaccagcagcagcgagagcgccacctcgacaggagcggcagcgacacgggcgagatgcacgagtcccttggcaatggcgccggcggcacaccgccgcttcccaacggccgggctgcggcggccggcgcggcgcggacgcgcctgggccgcgacggcccaccctcaggtaccgtactatatgcaatgcaagcaagctcttcttcatcagttcatatatatgcatcttcgatggacgacgcccccgatttcattcgttttattgtcatcatgatcccatccgagatcctcctcatccactcattgttacttggttccagagctggacaccatgaaggagaagttcgccaagctcctgctgggcgaggacatgtccggcaccggcaagggcgtggcgtccgcgctggcgctgtccaacgccgtcaccaacctggcggcgtccgtcttcggcgagcaccgcaagctggagcccatggcgcccgacaccaaggagcgctggaagagggaggtgggatggctgctctccgtcaccgaccacatcgtcgagttcgtgcccacgcgccagaccgccgagaacgggacaacaatggaggtaggccgccggtgatcatcatcacattcacatcgtggttttgcatgcccagcctttggcagtttcgatcgcatgcctgtcagctgcccccgtcgtcgtcgtgaacattcttgactggcacgcagatcatgtccacggcgcagcggcgcgacctcgccatgaacatccccgcgctgcggaagctcgacgccatgctcatcgtgagtgctgcgtgcttgcacgaccatctgtcaatcattctatatactaacaattaatgatccatggatcaacgattatattgaaaaaatttggcgcatgcagggctacatggacaacttcgttgaccagaccgagttctggtacgagaagggcggtgacaacaagcgcgacgacgacaagtggtggatgccgacggtgaaggtgccgtcggaggggctgtcggacgtgacccgcaagtggctgcagtaccagaaggagtgcgtcaaccaggtgctcaaggcggccatggccatcaacgcgcaggtgctcgtggagatggagatcccggagatctacatcgagtcgctgccaaaggcaaacaaaccataatgctaatccttctccttaactttcattattttggatcaatcaatcaattcagtcgatagatcgtcacctcgatctctcaaaccaacatggcatgcattattgacatgacatgatgaatggcaacgtacgtatgtgtacagaaagggaagacgagccttggcgacgcaatctaccgcagcatcaccgaggacacgttcgaccctctggagttcttggccggcatggacctctccacggagcacaaggtgctggacctcaagaaccgcatcgaggcctccaccgtgatctggaagcgcaagatgcagaccaaggactccaagtcctcgtggagctccatcgtcagcttcgagaagcgcgagcagttcgaggagcgcgccgagaccatcctccacctgctcaagatccagttcccggggacgccgcagtcgcagctcgacatctccaagatccagtacaacagggtatgcgatgcaattgtgatgctgttcattatatggagctatggatggccatggatcaatggccggcgccggcattgacatggatccatcctccctttgatttatttctcgatccctgaatctatccctgctgctgctggatgatgcacttgcaggacgtgggttacgccctgctggagagctactcgcgcgtgctggagagcctggcgtacagcgtcatgtcgcggatcgaggacgtgctgagcgcggacgcggcggcgcagaacctgacggcgacggaggcggcgcggcggatgatggagtcggcggagctgcccgcggcgcggaagctggacgccaaggaggagctggagaagctgaacgaggcgccggcgtcgatgacgctcttcgacttcatgggctggcacttcgaccaggacgagctgatgaagcgcagggaggacggaacgctggacgccgacggcgaggccatgctcctcaagaaggcgccaagcatggcgcccaagaagttctcctacgtcgacagcctcgccgccggcggcatgaggagcccctcggcgcgccactgataataatatatatatatatatatatgatcgtcgtcgatcgtcgcgccgccgcgtgcagccgccattgaccggccgccgatcgacgtgctagcagcagcagctcagtcatctacaccatggattgatcgtcgatggttcagaggagaagaagcgacgacaatggagaggagacggcggacggctcctctcccatccgattcttgcttacgtgtacatagctgaggcgcagcacgtacgtacccattgtttagtgatgttctcgatctcttactgattccttgcctctacgttctagaacattctagatgaggggaagaagagggccgggtgatttcatccacctactacgcattcgcattcaagggttaccgctgtgcgtagctacttgcttaatttctcaactagtactacgtattttggttggacatacatggctgatggatctcaagagcggttctccagaagaggagacactttgagctctggagtatatatgtatc

SEQ ID NO: 3696 - DNA, 3840 bp, Sorghum bicolor
tacatccaatttgttgggccaataggagaccatccctaagagccgcaacttccgtcgacggtgcaatgagggataaatctatgtgatgcagcgacaaaagcgcccccaatgtctctggtaatagcaccagagcttcctgatcattttgtttcatcaaatgcccaatcaacgttgatcatcaaataccctcagagggttttctccagccttgattaattacagcctcctttttcgatgtgacaaaataatttgttgtaaccgctgcaatggacaaagccgaccttggtggattttggatttgttccccatgaactagttgtctcatttgccaccaaatatactagcacccagtgagaataagctcagcctgacctagcttcagctctcttttttcgcctctgttcctaataatctcatgaatgagggctgaacccgatctatcaatcatcaatagtttttcaatatgctgccagatacccaaggaaactccaaatctctcttgatcggctacaagaagacaagacatgtcttatatcttccgcctccgtctggcacactggcaattcacaatattcgtgatatgcttattcgctagggtcacatggcatggaatacaaccatgaaatgctcgccatgcaaaaattttaacttaataactagtttgagaataagaaatacacacaccattgattatgtctaccaactacctcatacaagaaacctctcgctaatttatgagcatccatattagatatccgaggataaactcaactaaagcaaaactatctcctcatgcgccaccgctagaaacacgagatgacaattgtggtggaggcccagtagtccacgcatgccaagcccactcgccaggaatatttccagcagggagtccagcagctacagtccattccactaaaaaaaaagcagctacggttcccatgttttccacggcttgtaatagcagaaatttcccagttttatgttactgttcctgcccttacgaatttgaaacactctctgcagaatccacagatcctcttctccaaggctacgatggaacactgtaacactgtaacaaatcgcatattgacttgctaacaccgcatacgtatttatgtgaaaattgtagttttagttcattgcaatttctataggtataatttgtaatttttgaattaaaaaatataaaaaaacgttagataaaatcacagacccaacaaaatctaatatatgttgcacaaagacaattagtaatttataaatatttttatagtcaaacaaatgcaaaattttgatatatgttaacacaactaataaattagaaacaaatcacaagaatacaaatacaattttaacaaatcagacgattgatagataggatttgtatcattagataaaaatacaagtccgttagacaaaactacaaatacaattataataacaatttttaatataggagaagtggacttttttttttttgagattaaggagaagtggactttttttttttgagattaaggagaagtggactttaaaaacgtgcggctgtgctaacctgttcagattcacacggtcagcacgtcgcctgacgtaagcctaaatttcaggcacgtgacctttaacaaaagtgaaaaactaatctgaaatattgcaatgaattctcccaaatttagtgctgcttcagcgaaagaaattggcacatgcagctgacaatgcagttagttctcgcacgatttgacgataagagagggagccataaaatatgcaggtctccatacatacatacatatatacatactacctggaaaccacatcttccagtagtgcatgatccactagctactccactacgatcatggaatggctctagtgattggaggatagagggcagaacaagctcagtgacactatataacgagcaatcagatcacagtgctgcgtgccacaccacaattagagctgttaacgataactaaggactggtcagacatactcagaccatggcagcaccagaaatggcagctcttctcctgctttcgttcactgttatactgctgagaagttcctctgttcgtagtcaaggactgcagatcgggttctacgactcctactgtcctgacgccgaggatatcgtgaggtcgactgtcgagcagtactacgacagggatgccaccatcgccccaggcttgctcaggctacacttccatgactgctttgttcaggctagttatacatctcttctttaagctaccactttgtgtttcatcatcctgtggtgatgcaaatacactgtcactcttactcaagtctcaagctgcatatataaactagcctgaacaaatttacaggctgcatagtttgagttgagtatgacagttgttttgctggcttttgcattgcaggggtgcgacgcatcagtcttgatctctggatcatcttcagaaaggagtgcaccacagaattttgggctcagggggtttgaggtgatagatgacgccaagtcccagctagaagccgtgtgccctggggtggtgtcatgcgctgatatccttgctctcgccgcgcgtgacgctgttgatctggtgagagtcagtccatgttaactcagcgagagcagagtcttttacattctgattgaggtcatgtcatgtttgttttaactgttttattactgagaactgatgatgaatttactgttcttctgtcttttcttggggtaaacaaatccgtaaatgtaatgtaaaagactggtgggccaagctggtcagtgccgctggggagaagagacgggagactctcgtcagcttctggcgccaacgccttgccatcgcctgccgatcctgtatccgttcagaggaagaagttcgcggaccagggactgacagaccacgacctcgtcacattggtaggcgctcacacgatcgggcagaccgattgccagttcttcagctaccggctgtacaacttcacggcgacgggcaacgcggacccgaccatcagccaggcgtcgctggcgcagctccgggcgctgtgcccaccgcccagcggcggcgacccggccgggcggcgggtggcgctggaccagggtagccctggcgcgttcgacgtgagcttcttcaagaacgtccgcgacggcggcgcggtcctggagtcggaccagcggctgtggagcgacgccgccacgcagggcgtggtgcagaagtacgccggcaatgttcggggactcttcggcctcaggttcgggtacgagctccccaaggccatggtgaggatgagcagcatcggggtgaagaccggcgggcagggcgagatcaggaggaggtgctccagggtcaactgatcagcgagcgagaggctcctcctttggttggtcaatggagccgacagcaatgtgtaatgtaatgagtggaaaaagaaaatgacatattagatcgaacatattttgtatgtcatgaaactcttaaacatcaaagggcatttggtctagtggtatgattctcgcttagggtgcgagaggtcccgagttcaattctcggaatgccccttaatttttatatttcgttttgttttttgttcttataaatttttaagctcccaccgtcccacaagactctcgaattttcattttgttttttcgtgttattataatctatatataccacgagaatctcgtggagactctggcactggcctgcccaatgtggcagcgtcatcgtcctgtaatggcactggcgtactgccactgatgcacgatgaagaaaacgactctgaaactcgtggatcatggagaaccacttgtgcaaattggcatggcaaggcatcacaaataatcaatgcagt

SEQ ID NO: 3697 - DNA, 3668 bp, Sorghum bicolor
acgacgcatcctccctccaaggagatgggtgaatcgatgagaccgttttttgcgtcgcatacgccgcctccatcgcatctgctacttgagaatcaagttcgtcgtccatctcccccaatccaatacattagttgcctttttttatagtactctgcctcagctttggccgctacttgggaaaagagctcatcgtcttcttcatccaacatgtgatgttgattgacaaaacctccaggagccaaagagacaccatggggaacatcatccacaacctgctccacaacgacgggatcaccagcaggacccgaagcaagttgctgggacaacaaggaccgaccctcatccaacttttgtttccctcgtctagcgtctaccaactgagcagcgtgctgacttgtgtccgtgtcacctacacaagtgtggtactatttaataaaaaatactaccaatgatcaaaacacaaattatacgaataggttacttcgaatctcaccttcagttgtaggagaaaacttctgtgggtttcgtagacggctttcacaaatgaaattagccagcgaacgagccttcttcttgcgggtcataatataatgatccagccaattatctttcaccttcaacctagcctccacctggtcttgctcccaatatttctcccaatcacatttccgagtactctgcaaaaagataagaacattatggtgcttgtaccaacatgatacaaatatttggttgtaaaaatggtgagaatgtcacttacaatatcacggtcaacgtatgaccacaatacagtcctacaccaagctccgagggaacaaggccatattttgccagcacaccacaagggcaattcctttttacacgacgacattgtggtgcttctaggcattcttttttggcatctaaataaatgtgaatttcaattagcacacaacaaaccctaatccaccaatacataacgaaattgctaaacgaagcacaattaatatccacaacaaacatatatttgggtcatataatcatttcatggaaacattccaaacatggcatcaagaaaaccatcaatgacaagttccatgaacaaacaacacatgcaaccaaatccaaacgggtagaatgaaagaggggaaggggtagtaccttggcaaatcgtcctagccctcgatctggccttcctacagctgcatttaggatttagggttcgtgggcgaagggagagggagagagaaactgtaacctctaatgaaataatggatgaaggaggaagaagggagccgtgggtggcatttaaggggccatagctcggcgttgagccgaccagcgccgaactattggactaggcgctaatggattcagcgccgagctcatgggccgtgctagtccgtgggccgtgacgaaaattagcgaaacctcggtgtcaaattactaagcgccgaagtatgaggctcagcgttgcttcaattatcgccgatccttgtgggccatgggagccgacgaccggagtcgtcgatgacgtggcactacgccggcgttaactgacagcgcgcctaagtgcctaccgtcggcgtcatgtcctaacacgccgaaatatggtctattcctagaaaatattacgtgaagggtctatttgtaaaaaaaatctaaaaaaaagccaaaatgcaaaaatttcactgcaaaagcccaagtcaatgagtcatgacatgcatgtcgctgatcgagccgccaatccagctagcttaatgtctgcaagtcgggaattgccagtctgtccatgcccacccgtggaccagcagctgactcagcggtcaacacttaggactgcaactctgcatgtatgtgcttacggtctgatgctaatgtcgacatcaaaattgcatgcaaccaaggaaacagtcaaagaacggcggcaaactagcaagcacctttcatcccctatcggcctatccgctctccgacccctctatataagctccaaccattcttctcattggagccacacaaatcactagcacgcagtctaagatagcaaccaaaaacatgggcatgattcatacaccatataccatgaagtttagcacaatgcgctgctgcgtgctgcttgtctccttggctctgctcccgctgggcatggccgcggactccatcggcagctactgctcaggaagccgctacgcgggcagcaacaaggccgtgaccagcatcaactccgtcctcgccgacctcgtcgccacggcctccaccggaggcggctacgccacgtccaccgccggcaagggcaacaacatcatctacggcctcgcgcaatgccgcggcgacgtctccgccagcgactgcgcggcctgccttgccgacgccgccaagcagctccccagcacttgcagctacagttccgacgccagaatatggtatgtatatatactgcatgcctgtggctgtatatatgtatatatgtatacgtgcgtgcaactgctaagcaagcttacatatatacacgcatacgcatgcaggtatgactactgcttcatgcggtacgagaacgccgacttcttcgggcaggcggacacgggcgcgggcgtgatcctggtgaacgtgcaggccatggacaacccgaaggcgttcgagaaggcggtgggaaaagtgatcggcaaggcgacggcgcaggcgtcggcggcgggcagcgcggggctcgggcgggacaaggatcagtacacgccgttcgtgtccatctacgggctggcgcagtgcacgcgggacctcgcgccgctgacgtgcgcgcagtgcctgtccacggcggtgtccaggttcggcgactactgcggcgcgcagcaggggtgccagatcaactacagcagctgcagggtgcgctacgagatctaccccttctacttcccgctcgccggcaacggcggcgccggcggccgcgccaccaccgatatgacgaagaacaccaagatcatcgtgcatccttgatagtttgatttgatacgtgtgtgtgtgtgtaagtaacgcgcaccatgcatgatgacgtggatatatgcgtgcgtgcaagcatgtggcatgtgcacaatacagtaagaatggagtgacttgtgtacgttaacgttgggtaaagtagccttgcgttagcaagtactcccaggaataaagatttgctactgtgttaagcttaagcagtgtaagtgcatatgtgtcgaagcaacgtagcattgtttttctctcataataaatcagcgaacaatactttctaccaatgttaactatgatccatcaccaccaacttttatgttaccatcagcttgcatcatttggtatgttactccactgcttattaattaagcttacacatattgacgggagagttccatggtaaatctgttgggctgacccaaaaacaagccaaattgcagcctaagacccactgtatacgttgaatgaatcacacctgcaaattaactatctttttatttttgttctcgcttcgtgcaaaaggatcaattcagaatttacaacctctcaagtctaggctttaacctggcccagctctcctccaacttccagtatatctaaactttggcgctacagtgttttccacgactacaattagtgacccgaattcagtctgacccaacttggcccaattggctaggtctcacagtaacttggttcta

SEQ ID NO: 3698 - DNA, 4274 bp, Sorghum bicolor
agtctttctatctgcactattatggacagtccaataatgagaaaagtggattcagttatcaactggtcctatcaaaaatagaattgactatggattcgatccatagcacatgacttcataaaatctataagcttttccctatctaaatcaagtgggtttccatgaagaagatcttgtttgccatgttctattcagtacttgtaggagaagaacccgactccggtatctcttaaaaagaagagagaaagtaaaaccaagtcaagatgatatggatcgccccttcttgtaccaaagatcttaccattttcaaaggaactagggctacattgcttttcaatttccatttaagagtttatattggttttcatgtccttttttagacctcgaaacatgaaatggataaattccttctcttaggaacacatacaagaaaaaggataatggtagccctcccataaactaatttatgaatttcatagtaatagaaatccatgtcctaccaagacaaaatttcaaacttgctatcgcaaagattgacctacgtataaagattgattcatttggatcgatttgatgacccaactttgttgcattgccataatccatattctatattcgaagtgggttgacctttgtgcttctcacatggtataatcctcttcctgttgagctcttgttttcctcggcccattgagaaaatgtaggactactgtcgacaattcattatgaagagaaagaactcacggagctgaaattgctaactaatagaatagtgcttctaactaatactaatatatagatatatagaaatagatatctagaaacagaaatagactaatgcatagataattaaaattaaaaaactatcttttatgtataatgtgttccctgttctattgctactgagggtcttatgcaatcgattggatcatgtagatatcccttcaacacaacataggtcattaaaaggatcttggacgactcaccaaaacacaaaagccaattaggaaatgggttcctatttgaaaagtgcctaattgcatggataagctcgcattaacccatcaattttggatccatttcggaaattttcttgggaagttttagaaaaaaattggaatagaataatatcgattcatacatagtaaaaagttctgtattgatgcaaatgttgtaccaacatgatagggatagaagaggaaaagttgaaatgaaataaataagaataaagtcaaaaaaaggtcaaagatagaagagcccatattcaaaatgaagaaatagaaactcgaaaaggatcctttaaattctcaaagaatatggggggcaaggggactgataccgtgaaagatttcttgttattagaagacatggtttgatctacatacgtttgacaaaataacaattttatcctttaatcataaatcaaaagtgttcaattaaaatataaaaatgtgactcaagtggtcttagtctttgggatggagtgaaagaaatgcggggatccctttgaaagagttgaactagagctatattaggtgaaaatcttatgttcgattctgtaaagggacagtaaaaacgacttatctgtccacttttgtgctagctaatgtaattttgttttcaggtcaattaatatactggagtagtatactgtacagattctagcgcaacatccggttcaaccttttgtcgatcaactaattaactttatatgacagaagtttcatccccataaaacttatatgattcggttatctagtttatagttttgttaactatactataaaactatgcattaagactggcttgcagtacctcagtgcacactgtatatacaggcccacccacctaccctgtctccctttgtagagccttccaagctagtcgtcagtcgtcacttcacttcgctggtcactctcgctccatccgtagatgcgctctgcgtcttcttccctctggaacacactcccacacagacacagagcttgagctcgaaggccatggagaaacgaagacgcaggcacttgctgcttgctgctgcagccgtggtgctggtggcagtggcagcaataccgctgccgtccgcggaggcgaagctgtccccagactactaccggtcgacgtgcccggacgtcgaggcgatcgtgcgggcagtggtggcgaagaaggtcaatgagaccttcgtcacggtcccggccacgctcaggctcttcttccacgactgcttcgtcgaggtgagcaacatccatcagtgtctgcacctgcctgcctgcgcgttcgggcaatctgaggctcttttggccgagaccaagaatccgtttagaaattagaacacggaggggattgttttaaccgattcctgtgaagatcttgtgttttcaacacctcgctttatattttacaatctgagtcgctggtgactgaaaatttcttgatttgcaatgtcgtagaggttcagttcgacaaggcttttcagctgcattcagatcaacttgcagattgcgtcaaggacctcttagatcagactgaatttggtagtgttagtgctagaagaaggactgacgcggcagtagatgtagattattggtacgaatgacagctcgattattggcttctaatcacgcactcgtcggctgtgccatgtgactgcacgaccttttctgtcaactagtctgaattctatcagataatcaggtcagatgtgtcggacgcccgtccctgctggcaaatcagccacccacccatttgtcatcttccgacgaggcgaatacggaatttttatgctgtccacgtcatcgtttcgttccacactctgaatgtccaatggtgaatacgcttttccagtttgcgcggggctgaaacagaacgaaactgacatgtttgtggtgaaaaatcgactggcagggctgtgatgcgtcggtcatgatcgcgtcccgcgacaacgacgccgagaaggacgcgcccgacaacgtgtccctcgccggcgacggcttcgacaccgtggtgcgcgccaaggccgaggtcgagaagaagtgccccggcgtggtctcctgcgccgacatcctcgccatcgccgccagggacgtcgtcgccatggtaattgattcagacaagctctcacttcttactgagccatggcaattcggtttctgatcgatactgtgtgcttgtgcaatggcatttcagtcgtccggcccccactggaccgtccagcttgggcggcttgacgggctcgtctccaaggccggcaacgtcgcgggcaagttgccgggacccaacatgcgcgtcaaggacctcgccgccatgttcgccaagcacaacctcacgacgctggacatggtcgcgctctcgggcgcgcacaccgtcgggttcgcgcactgcacccgcttcacggaccgcctctaccgccacggcggcggcggcaatggcgcgtcggtggacccgtcgtacaaccctgcgtacgcgcggcagctcatgggcgcctgcccgccggacgtcggcgcggacatcgccgtcgatatggacccgatcacaccgaccgccttcgataacgcctactacgccaacctcgccggcggcctgggcctgttcgcctccgaccaggcgctgtacagcgacggcgcgtcgcggccggcggtgaggggcttcgctgggaaccagacgcgcttcttcgaggcgttcaaggacgccatggtgaagctgggcagtgttggggtgaagaccaccggcaggcacggggagatcagaagagactgcaccgcattcaacgagtagatcgaggatgctgcaaacttgtgcaaagattatttttcatattttgacccatttcttttgcaaaaaaaaaaacacactgccgcatacgtaaggtcgtaagcaaacttgcccacgttcacgtgacagcacacaacgctacccttaggaatgtgtacaagagattggggcagcaaatattatgcaaactcaaatgcacgcttggtcgcgcgttcgcgcgctcgtgcaactgcgtgatccgattctcacgtgccgaaaaaagagacgttacgcgagagagagacgaaaaaaatagaaaataaaatagccgttacgccgaaataaaacaaaaatgagcgagtgagcccaaattaggacctgtttgaatgatgtggtttttgaaaactatagtatcacaaagttgttgttctataagctacagagacataaaactgtagtttagaaaaaagagctcatgaataaagtttttaattagaactccagaaaaactataggtttgacaa

SEQ ID NO: 3699 - DNA, 6164 bp, Sorghum bicolor
  misc_feature (3326)..(4156): n is a, c, g, or t
ttaacaattactatctaattatagactaactaagctcaaaagatttgtctcataaattacatgtgaactatgtaattaggttcctttccatgctctaataaggccttgtttagatgccaacagtttttgaagtttgacattgtagcactttcatgtatttgataattattgtccaaccatagactaactaggctcaaaagattcgtctcgcaaattacagacaaactgtgtaattagaccttgtttagttccgaaaacattttggttttggttaccgtagcactttcgtttttatttgacaattattgtccagtcatggattaactaggctcaaaagatgcatctcatgatttacagacaaactgtgctattaggtcagtctcaatgcatagtttcatggcatagttatcaagactataaactaggtaaccgagccacatgagttttatggggatgaaattcctttctcatatgatgaaactcgttcatttaatgactctgctaagtagcaattttgcttatgtagcaccctatttaatgtgcatgacactctcatgaaacatacattaagactagctttagttttagtttttgtttatatttaatgttctatgtatatgttgcaaggttcgatgtgacggaaaatcttaaaaagtttttagtttttggggtgaaataatcaatgtcgtaggaagcctgaggccttgtttagttaactccaaaatccaaaaagtttttaagattttctgtcacatcgaatcttgagatacatacatgaagtattgaatatagacgaaaataaaaactaattacacagtttaactgtgaatcgcgagacgaatcttttaaccttagttaatctatgattggacaatatttaccgtaaacaaacgaaattgctatagtaacgaaatccaaaaaattttcatatctaacgaaattacctaaggccagagagtgatctaaagagtaccagtgtcagtgtcagtgtaacgcgagctcctcgacccagacagacaaaaaccctaaacgaatgacctgtggagcagggcaacgcgaacgaatgacctgtggaacgaatgacctgtggagcagggcaacgcgagcacgcgacgattcacgagtgcgtgcatacaggtatgtaacagactggacgtacgtcgtccgctccacacccacggccacggccatgccgtgccgcgagccttcccttctggagcccgtgaggcccattgatgctgctcgccgtcgcccagcgacggagccggcccggccgccgtccgtgtccgaacgaaacgaaaccgccacttttcgaattcgaactcgcctccatgcatggggatgcgtaaacaaacaagagggaacgaaacaaaagtatagccgcggacgtcaacacatgctctacacatgcagacggtccaaatcatgcagacaaaaacaaacgcaaaggctagttaaaagctaaacccaactccatccggaccaaaacaagacggacgggcacgggcacgccagcccagccgaactcatccccatcccgagctcacctgccgctgcctgccctcgctacgtgccgcgccgcccgtcaaccaaccaacccagccagccgcgtcgccgccgtctccgtgaccgtgaccgtgagtgacgaagctcgctcgcaggcgcaggcgcagagagacaccaccgtcacacacccagcacagcacacacacacacacacacactgatggctaatcaactgagcttgctgtgcagctggcccccatgtgactgtgttgtcagccactgacgactgcgcttgccttcatcaatcacacacacacgcccctcccagctcccatccccatgtgcgcgctctcaatgccactgcccgctccacgctcccctctctctctctagatcacacgagacccgccgccgtcccgctcgcattccctgccagctcctccggccggatcgcaccgcgccgaccaccaccagacactccattcctcagagccatgatcctccgcagcgcggcggctttcgcgctgctgctgctgctgctcgcgtccccggcggcgacggcgcaggagggcggcggggacgccgtctccgagccgtacgcgtcgtcgctggcgacccgcttcgacgcgccgccgtcgtgggcgttcccgaacgctcgcctccgcgcgtcctacgccgcgctgcaggcgtggaagcgcaccgccatcttctccgacccgtccaacttcaccgccaactgggtggggcccaacgtctgcgcctacaacggcgtcttctgcgcgccactcccgggctcccaccccggcgacgtcgtcgtcgccgggatcgacctcaaccacgccgacatcgccgggtacctcccggcgtcgctgccgctgggcgtccccgacctcgcactcttccacatcaactccaaccgcttctgcggcgtcgtcccacacacctttgcgcacctccacctcctccacgagcttgacctcagcaacaaccgcttcgtgggcgggttcccggaggtggtgctgtcgctgccggcgctccggtacctcgacctccgcttcaacgacttcgagggcagcatcccgccggcgctcttcgaccgcccgctcgacgccatcttcctcaactccaaccgcctccgcaacccgatcccggccaacctcggcaactcgccggcctccgtcgtcgtgctcgctcacaaccgcctcggcggttgcatcccgcccagcatcggacggatggccgacacgctcaacgagatcgtgctcatcgacgacgagctcacgggatgcgtcccgccgcaggtcggcttgctccggaagctcaccgtcttcgacgtcagcgacaaccacctgcaggggcagctcccggctgccatcgtgaacatggctgctgtcgaggagctcgacgtcgcacgcaaccgcttcgagggcgcggtgccggccggcgtctgcgcgcttgccagcctcaggaacttcacctacaccgacaacttcttcacctctcgcccgccttgcgccaaggccaccgctgacggcgcctggaattgcattcccggcgcgccggcgcagcgcccgccgtcgcagtgcgcggccgccgcggcgcacccgttcgactgcagcaaggcgcaatgccaggcagccccgggcggctacaccccaacgccgggaggcggcggaagaggtggccacggaaccggcaagcggccgcccacgccggtctcgtcgcctccgaaaggcaccttcatagggagcccgccgccatcgtctgctactcccactccttcctacccgtcgccgccgtcgagcgccaccaccccctcnnnnnnnnnnnnnnnnnnnnnnnnnnnnnnnnnnnnnnnnnnnnnnnnnnnnnnnnnnnnnnnnnnnnnnnnnnnnnnnnnnnnnnnnnnnnnnnnnnnnnnnnnnnnnnnnnnnnnnnnnnnnnnnnnnnnnnnnnnnnnnnnnnnnnnnnnnnnnnnnnnnnnnnnnnnnnnnnnnnnnnnnnnnnnnnnnnnnnnnnnnnnnnnnnnnnnnnnnnnnnnnnnnnnnnnnnnnnnnnnnnnnnnnnnnnnnnnnnnnnnnnnnnnnnnnnnnnnnnnnnnnnnnnnnnnnnnnnnnnnnnnnnnnnnnnnnnnnnnnnnnnnnnnnnnnnnnnnnnnnnnnnnnnnnnnnnnnnnnnnnnnnnnnnnnnnnnnnnnnnnnnnnnnnnnnnnnnnnnnnnnnnnnnnnnnnnnnnnnnnnnnnnnnnnnnnnnnnnnnnnnnnnnnnnnnnnnnnnnnnnnnnnnnnnnnnnnnnnnnnnnnnnnnnnnnnnnnnnnnnnnnnnnnnnnnnnnnnnnnnnnnnnnnnnnnnnnnnnnnnnnnnnnnnnnnnnnnnnnnnnnnnnnnnnnnnnnnnnnnnnnnnnnnnnnnnnnnnnnnnnnnnnnnnnnnnnnnnnnnnnnnnnnnnnnnnnnnnnnnnnnnnnnnnnnnnnnnnnnnnnnnnnnnnnnnnnnnnnnnnnnnnnnnnnnnnnnnnnnnnnnnnnnnnnnnnnnnnnnnnnnnnnnnnnnnnnnnnnnnnnnnnnnnnnnnnnnnnnnnnnnnnnnnnnnnnnnnnnnnnnnnnnnnnnnnnnnnnnnnnnnnnnnnnnnnnnnnnnnnnnnnnnnnnnnncgtccacttgactctgtgtgctcccgccagtataatacttctccatgcatccatgtagtattttttttcttggattcttttttttttgtttctttgatgatgcgtatttgatcaaattgaatcaaagagttgctatgtattgattctttttcttcctcctccctccagctcctcaccgaatgaatttattaattattttcaagatatatactcctataaaacactgcccttgtactacaatcagatcagcatctcccggtatggtatacacgatcgatcatgaacgtagcgagacgagatccagcacggggaatgggaatccatgttgggcaataaataaataaattcgtcgtagatgtgcggaatgcaggcaccgccatgggaagcgccaaccttttcaattcatgagccccgatcggaatgtctgcacgcgcttttgcggaggtggtagagatgccgacgcaaagcactttcagatggctctttcggtggcaaagtactgcatcgctagcagttccgagcaaggaaaaaggtgatcggaggaagaagaaaggccaaaagggagtggagggacaacagttgagtttctttcggcgtggccatggcgccccccgtcgtgaggccgccgccgcgcgcgtgacgaagcgaggaagggaagaagcggaagcagcagggggacacgggacgacagggtggagaaagaggacagctttgggtggtggtgagctagctgagctggtggctaatcaccaatgcatggatgcatgccgtgccgcggagtttaattaccagtgctggtggctaatcagagagcggcaaccaccgtcccgtccgtgttgtactttgccggattcagatcagctgatcagaggaaagcgacagcggccagcgggcggccccattgtccgtgtcccatggcggccgcgtgggcgtgtccatccgatccgaccgagtccgcccgcccgcggcgcggacccccacacacgccagcgaccactccgctgcgctgcttccccaccgatccatgtgcgcgcgcgggggcgttgtacagctgctctgctcctgctctgctgccgagggagtgaggagaaaaagggcacgcacgccagcggctagcgggcatgcatggcccatcggccgtggaggagtcggggcaccgcaccgcgtcggcgactcgacgctgcgagcgagcgtccccggacgtcggtcgtcctcggccagcgcggcaagatttggccaccatttgggtggctgcggattcgccttgtcaccaatccccatcgtttcgtcgggagggagtcacatgggatgcgatgcgagccgtgcatgcatgcatggcgcagtacagtgggcaggtgacggtgcgcggcggcagccagccagccagcagcacggtggtcggtggccggtgggtgagcagcatcgatgcggccatgcggggccaacaactactggggtcgcttgatcctgcacgaccgattcacattcacccggccgttaaccactgagggacgggggcgagatctgcaattctgaatcatttgatttatttaattatctggtttacttattttctttgaccgtatgcgacaactgaaaccggttcgttcgtacgtactacatgaacgagctagggaagtagaaatacgcatgtggtctgctgctagaccgtgccatcttgtttagttaggccttgtttagttccaaaaatttttgcaaaattttttcgattccccgtcacatcgaatctttaaacgcatgcatggagtattaaatatagacgaaaataaaaactaattgtacagtttggtcgaggcctaactaaaatctttaatgcttcatgcatgtaatgcaaaatttaatatgacagagaattttaaaaagtttttggattttggagtgaactaaacaaggccttaatgatcgtccaactacaaggcatgcaccgacagtacgtacttgcgactcgaggttagtagattcagaactactgctgtactagtaggct

SEQ ID NO: 3700 - DNA, 3398 bp, Sorghum bicolor
agttttgtctcaagtcaaaatatcttaagtttagctaagtttatagagaaattcgtaacattaattaccgcctctgccttctgtgatggttttctaagatcagatcttcatgactcatctcaagctcggcaccgagagaagggaacaattacagtcgcataaacagttcacggatcattctaaggcggtgtttggttgccaatactaaactttagtctttatcacatcgaatgtttagacatatgcataaagtattaaatataatctatttacaaactaaaaatatagctagaaactaatttgcgagacttttttaagcctaattaattcatgattagacactaattgctacaataacatatgtgttaaagagagattaattgtgcttaataaattcgtctcgcagagtagtgacagaatctgtaatttattttttattagtatccgaataccccataggacacttcatatgacatctaatgtgacacctgttaaattttagtccctacaaccaaacaaaccttatgttagtcatcatcaatcctgagttttctactgcaaaaacgattcgaatggtctgaaataatcgactatcctaatttgttcgcttgagcttatctgttgaatcattcagtcattcaataatatttttctctcacaacaaatcaataaacagtactttcaaccataattttttcagtcaagcgaagagacgagagtctgtttacagttgtgcacaataaaattccttgcttgttcttgcttcatggcagcagtgttgattagaatgcaccgcagcaccgggcaccgcaggggcacaccggccttcatgttcggctaacgcaaagttattgggatgaattatgaaaccatctacggggacattgttttttttttaatatcggagacctaccgattatattaaaaaagataaatcaaaatgaggtaaaacaacaaaaatagtccctccatcccaaattgtaagtcattccaaaaatcttgaagagtcaaacttttctaagtttaaccaaatttatattataaaataataattattatggcactaactaagtatcattagattctttcttaattatatttttatagtatattcactttacgttacaaatcttaatatttttctctataattttggtcaaacgtgaaaatgctttgactctccaaaatttttggaatgacttacaatttggaatggagggagtacaacagagcaatgtgactcaataacaaagacaactactcctataagctaacaactaaagacaaggaaaaaaacaaaccctacaccagacgattggattgtggcatcaatacatcctgcataacaaagaagcaccacacgacacatcattgcccccctcagtaaaagaaggcacgacacaacatgggttgaccatttatcagcaccaagctagtaataaaagatcaaattatcctcaagagtcaagaccttatcggccggcatcaacaccatatccatatttataataccttgcaactgaattatgctacattgcctccaataccttttttttttatgaaatggaattctttttccctatggggcttctcaagaaccccagattccgaaccaaatgtcaaccaaacacacgaaaaacacattctccccaatctaaaaggacgaaacacattagaaatttcagtcagaagacacacctgcaatatctaatcagccgtaccggcaaaaaccgatagaatataagggtacagccctgtttcttgcccgcacgtatggccggtaaaccgtaccgatctccatggctcgccggtgtgcgtgcacgtcgttgccgacttgcgggaggtggtcgtgaacaatgtgttggtcccaatcatcaccggattcctctctaattgatccaacgcaagctataaatacacttgcacccttgcattgtctgcagagctcgatcaactgccttaaccaaaggtacgaacaccacgagcgaaaagtagcagcaatggcttctccctccacaggcacggccttcttggccctcgtcatcatcttcttggctttgctatgtgcggccaccacggcgaacgcgaggttcacggcgatgcagtggactccggcgcacgccaccttctacggcgacgagaccgcagcggagaccatgggtacgttgctcaccatcgccgccggcattgcactgccacgctcgttccctcttggcatttctcatttctcttacgggcaaccccgtgcgacgtcttcctacaggtggggcgtgcggatatggcaacctgtacgcgaccgggtacggcacggacacggcggcgctgagcacgacgctgttcaaggacgggcacggttgcgggacgtgctaccagatccggtgcacgggttccccgtggtgctacgccggctcgccgtcgatcacggtgacggccaccaacctgtgcccgcccaactgggcgcaggacaccaacaacggcgggtggtgcaacccgccgcgcacccacttcgacctctccaagccggccttcatgaagatggcgcagtggcgcgccgggatcgtgcccgtcatgtaccgccgcgtgccctgcgtgcgcaggggcggcctccggttcgcgctccaggggaacccttactggctgctggcgtacgtgatgaacgtcggcggcgccggcgacgtcgtcgagatgtgggtgaagagcggcacgtcgtcctgcgcgtggatacggatgacccacaactggggcgccgcgtaccaggcgttcgcgcagctcggcggcaaggcgctcagcttcaaggtcacctcctacaccacccggcagaccatcgtcgccaccaacgtcgcgccggcgaactggggcctggggctcacgtaccaggcccgcgtcaacttctcctgagagcgcagcagatcacgtcgatttgcaactgaagctgcaggggctgccaacgctctgctctgctttcgtagttttatttcgacaatcgtagagttagcacgtgctttcgttcgtagtttcattacacatttgcgcttgaagaattagcacgtgtttgtgctagctgttgcgcgttgcccccgtccatgaggagcagagggtttgacgcgagcgttgttcttgtaaaattgagctgttatatactttcaaaagcaagatgagaatttttaatgtcaaaattttaaacccgtcaactgtcatggttgggcggtttatggatatactccctccgtccacgaaagagtcaaattctagagttgtcctaagtcaaattttttaaactttgaccaaatttctaaaaaaaaatgctaagatttatagtatcaaattagtattattagattcatcatagaatatattttcatataatgtgtattttatattagagatgttgttactct

SEQ ID NO: 3701 - DNA, 6164 bp, Sorghum bicolor; identical to SEQ ID NO: 3699
  misc_feature (3326)..(4156): n is a, c, g, or t

SEQ ID NO: 3702 - DNA, 3398 bp, Sorghum bicolor; identical to SEQ ID NO: 3700

SEQ ID NO: 3703 - DNA, 3539 bp, Sorghum bicolor
  misc_feature (2452)..(2551): n is a, c, g, or t
aagaactaataaagtgctagcccaaaccaaataccctttgactcggtcccaaacgtcatggaccacgcatgcaaatagtcaaccgcggttgacaaagctggagagggaccgtcggttctctcttctcttctgtggcctggttggcagatgagcccctgaagctgaaggaggctcagctgatgccactcggcgcacggcaccgcatcaacaattcaacatcgacacatcaatggcgtggaacggtcgacgggacagacgacgaccacggcgggccttcaatgcggcagtaactgctcctatctgctagccaccggcaaagccgcgtgcgtgccattccatcgcggcattgcgcgcgcggccaatcaggatcagagaagagagcccgggcgccccccgtttccatgcatgcagcaaacgcacacgcagccgcaaccgaccgcgaggcagccgccatgtgtgcccgtggatcgatccatctgtggtggctcatggccgctgcaatgcgcttgttggccgtcgactgttcacgtgtagtcgtgtatatggatgcatgtcgacctcgtcaatctggatcgagagattattgggccttgtttagttcctagaaaattttgcaaattttttcacactctctgtcacatcgaatctctagactcatgcatgaagtattaaatatagacgaaaataaaaactaattgcacaatttggtcggaattgatgagacggattttttgagcctagttagtctataattggacaatatttgtcaaatacaaacgaaagtgctacagtgtcgatttcccaaaaattttcgaaactaaacaaggcctcggtgcaaatcaatgccctagttggccctattgccggccacacattatgacgtactggcccggcccggcccggcccaaaagtgccgtagtcgatctgtagtacgttatgggttgctgaaactgatcgaattcttctttagtttttgttcatgaaaaatatctctcagactcgcagttgctttatgccttcatggaatttttggactagtaatctgctcgtgcaaaaaaaaaaaaggtgtgcatgccactcaacgcttggagatgaacatggtctagaacactggcctgcaagtttggtactccgctgtagcgccaattattccagtggtacccatcgaattctgaacaaataacactgcgctagaaggttgccatgcattagtatgtcaagcattagatatacaattgtttcatgggtagtctaatcaccttttaccactgcactctccacttaaacacgacaaccactagtctgtctctccactgtgctaagctacctctcctgctgtaccatgcatgcaaaactttaatggagatgaaaatttgacgagcaatctttcaaacaatatatggccttgtttagttcactctgaaaaccaaaaaaatttcaagattccctatcacatcgaattttgtagcacatgtatgaaatattaaatatagacgaaaacaaaaactaattacacagtttagctggaaatcacgagacgaatcttttgatcctagttagtccatgattggataatatttatcacaaacaaacgaaagtgctaaaaaatcttttcacttttcggaactaaacaaggcctatatatcataaatcataggcaaagagcagtagtccagtagagcaccatcgtgcatgcaacactttaatgctctccttgcgtctcacctgtccaaaacgcgcgcggcaactcctcacaggcaagttgatagtcaacattgctcagtgttgacatatagctgtagcattcactcacttactcttcttctctcttcggtcttcccttcagacagatctcgctccactccctccttccctatataaagcatgcgagctcttcacttcgaatcagaggcaagaccccaagcactaatccacctcaggaacacatccaccgatcagtggctggctaatctagctagagctagctagccattgccatcatggcgatggccaggaagcctacctgcgctctccctctcctccttgtagccttcctctgcttcacatgctctgtctttgctcacatccacgacgactacgacgatccgaggtacgggcctgggggtttcggccgtggtcccggcccgaaaggcggctatggacgcggtccgcgcttcggacgtggaccgtttggccgtgactgccgcttcggccgctgccgcggaggtggtggcgggcttggaggcggtggaggcttcggaggtggaggtggagctggcggtggtggtggccttggaggtggcggcgggctcggcggtggaggaggtggtggcctcggtggtggaggtggcgcgggtgctggaggaggctttggtggtggcgtcggaggtggtgcaggaggtgggcttggtggtggaggcggtggtggatttggaggaggcggcggcggtgnnnnnnnnnnnnnnnnnnnnnnnnnnnnnnnnnnnnnnnnnnnnnnnnnnnnnnnnnnnnnnnnnnnnnnnnnnnnnnnnnnnnnnnnnnnnnnnnnnnngaggtaagggtggaggttttggagccggcagtagtatgcgaggtggagctggcggaggtggcggccttggtggtggtggcggtggcggcataggcggtggtggtggcagtgggctaggcggtggtgctggaggaggattcggtggcggagcaggcggtggcgttggaggaggaggcggccttggtggtggcggcggcggcggtatgggcggtggtggaggcggtgggatgggcggtggcgccggcggcgggttcggtggcggagcaggtggaggactcggtcatggcggtggtctcggaggcggaggtggcctcggtggtggaggcggcgccggaggaggcctcgggcacggcgttggtctcggcggaggcggcggtggcggcctcggcatcggcattggtgttggcgtcggagtagggatgggcgcgggggcaggcggcggcgccggtgcgggtgcgggtgcgggtgctggcggcggcgggcgttgattcatccgtcgacgtcgagtttaaagagaagctatgcatgcacgcgtgcggcatgcatgcgtaatggacgcgcgcgcgatactcgatctcctttccaaacgatgtgtgtatgttcacgttctgcgctgcctggagtagttacgaattactctgtgatgtggtcaaatttccgttaatttcagtcctgtgtctgctgtgtagctagtcttttctcattgttgacattgttgtcggtgtccaaatgtttgtaataatctatatatatgctggggaaaaaaagagtcgaatgattaataatacagtcctagtgatttttttttcatgtattccatccaggctttcagcttgtttgaacttcagagacttcagagtttctgaggatctcccactgtctgtgtttgtgcatgagcagcatgatggtctttctacgttccctgcaattttcagaatttttctgccttttaatgctttcttcggtcctcctctggacctttttcgga

SEQ ID NO: 3704 - DNA, 4502 bp, Arabidopsis thaliana
ataaatcctgaatttggacttatttacaactcaatgccattagcattaaatcttttctccaaaataattaattttacttgatttaaattgtcaaccacattatcaatcaaatttaacccttaaaattagcataaacatatttgttaacaatattttaaaacaaagttttttgttaaaacaaatattattcttactaaacattttttgtttaaataaataaatcatgtatttgaacttatttacaatctcatgacactgacattaattatttaggaatgaaaatatttaattaaagatttaaatcttctaaatccttgcttttagagttattatgtcattaccttaaaggctcaaaatataaaataaataaatataattatttaaatattttaaatttataaaacattattaatatttaaaattataaaaagtttaatatatcataattttttaacatcattatataatatataaagtttaaaaaaatctctattctttccgccataatttgtgattcgaaattttaaaaataaacatatattaaccaattggcgaaaaatgtttgagttcaacgtcccacatcgactaaaatatttagacaataattcataaacatatcataaataagattaacattaataaaataatggtttttttacgggacgggtttggcgtgacgggtttggcagaacgttacttaataacaattgtaaattataaaataaaaatattttatagatagatacaatttgcaaaattttatatatattaactttaaaatataaattgtccccgcggtgtaccgcgggttaaaatctagtattgaaatattttggtttcaattatttatttatcgggaattgattttgaattggtagtgtgaattattggtgtcactgttataccgcgctggcaattaaatcgatagggtcatatagatgtcattaggtaatcgcaagagtaatatattttatggatatggtaagggttgatgctttgtcatggtttttattattattattatatataaatgtaaatattaatgaaatagtgtgtatatatatatataatagttttggaattacatgatgtataatgtatataggggttgagagacctatgaccggtcaaaatttgggggccaaagtaacaaattatatatttggggttattataaactgttttgaaatttggatatatttttcttagaactaaatatatttggaagcctatttataaatcaggtttgctgtaaaaaaaagtttttaaaaatggagacaacatacaaatgtttcatgttgcttctttcagagccggcccgggagaagcgttgccaaaaaagaataaagacaaaggtaacaaataaacaaagaagacacaacagtgaattcatctaatccaaagttgtatgtggtttccgaaatgcttcctttgtcttgttccgaatctctctgtcgatgaacttgaaaatggtgtttcacgttcattcaataaaaaataacaaccatagtgtacacagagactgatagtgaaataaaggaaaaaaaaactataatctgttaaattcagataatatctattatttttttgttttgttgaaaaatcaaatctctagtaacattaatgagtatgaatcgtgtctggtagttggtacgaatcgagatctcatcaatgggttttttaagctgctttgagacgtgcgtaacacgaagttgtccactatgacttgctcttgtacttataagttaaaataatgatgcagcagaaaacaattactattttgtgagacacgtatatcccaacaaaacaatatgtcgtagaacgtgctaattaattagtgaatacctacgtgtcacgatctcatgagattggtgtattactgagaactaacgatctcatgagattggtgtattactgagaactaatcactaataaacgtgaatctcgtgacacatattatcattatgcctatatatacgtacataaaacaagacattattacaaacacaaaatatagaaaaagaaataatgtattcagaggaaaagaaaagcagaaattatggttcaatctttgtctactgcttcttctgtttcgtactcattgtggaggttgcaagattcgcaaaaccttatatcaaccttcaaaacctaattgagacggaagcagtagtagaagaaggtttcatggcggtggggaactcagggaatcttccgtgtggctcgtcaaaacctagctctgcctctgttcgtgctcatgatgaacagaagctctcgcaagcagtaacaacagatacgagaactcgtcctccaaattcgtactgcgtgaagttccagtcttttgtcactatggcaaagcaggtcaaagaaaacggtggcaagtatgagtcacgtcctttctccgtcggtggatacaattggtacgtacgcgttgacttccatttcaaaaatgttgagaaaccataccttatacatagaagatatacatttttttttgtcaaagggtattcatttatatactagtgttttgatcatctccactttctatgtgaaagattttaacttattgctctgaatctcacccaaattttaatttgtatataatttgacatatttctacttaaaatgttataaggacgctcctaatctacccagtcatatacattccaacggactcgggtgggtacgtttcgatttacgtaagagtcgataactcaagcctcatcaccaatccaaaagatgtgtatgcagagatcacattcctcgcttataaaagcagtacagacaagtaccaaataagccagggtactaattaactaatctagagcaagtaaatatatatgtttaaatcttttgtggtttgttcagactagttatttaagtttgatccgtttgcagagactgaggcccagcgatttcatttgtttaaacaacagtggggacttttacaatttctaccaatttactattttgaaaatccggcatatggatactttttcgagggcgaaagcgttgtgtttggcgttgacatcaacattgttaaaccctttgaaaattgggaagtgttctctaatgaacaaaacattcgtgaccctattttcgaatggagactcaccaaattctctacacgttttcttgactcttacacttctgattccttttcttccggaggaagaaactggtacgtgtgactttcttcctcttgtatatatataacaatacgtacaagatgtgttagtttaataatatgatggttttttacattgaagggcattgaaagtgtatccaaatggagttggaaatgctacgggtaattcgttgtcactctatttgttgagtgatcagtcaaatgataagggttatgtggaagctaagttacgagttattgaccagatccaatccaacaatttcgagaaaaaaggtttgatatctactttgtcaactactactactaatttaaagctaattaattataattaatgagcctttaaaaaataaaaataacttttgatttcttcctatatacacagtggcggcatggcccaatgcaacggagaatggatggggtttcgacaggtttctatcatttgcagatatcaaaaacacatcaaaaggtttcctagtcaacgatactctcaaacttgaagtccagatcttgtccttctcgaaaaccgactactactctcatcaatcgtctcttaatgttttaacgggagatagtacttaggtgactaatcgtcgctagtgtaattttacaactggctactatcactttgcttcattgtgttttttgtttctgttcaataataatgagttcgagctttcctatgtcaaacttgatcaatctgatttcacatattgaataccaaattggataggatgaaagaggcagtccctaggatgtttttttttttttttggatttaaagattgggtacgtaatccattcacatttccttttataattgtccacttcttaatcgtttagtcgatcgtctacggcttcaataattgtagttttgtccttagtaattgattattcttttcacttcgtttttcgtccactaatacaattactacaatgttgttcttctccataaacattatctacatcgattcctctctattgcttgtagttgtacagttgtctactgcgcttaaactttttgttcacttttcatttatgttcccgtcctcggcttcaactactgtacttttgaagatttgttagatatactaggaacatgaactgctactaaaaacttgtccacggttccatcttcgtggacatctgtattttgtttacttcgtttctcgtcgactgctacaactacagtattgttgtccatcatcccttctccgatacattatctacatccatctttcttcgtttctcgtcgactcctacatgtttgggtgacaaatcatcaagtgataaattattattgtattaaaagcaaccatttttattgtataacaaccatcataactttctttctgtccaca

SEQ ID NO: 3705 - DNA, 4229 bp, Sorghum bicolor
taagtcttgcttcttatgggaggatctatggggtaatgaaattcttatgcataaattcccagaattgttctctttcataaagaagaaggaaattatcctggctgaaggaatggctcaaactccgttgcacagccttttccatttacccctatctcaacaggctcatggccaaatgcttcagttgcaaaatattctggagggggtttccctaaatgagtctactgacagatgggtttacatttggagcacgggccaattttcagtgaagagagcttataatcatttgagtggacacaggatgttacacccagtttacaattggctctggagaagttcttgccaaaataagcataaagtgttcttttggcttcttataaatgatagactgagtactagggaattattgagaagaaagaatatggatcttctagactacaactgcattctttgcaatggctcaattgaagaatcactcttacacctttttcttggctgtccttttgccacacaatgctgggcttggctcaacattcaggttgatcacgactctgatccctttcagaaccttcagggattcaaagagcaactaggggtgccgttcttcatggaggtcatcattttaatgtgctggactatttggaaggcaagaaatgacaagatcttccgccagatttatgagaatcttcaaatatcaaaacaaaacttcagagatgagctccagtttttactgctgcgaacaaaaagaagctaccatccagaaattgatcaatggattgcagatttaacttagcctggttcctttcggtggtagctttgctttttctcatttcttttttcatgtcttaactctccctcgtcccttgctctcagttttcttttgttttgtatcttgattttttttcaataaatatgctgtaggggtacaaacccttccagttttcctaaaaaaaaaacagagcaggatttttttttacccccagtggatttagattgaaaacagtacatgcagatgaaatagtagggatataatgtcagatagaatggtatgagtatactactgtagatcgaaatacatgagtacacacacaatattaaatggtgggtcagcgctcatatcggatctatatctttttaagttggaaagatttaagagcctcagagtcaaatatgacgtgcatagatatagagattggatagacagacgttacattgagccattgacattttggtatcattcatgtttagattccatttgttggattcatggtaaagattgctacggtgaagaacggcttgtagattgtgggttcttaaaagctactgcatccgtccgaacataaatcaacttttggagttgtatcattaaatcaaattattttaaacttaactaaatttatataaaaataccaataattatgacaccaaattaataccatcagatgtatcataaaatatattaatatattatgtatttattttatgttatggatgatgtcactctttctaattaaacttaagatattttgactttatattaggtggttttagaatttgatttgttttatttaggacggaggtagtagaaaaagcttggtaaagataagcttatgggatgttataatctgaactagatatgattaaaagctgctttcaagtgacacaaactctggtcgatctaaatagggccttatacaatcttttgtagagtgcaagttagtaatgaagtatctgtacacaacatctggtacaatgtgctggccattattcccaccacaattttcaggtaccggttcagatcccccggattcaacaaaaatgccatcagtgtaataagggagcccacatgccagtcgcggcagaagattcactttccaaatggccccctgcaagctgaagaacgagtgaacgacaacgacaactctcctgttgagtgatgatcccacgggccacggctcctccgtcctataaatccatggccaccgttggccattccctctcgcgccgcagcctcacatcttcgttctccattgctcctcgttgcacactgcagagggacaagaaactagaaaggaggaagagggagcaaagccggtggagatggcgacgtgcgccacgaccctcgcgccgcttctgggcccggcggcggcgaacgcgacggagtacctgtgcaaccagttcgcggacaccacgtcggcggtggactcgacgtacctgctcttctcggcgtacctcgtcttcgccatgcagctcgggttcgccatgctctgcgcgggctccgtccgcgccaagaacaccatgaacatcatgctcaccaacgtgctcgacgccgccgccggcgcgctcttctactacctcttcggcttcgccttcgcgtacgggaccccgtccaacggcttcatcggcaagcacttcttcggcctcaagcgacttccccaggtcggcttcgactacgacttcttcctcttccagtgggccttcgccatcgccgccgccgggatcacgtcgggctccatcgccgagcgcacgcagttcgtcgcgtacctcatctactccgccttcctcaccggcttcgtgtacccggtcgtgtcccactgggtctggtccgccgacggctgggcctcgccgacccggacgtcggggaacctgctcttcggctccggcatcatcgacttcgccgggtccagcgtcgtccacatggtcggcggcatcgccggcctctggggcgccctcatcgagggcccacgcattggccggttcgaccacgcaggccgctccgtggcgctgcgcggccacagcgcgtcgctcgtcgtgctcggcaccttcctgctctggttcggctggttcggcttcaaccccgggtcgttcctcaccatcctcaagagctacggccccgccggaagcatccacgggcagtggtcggccgtgggccgcacggcggtcaccaccacgctcgccggcagcacggcggcgctcacgacgctgttcgggaagaggctccagacggggcactggaacgtggtggacgtctgcaacggcctcctgggcggcttcgcggccatcaccgcgggctgctccgtggtcgacccttgggcggccgtcatctgcgggttcgtgtcggcgtgggtgctcatcgggctcaacgcgctggccgccaggctccggttcgacgacccgctggaggccgcgcagctgcacggcgggtgcggcgcgtggggggtgctcttcacggcgctgttcgcgcgcagggagtacgtggagcagatctacggcacgccggggcggccgtacggcctcttcatgggcggcggcgggaggctgctggcggcgaacgtggtgatgatcctggtgatcgcggcgtgggtgagcgtcaccatggccccgctgttcctggcgctcaacaagctgggcctgctccgcgtctcggccgaggacgagatggccggcatggaccagacgcggcacggcgggttcgcgtacgcgtaccacgacgaggacatgagcttgagcagcagacccaagggggctcagagcacgcagatcgcggccgcgtccagcggcgagttctagtggggcatagtgccaacatattatatttacacatacatatgcaccgtgcagaatgcacgcaggtggttctttgtgttgtgttggatctcaaatctcatagtatgttactccgacatgatgattgtacaataacaaccatgagatatactacttttgtctaagattacttccccctccctctctgagcttcatacaaaaaagtattgacaccataaaattaaggaaggggaaccaaataggccctaattctttttttaggttcaacggggggaggcgtttcccgtctgatttcattcgttttagtccaaaacggttcataagtacagcagcatttacatatgtaacaacgatgttgcaaaagaaagaaacttagatagagggtttttcgttctaaggttgagagcattcattgccgcgcattccaaaagaaaaattggtcaagaatggcatatcgcgatgttttttatttctgatctaccatcatcgtcgccgtcgatgtcatgacatctatgcaatatcttcacggcatccctgtttcccacatgtctctttttaagcggctctgaagtctgaactggaaacatggaatccatcccacccctttgaacgggtcaccagaaacagctcaaagccctgataaagttgctgagagacatggctcc

SEQ ID NO: 3706 - DNA, 5856 bp, Sorghum bicolor
aattatggagtaactaggcttaaaagattcatctcgtgatttacagataaactgtgcagttagttattctttttatctatatttaatacttcatgcatgtaccgtaagattcgatgtgacggagaatcttgtaaaattttgggtttttaggaacaaggcctgaagcagcttttttccttcgtccacggaacatctgtcaccgccacccgacacacaacaaacacacatcgagtcaccaccgtccgttgcgagttgattttctcatgggttgtcttgattttcttcggccacgagttgatggccgtatggagcagcttgcactactgctgctactcttgttatctagcgtctagctattatgccctttctaattttgtaaaatttgatactattataatctataaaagtatttatttaaacttattagctaaatttatcagaattaatagtactttctgtcgtagtttatcaggcaaagaacgaattgcatctccttacctggctcgcggcgtagaaaccgaggacctcgctctctcgaatgagccgaaatccctcttttgcagaagcattgcttgtttgcctttctacttcctagctggacaaggcgaacagagaactggcgggagatacgccctatgtttatcacttaatataaattataagtagattgttgtttgcctatgatgaacttgcgtgtttatttgctactttctgctaactatctttctaggctgttgttgtcattgattactaggagaacgctccgcgcgttgctgcggaaattaccggtaaattatactatcataatatatgttagtagatgatttttagtattctagcatggacagctaaatatatgttagaaaataatatggtttgctaatgtgaataacatagatgtaggataaatgatatgtgttagtttgatttattagtggataatgatgtgaacactttgcatgacggggtaatgtattagtgggatgatttagtggatgttgatgtggatgcttgcatgacaagaaaattagttagtgggatgctctagtggatgatgatatggatgctttgcatgtcaagagaattagctagtggagtttatctatataagagatatatatttgctcttataattttaattaatatgtattattattaatttatttttaaaaagataaaccgtatccccatatcagtttttctagaaaatgtcttatctatgtatctgtgtccgcccgataatgatatcagatcatttttaaaatttgccttagctatgtatccatatcctcccgatactgatatatatccatgctgccgatacatgtattcgtaattccataaatgtgctccatagttgaagattactttttatacttcctctattatgtaatataatacattgtagcatttaaaaattattctcaaatataatatattttagaggataaaatctagttttatattatcattcatttattaaccaatcaccatcaactatgttgacaatagtatctaaataggaaataaaataagaatatatatgtcttttatgttctcggttaatttgtgagagcccactattttaccgagagagtatgcaaacagtgtttttctgtcacttttttgagccagccgcgcatcggtgcgacggtgccggagatcaacaaccggcccttctgttcgaaagatcacgttgttgttctgcaaaaaataatgccggcggcagccaaaatgagctgggttcccctagcacaggagaccagcgcgccagcggaacgcgaaagcccgggcccccaattaggcaatcacaatcccctttcccctcgccgccgcctcgccttccgccttttctcgagctcttccacccgccgattcactcagctctagcgatcgcgcctccaacctcccctaatcccctcgcgcccagggaggaggccgggtcgcggcgagcgacgattccctccgattcctcgcctcccagaagttccgaaccgctcatgatggctatgcagcagcagcagcagcagcacgcggggtcggcgtccgggtcggcgtccgggtcggcgtcgagctccagctcggggctgcaccttctcgcctcgccctcgtccttcggggacaccacccacaccaaggttttcgtgggcgggctcgcctgggagaccaacagcgacaggctccggcgcttctacgagcgcttcggggacattctcgaggccgtcgtcatcaccgaccgccactctggccgctccaagggatacggattcgtcggtgcctctcgattcctctccgttttcgctgttaatttttgcttctgtgtatgcggggatcccgtgtatgtgtgcacgcgcgctagatggactgtgaggaactgtgttgatttttgctctccctccttccacaggtgacattccgtgaagccgattccgcgaggaaggcctgcgaggaccccacgccggtgatcgacggcaggcgggccaattgtaacctggcttcgttgggtcgagcccagcatcccgtgcctcctggtaatggtaaaatatccttatactttctaccgatttgcagtgtacttgtttcttgtaatcacatttcgaaatactatgtcaaaagtatttaatgccgagttaaagataaagttcaatacactggattattggtgtaaacatgtggcttccgaactgagttaattaactgcatcatggtgcagttacatactgtggagtgtggaattgtattgtccattaatcacatcaattataagaagataactagcgaagctttcttaccttggttacttttttgaatcaactggcagcagcttttcctttcaatcaagaagaatgagttcctaccttattattgataatcaaagtgttgttttcttaccttggttatcatcaccatattattgatcaaacagaaaacactactgagcaagcatttatgttaacagaagtgcctatatgttaattgtgattgatacccgtggactgtgctgttcatgtatttacttactgctattactactactagctacaacgtgccttttctcttagttatatgatgagcttaattatttcgttctggttgtataagcactcactcttctggaaattaccatgtttatatgtgtttcaacattggcaataacagtatgcatttttagggcggccaagatcagctgggtcctactttggtgtcccagttccaagggccttttatttagggggttatggccaccgaccgtttccacttgggtactaccaaggatttccagttccccagtacaggtaagagaatttatgtcatcacttgttagttctccaatgttacattctttgtaacaaaatgttaaaatggactgcacttacttttggagagtatatccgataataaagtttttactactgaaactagcttgtgcatatggtatctcccctttcaaatgatgaaataatctgatccaaccatgctcatggaacacgatatgactgtttgaaagccaatagaaatgcattcagttattcgttttcttccttttgcagttacccttcatatggaaccgaatacatctatccacaggttgaagtgttaaaagctatcagcttttatattcttgtgctgcataagacatttacataaacctttgcctattctgacagatgttctctttgtagggtacattaaacccatattctggtcagcaatatcttcctatttatggagtctcagctgcagcaaacactggcaaccaaacatttagccagttgagtccatccatttctggtgggggcaatggttatttgtcggttcatagttacaacatgcctggaaatcaatatgtgcagctcactggatcaaacttcagcagtgcatcaccaacagctcgaccttccattcagactccttttctagtaggtaatgtgttattcataccgtgctgcaatatagtaggatctgtgtcttaagaaactatgatatgcttggccccttttagaaatctggaaattatttaaggtccatgttatatttgtgcatccttaatagtttttagtttgtgttcaatgtcacatgctcattctgtccatcatgtttcttcttagcttgagtacatttgtgttcagaccaggactatagctgtgtttgtctaaattcgtatcattttatgatgagttattttcgtttataaatatttactttatggccttgtttggatccatgggttagagttagatttagctatttggggctcaaatagccctaaaatatccaaacacgagggttagattggggttatttgcatataacccacccaaaaagctatccccccaaagaggtgcttatttgggctatttggggctatttgaggcgggcccatagggaaagggatcggctatgtcgcatgggatccccactcgcaatgcctcccagccacgaccccttccggttactagcaccgccgcctcccagctcgcctcgccgccgcctctcaaccgtgccgccacctccaagccacgtcgccgcctcccaacagtggcaaaacagcctgcaaggtaccatatggagcgatggcaaaatggcccaccgccagcaatggaaaaacggcacacaaggtaccatgtggagcaatatcatttgtgagtgggaggaggccacacaacagccggccacaccaaatctggctgggaaggagccaaatgaatgggaaagtacatttattgtcaatctaacccttgcatccaaacatctctttggctagagttagttgagggctagtcatgagctagagaataactctaacctctaacttagttagagtatccaaacagagcctatgtttgttcacaagttcttggtctactaacgatacatgacaaacaagatctttatttcttttattaacaattttcaagctaaattcataaggtccagaaagattgaaagcatagaaacatgcttggcataggcagatcattgtggtttcttttgcattcctaggccgatataatttgttctcaaccatgtgacaccggcctcttaaaaatgcccccttgtacttaagattacctgaacctataacctatataggtagtgtttgtttatttgagttgaataagttgcacgagtcgagctacatacactcagtagccaaggcaacaaataaactgtagacgtttctttatgttttctaggtttgaggttcctattttctccatttgtgaataaccctgcattaattggcttttgcagcaacaccggttcccgcacatccacacctaataattccagccccctcaccccagtttacacaagctagtggttcagaccaaagagcaagctgaactgtgcatccaagcatttgtaccttgaggtttgctttgtttgcactgttatcatctgtttcctttctaacaattaggtaacaactgactttagtgttttggttcatggcaggtacccttagattgcagcaggactaaaaagagcagtgttgctgtattcacagcatttgttcttgcctggcaagaaatcatccttgcattcataaggtacgaaccttgtcttatctggttttctgtccttaactatacctagtttcattcatagatgttatttgcatgtcgttctttgtatgctcactgctgtactccataatctgctaaatcccgagctaagtattgcttaaaagaaaagaaagggagataagttcttattagcatgaaaagttctttcgaaagcaagagaaaaggacatgaaatcaagatgctcttacaagcaagaaaatcaggatgtgggatgcttatccaaaatcgttctgaaataaaaccaaaagtgcattctttgtatcta

SEQ ID NO: 3707 - DNA, 3681 bp, Sorghum bicolor
tcgggctgccgcctgcctttgcctggggctggtggttgggcggaaaccgcgaaggggggcagggcaacggcaaaccggcggagcgggcggcgaaaccgtgggtctcgctcgtcggctcgtggtccggggcgcctgggcccgagggatgcaacgcgtcacgcgtgggtttggcggcatggtccgtacctgggtggttgtggtggtggtgggccgggcgagggagtcgtcgcaaccggcggtctcgtggcccaccagcgcggctctccatcgcgattccctgagacgtgtgttcatcggtgctcgtgcaccgccgtgggttccatggtcagttggtcacgtactccggtacttacgttgcgacatgcaccttatccaaaaatgctgctgagattcgtcgattatatttctcactgacaaattctcgccctacataactcctgctgaattcttcgtaaagtcaatgcatgtccaagggtgcctaacgcacgactgcaaacttcttcatcagtaattaaaaacttaaaagttttattatcgaaagggaagcccgagcagttcaaagtatcttctagtagccccgtcctcacaaacacaacgtcagccaacaaccaagcatcccagaaaaaataaaacgtgcacgagaattctcatgccgatggcgactttgccacttcgccagtgctgagtagatactacacgatgtacacacgccggtgcaggtgggcaccgagggagaccgggagacccgcgagcagggcagcaggccagcagcgtcttgggccttggaaagaaagaaagaaagggtgaaggaatcagttcaggaatggacgcagtcaggcaggagacgccccccattgccccgagaacgaaagggcaggtccctatcggcggcacaccggcacggctagtagcgacgccgcgcggccgcgggcgcccacccccaccgcagcgccaagagccagacgcatccggggggcggacgtcccaccggcacggcacctggcacgcgctgacctggcccaatcgcgcccgcctcgtcccgtccccaccccacagggcccgcgtcacagaggataaagaccgcgatgccgccgcatatccgccacgcagcgcaagcagtactactactaccaaacccgcaaccgcaacagcccccttccccgagtgggcgatcgagtggcatatcctgccgcgctggcactgagtgctcaccttgtcccctcccggggccatctaatccatccgtgagaccgtgaccgtgaccaccttggactttttttcagtcgcctccgtcgagtctcggcatacggacgtgtcgatgatcagtctatagttgcctagtcattccctgatttttgatcgagaacttgcccccatctacacgtacgatcttctccagaggagaaaataattcggggggccttcgtttattccccggaaggactgcgaatatgctgcgtcttgatccttttgaacgccaaagggtcgcttctaaacactgtacaaaatgctaagggtagtgcggcacatacttaaatagtagtacaaacctcgctattttatcgtcaccttgacgctaaaatatgtagacggcgttatgttctacaatcacgtgcctagaacttcacaaagcggctactcaaaatctttgtaccagaaacatgtagtagcacaaaagaaaaaaaaagaaaaatgcattgcacacggtaaaaagtaaaataagaatttagacgttgtaacgtgccagctattgggtccctggaatggctaaccaatcccagcgcggcatgacagaattagccagaaggttctctatctttaacgccatcaggagaagcatattccagggctcaccgctcgggggctcgctaatccgttttcccaaacgcctaatgccgcggttaatcctgggaataaaccctcctcccgttgggcgcccgtcgccgagccaaccaccacaaccaccctataaaacccgggcgcccgcctcgccccttcctccccctcaccgtcgcagcagcagcagctcacgccaccacggcaacaacgcctcgccggcgacatggccgtgtacatccgactcgatgacgccgtccgcgcgcgcctccgcggggacgccgcggggtgcaccatcaccagcagcggcagcgaccacgacgcgtccgcctgcctctccgagctcgtccaggcgttcctcgagacgggcgccggcgcggccgaggaaggcgtgcccggcccggcgcccaaggagtacgacgaatctggcgaggaagacgcgcccgggcgggcggccgccgccgcggcgtccgtgagggcactgctcgacccacccgcggaggaggacgtgttccggatcaggctggccgccgcggtggcgacggccatggaggtggaggccgcgctgcgggcgcacggcgcgtcgttccggcgcgcggtggttcggcggctgcgtggcgcagggtacgacgctggcgtgtgcaagtcgcggtgggaggcgtccggcggcatcactgccgggacgtacgagtacgtcgacgtggtcgcgccgctggcggcggacgggcggaagcgggccaggtacattgtggacgccgacttccgtgcggggctggaggtggcccgcgccacgcccgagtatgcggccgtcgtcgccgaggtgccggcgtcggcggtggtcgcaagggaggagtccgtcggccgcgccgtgcgcgtcgcgtccgacgccgcgcgccgctcgctccgcgcccacggcctccacgtcccgccctggcgcaagacgcggtacatgctcgccaagtggctcggcccctacaagcgctccaccgccacctcgctgccggcggcgaacgccggagcaatgccgatgaccggcggggccgggatggacatcaagtgccgcgccgtcgggttctttgcgcctccggccaccgcgccggcggccaggatcaagtagccttgctttgctcccgggcggcggtctacaaggagatcgatcactggaatgaaaaggaaaaagtttcttttagtgtagagaggtttctgctgcgatcgagagtttgattttgactttgagttgctctcgaacttgttttgtacagagaattttgttcgagattatcaagagcaaattgttcttgcacatcattttgcttctttgtttcttttttttatatacatatacataaaaaaggaggtgtcaggagcaatcgtttagtactcgaggctgatcttcccttcctcagaaaacaccacagagatgaaaaagatcgggaaaaagaaatgcagaaataatgatgtacgcggcgggcaggtgttgtgctattgggattagcatgggtaacacataacaaacatgatcacattgtttataggagaccctagttggcatcgtgcttgtcggcgagagttttttatatttcagcaaagcagagctctgctcgctgtgtgatctgcgtttgatactgtattttcccctttgaaaaccattctgaaaaccagcagagcatcgtgataagcaagcacatggcagccgttctacagaagtcaccggattttgttctgtgagcgaccaaatcctcctagtactagcagtcattagtctagcaccagtagctgctaacaaaaaatttgcttatactgtatgcttgaacctgaaaccctgtaagcactgcacttcggtta

SEQ ID NO: 3708 - DNA, 4471 bp, Arabidopsis thaliana
caagtcacctgaaatcgcaactcttgccacagtatcttcatttcctcggtacttttactatcttttacatttcatcttctatctgtgtgtttatacaacttattatgaaattgattgattggaaagattgtcctttgatgacttacaccgaactcattttggtttttgttatgttttaaattgggtaacccaactcaactcaacttataatcaaatgagtttatggttaaatgagttatgagttgacccaactcattttgttaaatgggttgggtaaccccataactcatttaatttgatgggttgagttgttaaatgaattaactcatttaagtaataatttaattaattattattataaaataataataaataattatcattattaataattattaattcattatcatcaaacataggatatttacggattccactttttacgggtttacgtattcaacgagaaaattacgggtttacgtttttggcgggaaaatcacaagtttacgttttcggcgggaaaatcacgggtttacgtttttggcgggaaaatcacgggttttcgtttttggcgggaaaattacaactttacgttttcgacgggaaaatcaagtgttttcgtttttgacgggaaaatcacgggtttacgtattttggcgggaaaatcacgggttttcgtttttggcggaaaaatcacgggtttacgtttttggcggaaaaatcacgagtttatattttttgttgggaaaatcttgagttttcgtttttggctggaaaaatcacgggtttacgttttttgcgggaaaatcacgagtttactttttctcaatttcatcgcttgtatatttaagaaatttggaaaaatattaattttgttaaattggtttagatgtgttggttaaacttaaattggtatttgtttagagattttggttggtttgattcaattttacaaaacttgatggtttaattgggtaaaccattgaaatcattaaccattacaatccaactcattttactcatcaaaccaattgacccaataactcgtttgacccatcaactcatttgagtcaaaattttcaacttattaagattcataggttgagttgagttgaattgatccatgaattttgaccaattttaatacccctagttttaatgttgatcttgcaggaggactagtggacctatgagaagatgatcttggaggaggactcgtggacctatgagacgagcaaaaggtagttggactccagaggaggttagtggttgcttttgtttcgttattttgaaatcaaatatacataatgcatacacaattttacattgatgagtatttttatttgaagattcaggagataaaataaaagataaaaaaattgataaagagtaatcagaaaaaaatcacaaataacatccatattaaaaaagcacaaataacgtgtgagatagtcagaacctcagaggatatacaaaaattaattgagaaaactagaagggtccaattgctaattaattgtcaaacaataattcatattctcatcgtttcagtgtttcgaaacaataattgactattattgacgattattctatagcaaaaaaataggaaatggggacgtgctatgcacagacttttaaaacttcagtttaaaaaagtacattttagatgatggaacaatttttacttttttgtcaaccgaattgttaaagtgataacgattaaaaatgtaaaccattaaaatcaagtgttaataagtaataacaaagactagtctcactgagattcaaaaacaaaaaaatgaaagacttttctataacaaagaatataaaaagattaacaaacgaaataataattgaaaaaatattaaacatatcgatcaaaattagctgtgtatcttacgtgtctttaatattattgtatataaatggaagggtgagaaggagacgagaaatatcacaactacccaaaatcatctttgtaggctagctagcaagcagccatgaattcaaattcagtcggtgtatttcgtgagaaggaaatcgatgggaaaccattccacacatacactttatcatctcaaacagacaccacaaccccttcttcttccggtgaaacagccattgatggcgacgaccatctctctcttcaacaacctcttttcctctgtccttctttacgtcttaaagctgacgagataaactattcttatagtgaaattctaccgttcaatatttccccgtacttccccagcataagaggcgctgatcaacaagtccagcatttgcttgattccgacagccaacaagtccatgatttgcttcattccgacaacagccatgatgatgatggtgatgaaatctgtaagctcccagttgtccctatctattggtgtaacagtaaagaaattgagttcgatcaattcaattgcggtgcatgtgaacgatcaaagattggcacagactattatatctgtctcacgtgtgatctaatgttccacaaagaatgcgtggagtctccccttgagatcaaacacccttcctatccctttctttcactcaaactttacactcgtcacgagcagctcatgagttgcatgtgctgtaaacacccttccaatcttattttttattattgtcccacctacaaattgagtttgcatcccgattgtgcgatgaagccaatatccatttttatagaccacccaaaaaggcatccccaccttctcaccttttttcccaaacaagcttccttactttgcgatgtttgtagcctcattaaagaagctttccccacctatgtgtgtcttcgatgtatctttgtagcccatcgagattgtatctatttcccgtatgtcattaaaatatgtcgtcaccaacaccgtatctcttttacctcttctcttccatctggaaaatggtcttgtggagtatgtcgtaaaaaggttgacaacaattgtggtgcatacacttgcaacaagtgtagccactattttgttcatacaagatgtgcgttacgggaagacttgtgggatggaaaggatctcgagggagtacctgaagaacctgaaataattctcgagccatttgagacgatagctgatggaataatactccatttttctcatggccatcatctgaaactcaagaccagtggagtttacaacgaaaacattatttgtcaagcgtgcatccttccaatctatgagggtaattattactcgtgtatggatcaatgcaacttcatcctccacgaagcatgtgcaaatgcttctcgcaagaaagatcatgccttacacagtcacccacttacgctaaaagttgtctctgatatacagaatgaatactttaaaggttacttcaggtgttccgcttgtgatcgtgaaagttgtggcttcatctatgaggaggatcaatacagcatagacatacggtgtgcctctgtttctgaaccatttgattatcaaggccatgagcatcccttattccaagctttagaccgaaaagaagaaagggaggcaatttgtcaaatttgccgaaaaaagtatggtcgaaaactaaattgcatcgaatgcaattatattatatgtttcagttgtgctactttaccatacaaggcaaagtataagcttgacaaacatttcctcacatttcgggaaggggaagagggaagtgatcagttagactggtgtgaggtatgcgaaaagaaattagaatactcaagagaaggtgggttctatgcgtgtgatgactgctgcaccactctccatgttgattgtttgcttggaaaagagatgtatatgttgaatcctggtcatactgtaatggcttataggtcaaacatttatattcttcccaacaataccatgactcgaccattctgccaacttcataaagaagatcgttgtccacacaaagtaattttcaattggcatgacatgacattttgctcttacagttgttcgatggattagatgtcatcatcgccggtgcttcgtcgtcccttattcgctatatttcactccccatttgcttgtctacgttttgtaatatgtttcttctattaaaacgtattgtaatacttttggattcttaacttcttctagttccccatttgctcaatcttcttgttgtctggttgtttacgtttttgtgtaatcttttcttttactaaaacgaattgtaattttctatatcttcttcttacccaaaaacctcgactgattaattatatctcggcctttgggctttaaattatgggccaattcggactgttctcgcttaagaaactacagtaaaaaaaaaaaccagaatgagttatcttaatgatccgacggtccataatcattgaggacctctgatttgccgacgtgtacaatggtcaacgcatcagctaaagagtgccgtttgaggttgaaacttttatttccaacgtcaacctttcttctacttttaacgtccgttaagtccccct

SEQ ID NO: 3709 - DNA, 8898 bp, Sorghum bicolor
atcaactatttagagtttgaagatctttttatgtttcaaagttgtattaagtttttactagaatttgtagtaaatacaaacattattaatcacaaccattaggccttttggacaaatactttttagtatgcaagatttactaaaaagacaataggagcatatgttcccacccaacactaggccaactttgtttcactttgaaatattcccaaaactagctacgcctttttttcctaactctgcaattgcagaataaacttcttcattccacagggtttagggtagaggcgctacatcaaagcttctgttgcatggcgtacgtgacatatttaagcttctgttgataaaaaagaggcagtagtgtttttctctcacaacaaatcagccaacagtacgttttgccgtggcttatcagccaaacgaacaaggtaggctgagataattgtgcgatgacatggagaagcttactaagagcatctctaatagtttgatagaccactgtagacctatccctaatcttatttttggtatgatgagaaaaaacctcactccaatagtttcttatcttaacgctcaatttatctaggtttaggaaaaaatagaggcatccactgaaagatacgtgaacgagatacatatatgcattttttaatggcctccgcagccaggaggtttactagaattggatcttgagctactatttttagacctaagaatactacgagatagagcaggtaatatatatatatatatatatatatatatatatatatatatattatattttggaggttataggtgtgagtcatggcagtgagatagtgagccatgtatggactgctgctgcgaggtttatggtggacctccctactagaaggtagaggagacaatagatttcattttgaaggttttcagtgtaagtgggtgacacaatggccggatacgacaatgagttatttcatcaatagttgacggttcaatatgcgggagacaatggtgtctatgtttttaaagaatacaagttatttcgcccataattagcactcattatggtcttgtttggctctcgtcgaagcacaccacaaagtagctctggtgcctccaaatgtgcgcaggaaacaagctgcaaacttttggcaaaattgacctagaattagataggaacgaggccacacttttggcgtgcccaacacgcgacaacaaccaaacacaaatacaatgagccgcaattcagatatagtgtgctgtggctatgagccaaacaggtccatatatgtacgtgaaacgatgacatgtatgttttcagaaacaaataaaaaaaactgttagtggagtgtattttttttccgtatccaataattttttcataaaatctgtaaaccttaaatttttgaactcaattgtttagataccatttgagttgctctagggagctacttgccgatcctcatggagtatgtaaatcagtaagcttcacgtagctaacagcctaacaatgacaaagctgttgatgtcccatttttccaagcgatggaaagatacacagagagaacaaaaaagagttgtgtatgagcttgcaacaatcattaaccagcgagtcaagtcattgagttgtgtctttatctatctattcctagctttaccatgacaaaaaaaaggaggcaaaaaccaaaatatttcaatacatacaaattcctgccctagttgatacgccatctaagttttattatccatttgtgacaagcacatgacacactttcatattcttttgtttttttttattaaattaaaaaaaaagaaataaaaaaagagataaaggaagacgaagtggaggatcgacacacgtggcaaacggtttaccaaccggcacgcgtgccatccttgacagtggcgtcttttgttcaaataaaattgaattcaaattcaaaatgtctcgagaacgaggaccaccaccaactctcgagatcctattatccctacccgtccccgaaagaaaagggtatagagcgccaggcaggcaggcagtcaggcagtcaaaccctcctcctcctccgctccgtcctggcgtcctccctccccgctcacgcaaaacgcaaaccaccccgcccgccccccgccaccgtcggcagcaacaactactttcctttcgtcctcgtccgtcgcgccccccacccgctcctccactcaccacaccggacggatccggatgtcgtctccgcccgcgcatccattccacacccgcaattccgcagcaaacgctagcagcagcggcggcggcggcagcggttggtagccgcgcgatcgagacggcgggtgacctgccccgtcgcggtcgcggtcgcggggtatatattaccaccaccaagattccaggtgctcgttcttgatttgatttgaacccaggtcggagtaggagtaggagcagatcgaattagcagctagcacggacgctctcccttcaccttctttattatgtccgtctccctctctctgcctcttagcttgtttcgcgcattctggtaggagacgaggaggcgccgatccgtagcggcgccgagggcgacatcgaggagccgctggtctcacgccgcaccgtgagttgttcattcctttttcttttctttcctccggttctgcgaaagctgtacatcagttttcccccctttcttgcgaaaattatctgaagacattgttctctatatgtaaataattctagttccggccttggaaagattctaattcctccctgctatcttctaattcctccctgctatcttctaagtatttgatagatagactagtggtactctctcggactcccatcatgagtccttgggtgacgctagtttagtttagggacagcacatgactcttttcagattattattagggtgattctgactgtaactttaactcggctcagcttttcttgctattttaacaaattactactacaaagaaggttttcatcttttcctgatatattatttgctagtggatgtggtggatgtggatgtgcttttcaagtggatggcgtgggtccttcagctcattttctaagttttgtctgggggtgaaataaacaatacagatacgattagataattcagcccacctgtactgtaatttgactttgatgtcaccagtcacattcctaggttgcataataattgccagaaaacaacaggaccaaatactgttagtcgaagccaataaattttaattgaacccttccacccactcgaggaaatttgagggaacctttcgcccacgggaaagggaattcgaggtaatatgattcctactatcctaagacagaaaaattgggtataatccgcatactcgtagtctaggcataccttgttttggtgacaactgatagccagcgtcagccaatcttcaagttctcagtagcgttgtgcgttgatttaagtgttgtcaaaccattgggctgtgttagttgtcgggcaccactttactcgttagcctagttgacttaatcgatcaggtgagaagcactggatgcagtttttaatgatctgtagtttaaccagttgatgtgaggtttgcccacttgggtttggaacttgtatgattggagtaaacatacatatcttttgttttggtgtcaataggctggtgtcagcgaatacccaactaacaatctctactgccaattggcatgaatttctgtttgccgaaccattaagctgtcttaactgtccaatatcaaattagtagaagtttaatcttgtttacttagtggatccagtgagctatactattttttcaaggatctgtacttgagtttgttgtgccagatctttgtctgttggttgttttgaagtttcataaacttctgttcacccacctgccctgtctttccaagttaggaggtatgagaaaatcaatgatttcatgatagttagctaacttaactttgctggtttgctgttcatctatgtcaagtgagatttcctagctgtttctgttcagttgaccttttagtaattcaacctttgcagtttcttacggactagattttctgtggttcttttttctgccttctttggcttgcctctggcaaataagttacacatgcttcttttttgagtttctagcgacatcatgcttctggtgtcgttcttgcttttttagtcttagtttcttttaactgaatcatttatgtgaagttatttgaataattttttctgagcctgagaacttcgttaatgatatttatgatctcatgtggttcttatcaattaaggaaatgacgggctctggatatctgtgtggaactacttattagatatatctgtatttgcacatgtatcagttgattacaatcttgcttttgtggtccctcatgagtttgtgtgaaattgaaaaattgtctctgttgtctgcttggtgatcttgaacccttattcttggacagtagaccagaatgatcacaccattttaatttcataattttaatttattagattgcctgcattctgttacactcgtctgctattttgttcacttctctcaaaaatacatgagattgtcagtttttaccaatatcccataagttgaacttgaacgattatcagaaactgttaaatgtcatggttacttgaatatttctgaacatattaccttttcctactacggaaaatacaatttgatactgtcaacctgctccgtttagtgtagttgcaactaatattcaactagccttgttttaccggactgatgtttgaagttgatactgtcttctagtggtaggacttacttacttttcaaataagattgatcctctttcagctgttgaatttggctcttgtgtatcatgacatgttcgtatgtcagttgttcttagcatggctgatagtttgtttgtataactccagtattttcctgtgtccctagcacatatttgaagtctctttaaaacatgaagaaagattgtccagttttgtgtttgttttttaccaaagcttataccttttattggaactgaagtttcaatatattaattcacatggaaatgccttggtttccaggtctatgcattgatgatatcattaaatatgtcgtgtttctgtaattattctactgccataactcataggagatgctaaattgtcactgttaatttccatgctgatggaacatgagaactacattttcaccctgtatgaaagataatcatgactaataacattggtcttgcagtgctgtgaagcccttgagaattaaattgcaactgttattgtaacttcactccctgttgtttgctctcttacactctttgtttttgtaggagacaatggcagaccagttagggttttacactattagatcccatgggatgatattggcaagattgcacatgtatgactggataatacttctcctccttgctgtcatagacgggctgttgaatttaattgaaccatttcaccgttttgttggaaaagacatgatgactgacttgagatatcctatgaagggcaatacagtgccattttgggctgttccagtatgtcctggtatccttatctttcagtatgttttgatcctgttacatccatgcaaaagtttttgtgtggttcttagctgtttttcttatttgcagctgattggaattatactgccttgggccatctttgttggaatttacttcaaaaagaagaatttttatgatttgcaccatggcatactgggtattttacatatttatgattatgatccgttcgatatgttgattagtacaagagaaacatatctgaaaaattgaaattttgtagggattctatactcagtgctcataactgcagtgattactgatgcgattaaggatggtgttggacggcctcgtccagattttttctggcgctgtttccctgatggaaatgatgtaagataaaaataaaaactaacttatagtcctgtagcaagttcatctgtgttgatatgtatatgcttcaaaatttgcacagaatctgggctaattacattatctttaaggtttatgataacattacaactggtgttatatgcaatggagtgaagagcgtaatcaaggaaggccacaagagcttccccagtggacacagttcatgtaagtaatggcataaccacataagtactcaaatagcctgtaactgcatatgttcccctttgtaatattgatccctttggtgcacttgttgcccaactctatggacaattttacagtgggaaaacctatatgcttttaaaagttaactgccacttgcatattcaataaaattagattggtctactacactttgatgatatgtctaaaataccattgcaaggtcatacttgaggaaatagattctttcagtactggctgtctttttttttgggagaaataaaaatgggtctacctttggggtgtgtggtatgccttgggcatgctagttctaatcatcagagaaagtggatgtctttgtgggtgggtgctaagacctcagttgggcatgatgacaacctgcattgtggacagtttttgtggctttgcatgattctgcattggtgatagggggcaagagagttgcaaacaagtggtgtgcagtcaatgagactgtctgtgctgtctgagaaattaggccacatgagtgaccaagtaattccaaacaatggattctcttgggtctttcctgccatgttctatggaaatattgaatgccacagacgagacctcaaaattgcccatatctcaaatgccttgctgaaatttaagcactgtttggtaaccctgaatttagcctcccatctggaagtatactatctcttaggtactcaaaattctgagccttatctgagatatgatccatgagtcttagaaaaatggaaaaaaagtgattcaaacattttgtgcacatgtttctgagagcaagcaggcatgaaaactgtatgtgagttaccttggggcaagctgcatgcgatacaccatagagtagtggagtgagtgaatttaggttgtaaagtatgacctatgtgcatgatgagcagatctaacggttactctcttttcacttaattacttgaactaccgtaacattctgtagaagattaggattggggcaattggccacacctcaattggagggggcgccttctattatatagggccgactggcctttacaaggcaagggtgattctcttgatttacatctcctaattatagtaactaaatcagtgatttacatctgctaattatagtaaataaatcagctatccctgattgatttacatctgctaattatggcaatgatatgccgcagcatatggtaaggggctgcggcatatttgcctaacacattcccaatactcagtgtaaattattactgaagcataagtccttttttttatgtgctgaagttaagtttcaacttggcacctcatgatatttttttacagtgtgatggcatctaaaatttgttgtgtggcctattacactacttcagggtcttttgctggtttaggcttccttgcatggtacttagctgggaaaatcgcagcttttgatcgcaaaggacatgttgcgaagctatgcattgtgtttctgcctctccttactgctgcacttgtggctgtttctcgagtggatgactactggcatcattggcaagatgtatttgcaggggctcttataggtttgtaaattttgatatatcttttttaaatagatcaagattttctagatgtcctgaaaatacataatggatcatctttctcgccatggccacttgcctttgcaggtcttacagttgcttcattttgctatctgcaatttttcccgtatccttttgatggcgatggtacctactattcactgttttaccaactattgagttttcaggttttgttcaacatgtcacagaatattgtacatctcctttgcagcttggtggcctcatgcatacacggtccaggtagcggaggaacggaacagcagacatgcaaactcgtacagtgtgagaccaaccgagatcgaaacagtcaatattccaggccacggtgggatgaccctaagagatactctaaacgatgtggagtctggcagtggcaggagattgtgagatgataccgttggagctgcttgcatatgtatacaggtagatgtatttgtagagctgttgactgctgctgccaccgtgggttgcttagacgggcttggcagtaaattacttggtaggtgttgtttcttctgacaatctttgggtttcctttgtgtatacttgttgagtcaagagttgtggttaaagtttgttggcgtacactctttgtagtcagcttggtcagcaactatgatgatcttatcagatgtgcagggtaaatgggtttctcagtcgattgtggattgttgctcttatactaaagcgtgaaattcaggtgccaccatagtcagcttttataataaggcgagattcatttgccaccataatttgctattaggtccctcgtgtcaaggaaaatgaatgacctgcccacctgtcctgcaatgtgacaagtaggttgattgcattggacaagccactttttcttttctctctagactccatgatgtcgtacctgcactttgaaccaccatttttctgctgtactcctttttgttttccctgctggccagaataggttattcgccgaatgtggtcttccataagttcgtatttgagacttgcacaatttgaattacccacaaatattttgatactgggcaaggatgtcctgatgtaaagtttgaggcctcctacgcaaagtgagtgacagtagcggtagtatgcaatagcaaatgttcatgtgttcctacggaaaatgggtggcattacgttccctccagagtcgcatctgccctagcacttcccatacgc

SEQ ID NO: 3710 - DNA, 4932 bp, Sorghum bicolor
ttctcaagttattacatgatttatcaagatgttaggacacaagttattacaagactcaagatgttataagacatactcctatgtttatattattactcctataatcttgtgttctaaagagatccatagaacggggtttatgtttaagctttgttcgtttgagcttatcagccaaatctaccagtcattcaacggtgtttttctcttacaataaatcacccgacagccatgacttaccactcaaacaaagcaatggacagggatgcggcacgggcgaatagggaaggtatagtaatgctatgaataacccagtatcgaatactggtaataatatcaacaaaagaacgttctcctgtgcttccagacatgccgagctcccaaaatttttattcaaaaaagaaattgatttcataaaagatgagatccactagtaagggcttgtttagattcaaaaactttttggattttgacactgtaacactttcgtttttatttgacaaacattgtccaatcatggagtaactagggttaaaagattcgtctcacgatttacagacaaactgtgtaattagtttttatttttatctatatttaatattccatgcatgtgccacaagattcgatgtgatggggaatcttataaaggccttgtttagttcgcaaaaattttcaagattccccgtcacatcgaatctttggtcgcatgcatgaagtattaaatataggcgaaaataaaaattaactacacagtttacctgtaatttgtgagatgaatcttttgagcctagttactccgtaattggacaatgtttgtcaaataaaaacgaaatgctacagtagcaaaaaaacaaaagattttgcaaactaaacaaggccaaagttttgggtttttgggtgcatctaaacaaggcctaaatagaaagttactgatatttcatccttgtgagattgttaattttgtaccaaaggtgtattttaagtataccgaattagagcaactccaagagaagaactattcatgttatgtattctatatttggctattttggtagagaaaagagagtccaacagctattgtatttggtttgctaaaatagcaagtcatctatcccggagttctcgcatggtaaatatagcttgcatgtcccgctagccatatgatttgccgtatagaaagactgttggagatttttgtttttttcataattttttattttagaagttggctaaatcttaaatttagccatctatttttataaactctcttggagttgctcttaggccttgtttagttcccaaaatttttcaagatttcccgtcacatcgaatcttacggcacatgcatgaagcattaaatatagacgaaaacaaaaaataattacgcagtttacctgtaaatcgcgagacgaatcttttgatcctagttagtctatgattagataatatttaccacaaacaaacaaaaatgctacagtagcgaaatccaaaatttttcccaaactaaacaaggccttagtatagctatccttcttatggcacagcaatccatttttgctgggtgccgaaacagaaatccttttttctcgtggtcatcggctggtcggcagcagcacgagacgcggcggaggccagccagccagcgcacgcctgattccgttccggcaggggcttttcccaaagaaatcccgatcgatggttgcgtgccaccaacgctgaccccacggcggcggcgcacgtgcacatcccagccgtccacgcgggaatatccggcgcagataccctgatcagacggcccagcctcgcccgacccgtccccacgggaaatggaaaaagggactcctcctcccgaattaccccggaggaaagggactcttttcccaaaaagcggccagaatgccagatcgagcatctgggccgtcggggccgcggatcggacggctgacaccgcggcccggatgtttctccgggaccataaatgcgccgcggccgcctccgcccgcaaaccctcgcaacgctgccgcgcctccgagagcctcatctcctccacccacttgcgagcgagctagggttccgagagccgccggcgccatgttggtctaccaggatctgctctctggtaagtgttcgtgtgaatttcacccgatttgtttttttttctctctctttgtctggtttcgcttggctctggctcccgattggcaactgggtggcggatctcgttcgccgtcggggtctagtcgtggccgatctagatcggtttatttgccttggctttttttatttttgggtctgctgctgagtttgagttgctgtgtctaatgtcttgcaggcgacgagctcctctccgactccttccagtataaggagatctttgacggcgtcctctgggaggtcgagggcaaggtatgattcgtttatccaaacgccgtgcacttgttagagaattggttgatgaattctagtatttgattccttcatccgaaccgaacgtgtgtgcttattagagaatttatgtattctagcctgtgtactgtgtgcttagtatgggagtaggcggccatccatcagtcttgatgtactgtgtgtttagggggagtcctccatgcatctggatgtactgcttgtgctgccctcagttgtaatttatagtgattttgtggttttcttgtaggagcaaattatgtggcacaccatctagtttattcctggtgttattttctgcttttcttgcatgaccaaattatgtggcacgtcatgtagtttgttcctggttcagattgatgtgtgctactgttaggatttttttgtgtgtttctttactgtgtaactggcagtcagctgccaacacttaatttttcatgtgcgcacctgccttgagtttgagtattctgtatgtttggtaacaccgacaattatcagtttgcacatgaacctgtcttagtaaagtatagacatatatgactcatgatatgtgctgctctaatactctgttttgcttagttcattacgttgttgagctggtttggtttttttttttttttttatttacatggcgctcgatgcttgcagtgggtcgtcaaaggagctgtcgatgtggatattggtgccaatccatctgccgagggtggtgaagatgagggtgttgatgaccagactgaaagggttgttgacattgttgacaccttccgcctccaggttgctgccctctaaatgtggcaggagttgttttttcttcagtctactctgtgcatagttttttttgtactaatctgtgtattcctgtttgcaggagcaacccacatttgacaagaaaacatttgtgactaacattaagcgctacatcaagaacctcactggcaagctggagccagagaaggcagatgaattcaagaagggcattgagggtgccaccaagttccttcttagcaagctcaaagatcttcagttgtaagttatatactaaaaaatctatagataatgcatgtcataatctgttgaaaatacatttcatctattgttggtttatttatgttagtaaaatactatgtgaactaccatcctatcttttctgctagtcaatttagatgaaaaaactgtgttgtcttgttcatttcctttttgttaataaattcatatgttgtttgtcttggtcattgaatgttcacatggacaaatgtgtctgtcgttgtgattatttatttgccatgcataattgtttcgtgcatctgttatagttttatttatatttatgttactgtggtgtgctgtttcaatacctattttacacgcacaatgtaatggtttatgtgctgtttcaatacctattttacacgcacaatgtaatggtttatgtgctgtttcaatacctattttacatgcacaatgtaatggtttattgaaatctgcaccttaattttgctgtggtcttaaattcatgttgctttgcataattctgtgaacattttttttggctttcaccctgatttttatacaactttgtctaatgtgatacttttctgtgtaatagctttgttggtgagagtatgcatgatgatggaagcctagtgttcgcttactacaaggaaggtgccactgacccgacattcctctattttgctcatggtctgaaggagattaagtgctaggcgggcatgccctctttacctcatgttgcttgttatcatctttacctcatgtcgatggttatcatctatataatactatcctatttttgttctagtatggattatgtcatggatggttatggaaaaactgttttggaaaaaaactgttggaagaatggattcggattatgacgtgaaatgttttggaaaaactgagaagattggattggagttttccaatatctatgttgctgtatgcgtccaattcgctactgttactattatatctgtgaattcgctactattatgtggacgctatttgcattgtatctgtgtggtggctatgttgtgtgctttttgcatcttgtgcggggcgagctatttgcatctatttggggtgctaatatcctaagcctatggaatttcgtgttttcgttagaaatgttttggcaggcatgtcttcaaccaatgttttagagcagttgtgcagtggacattggcgtccttaaggagcgtttgataattgctagcaaacgccaaggtgaaacgtttcactcaagaatttcaaacggattcactaaagaattacaaaccggtctggtgagaaatatttcacttttcactagagaattacaaacggttttggtgagaaatatttgactggagggtctggtgagaaattttcacttttcacttgatacttacaaacggttctggtgagaaatatttcacttgtcaacttgagggcgtgtttggttgattgccaaaggttgacacgccacagccgtggcggctcgccataacaatc

SEQ ID NO: 3711 - DNA, 8409 bp, Sorghum bicolor
ttatgctaattttttttggccagcgttacatatcaatatagtatcatgtttggtatcaactccaccttcaaattaatgaactccatatttgaggaggttgtcgtaggatcaatcatcaatagtctaccctttacacacacgagaggcccttttttgtgataaaatattctctctgccctcttggatgctagtacgaatgcatggcgatccgagcatcagcatcacaagcatggatcatcatgtgccattttctacatgggaatgcgtggcatgcagcacgatggatgggtgcatctttggccttgtttagcccttgtttacttcccagaaaattttgcaaaatttttcacattctccgtcacatcgaatctttagacgcatgcatggagtattaaatatagacgaaaataaaaactaattgcacagtttggtcgaaattgacaagacaaatcttttgagcctagttagtccatgattggacaatatttatcaaatacaaacgaaaatgctacagtgtccatttttcggaactaaacacggccttagttccaaaaaaatttgcaaaatttttcagattctccgtcacatcgaatctttagacacatgcattaagtattaaatatagacaaaaataaaaactaattgcacagtttggtcggaattgacgagacgaatcttttgagcctagttagtacatgattagacaatatttgtcaaatacaaacgaaagagctacagtgtcgattttgcaaaatattttggaactaaacaaggcctttgtacaggtgtacaccaccacacatgcgcacagtactttacctacgctaattataatcaacaaagctggtgctgattgtgtggttagctgttttgcatccagcaacacacttctcttccagaaaaaataataatgtacatatactatgcttttatattatgtataaattaacagcggagtacggttatattatcttattagtgtacggacttgagttatagtacatgtactctttccattctaaattgcttttattccaaattgtaagttattttgattttttttgaggtacatagcttttatcatgtacctagatctagatatacattgtgtctaaggtacatagtagaaatgtgggcttaggccttgtttagttcctcccaaaagccaaaacttttttaagatctacgtcacatcgagtcttacgacacatgcttggaacattaaatatagttaaaaaataactaattacatagtttttctgtaatttgcgagacaaatcttttgagactagttattttataattgaataataataattaccacatacaagcgaaaatgctacagtagccaaccaaaatttcccccaactaaacgaggccttacaaaaataaaatgaatgattttcaataatttggaacatagagtgttagaaaacagctagagtacctttcaggtggctatatgttcacgttgcgtcgccaaatggataccgtacgtaccaataatacatagccatgtataaatataaaactttgcattgtaatcgtacatactgtagtacatatctgtgtgaagccgccgtatagctgtgccaaaaatgacattatattgacctgttcggtgttaccgttagctagagtggatcaagtttggggggtcagctgcatacagctctcttgtactacctctgtaggagtatcaatcaatcaggtgcggtgcggatcgagccagccagccccctatttgcccggggcaccggacggccacagcggacgcaacacggcaggaggccgcacgggatccggacccactcccccctactcctcctgtcttccagccccggtctcccctgcagtccccaccgcctgcgcctgcgaaagatccctcccccccacgctgattcgctcgccgccccgtcccctcccctcccctgcaggagccccgcctcctatatagggggtgtgtgcggccgcggcagcctgcgctcgtggtgtgccgtgtgcgacagtcgccagcctgccctccccgcctgctgccggcccgcgcctgcccgaagccgagcgccgggacgccgaggagaggccagaggagaggccggaacgatggaggacaaggcgtccaacctggacgccgtgctcaaggaggccgtcgatctcgtacgcgccaactctctcatcctcctctctctctccctccacgttttgcttgccttttcctgctctcgcggttgcttcttgggctatcgtgccgtccgtgggtgcccggcgcggcgcggcgccggcgcgctgctgctgctgctgcttccccagttcgtggcgtgcgtgcatccctcgttccgcggagttttcttggtgtgaggcggatgtgtggggttttgccgttttggtgccctgccggctgtcgctggcggtgaactagtaccactccctcttcttccttcccgttcgtgccccccctccccgcctcgatctcgtcggcgggactccctgatcttgtcggcggccgcgctttgcccccctccacccactgggcactgctcgattcggcgctctgattgcgtgatctcgcgctgcggttacgctcgacgcggcccaggttctctcggttcttcttagttcttcccagttgctccactccgctggttacttttgttgttttttttttctccctttcctgccccgttctttctgcttttatttctttttgtgtggttttcaacgcaccaattctttatcttcttgggcggttcttgtctgttgactgatgatccctctgccgccgcgatgctgttcttgcgcccgcgcaggagaacataccgatcgaggaggtgttcgagaacctgcgatgcagcccgcagggtctctccacggagcaggccgagcagcgcctcgccatcttcgggcccaacaagctggaggagaagcaggtaaaaggaatccgcccgcctctcccttggcctttcatgcgtttctgttcctggtggtccgcttacatgatggatgtgcctgcaggagagcaagatcttcaagttcttgggattcatgtggaacccgctgtcctgggtcatggaggcggccgccatcatggccatcgcgctcgcgaacgggggagtaagtactgaaatttcacatcgtgtgggcatggcagaggcgttctggagactggcttcagaggttttgatgtgttttctctgtttttttcttcttttttcagaacaagccgcccgactggcaggacttcgtggggatcattactctgctcatcatcaactccacaatcagcttcattgaggagaacaatgcgggcaatgctgccgccgctctcatggcgcgcctcgcccccaaggccaaggtactgacaggatcttgtttgcagcgttgtgttgtttttctggagggtgtgctgatttctgtttcgccgtgataaaggttctcagaaatggccggtggaccgaggaggaatcggcaatccttgtgccaggggacatcatcagtgtgaagcttggggatatcattccggctgacgctcgtctgcttgaaggggatccactgaaaattgatcaggtaatgcaaactgaagctgctcccctctgtatgtggatttttttgggttgatgttaaactgtgcttctcctgacttttgagttgctcgcagtctgcactcaccggcgagtcccttccggtgaccaaaggccctggtgatggagtgtactctggttccacttgcaaacagggtgagattgaggccgttgtcattgccactggtgtgcacacattctttggcaaggcagcacatcttgtcgattcaacaaaccaagttggtcatttccagaaggcaagcttctaatcctgcttttctgaacttgcttactttcttcatttgcaaatttatgacgtgaccaaggacgtctgttgtttcactatatacaggttctcactgccattgggaacttttgcatctgttcaattgctgtgggaatggtcgtggagcttatcgtcatgtaccctatccaacacaggggttacagaccaggaattgacaacctgttggtgcttctgattggaggaattccaattgccatgcccactgtcctttctgtgactatggcaattggggctcatcgcttggctcaacaggtatgaacttgtcaattgggaaaattttgatctttgtttctcatatatctaatgtaggaattgaatactgaagttgtgcttggtggtttagggagcaattactaagagaatgacagcaattgaagaaatggctggcatggatgttctttgcagtgacaagactgggacattaaccttgaacaagttgactgtggacaagagtcttgtagaggtaggctgttgttactagaagttcaatttcctttctgtttatggatcattgcagcctaacctgatcgttaactggtcaggttttccaaaaaggcattgaccaagatacagtaattctgatggctgccagagcttctcgtacagaaaaccaggatgccatagatgccacaatagttggtatgctggctgatccgaaggaggtacccagattcctcaggagtttgtgatgtgcaggctgcagctaattttacttttactctaactatttctcttttttctgcttgtttgacaaaaggctcgtgctggtgttcgagagattcattttctgccatttaatccaactgacaaaagaactgctttaacctaccttgatggtgagggaagaatgcatcgtgttagcaagggagcaccagagcaggtactgttttcctaagcacatattgggaactctacaattgtgacaatgatttcaattattaatagtggaagttaaacagatccttcatcttgcacacaacaagtcggatattgaaagaagggtcagagctgtgattgacaaatttgctgaacgtggtttgcgagcacttggtgtagcttaccaggtttgtgatccctgacatgcactattgctactctctacaaggtctaggtacttgactgacaaaattcatgtacaggaagtgccagatggtaggaaagagagtcctggaggaccatggcaattcattgggctcttgccacttttcgacccccctcgccatgatagtgcagaaactatcagaagggcactccatcttggtgttaatgtcaagatgattacaggtttgtcatattcgttcctgtccaccttgagtttattcctctaatctgaagtttcatcctctgattccttgttagcttgttgatagcaatatgtttccagatttggctagtgctactgaaccactttactgtaatactgactcggtttttctcccctcaggtgatcagcttgctattgggaaggaaacagcacgtcgtttgggaatgggtactaatatgtacccttcatctgctttactcggacagaataaggatgagtcaattgcttctttaccaattgatgaattgatcgagaaggctgatggctttgctggagtctttccaggtacaaatatgcagattacctgttttttattactcttgtttgataggctcaacagttcttcagcatctatatgcagtacttatgtctaattaatttttttattattgcttgatagaacacaatgtctaattcatttttttattattgcttgatagaacacaagtatgagatcgtgaaacgcttgcaagcaagaaaacatatatgtggtatgactggggatggtgtaaatgatgccccagctttgaagaaggctgatatcggtattgcagtagcagactccaccgacgcagctcgtagtgcttctgacattgtcctaactgaaccaggccttagtgtgattattagtgctgtgctgacgagtcgggcaattttccaaaggatgaagaattacacagtacgtcaattctgcagttcctttttgagtctcttagtgttccattgtgtgcagtttttttcaaagtttattcttgcttgcagatctatgctgtatcaattaccatccgtattgtggtatgtacctgtacttaatttttagaaaataatgcttggttgactaattggacaaatagtttctgacccctagatacttttgttgtaacagcttggttttatgcttcttgctctgatatggaagtttgacttcccaccatttatggtcctgatcattgccatcctcaatgatggtaagcatccttttagttggttaatataattcatgatgagttaaatatgaagttaatctttaatttgttctgtttatatctacactcctttagtcagtgtcagtatcatattaggttacctaacaacttcaacctcttgacatggataggtaccattatgactatctcaaaggacagagtaaaaccatctccacaacctgatagttggaagttagctgagatttttgcaactggagttgtccttggtggttatttggccatgatgactgtcattttcttctgggcagcgtacaagactgacttcttcccggtatggaccagtaatttgttaagcattattgaagtttttgagggaccgttgcagtttgttcatccttatcatggttgtcaatttgcagcgactgttccatgttgaaagccttgagaagactgcccaggatgattttcagaagcttgcgtccgctgtgtaccttcaagttagcacaatcagccaggcccttatctttgtgacacggtctcgcagctggtcatttgtggagcgccctgggttcttgcttgtctttgctttcttggtggcgcagctggtgagtcatctgaatccagtttcatgccttactgccatgttgtctttctgtgtctcgtcttgctcacattgtgtcatgttttgcagattgctactctgatcgctgtatatgccaactgggcatttgcttcgatcaagggcattggatggggctgggccggtgtcatctggctctacaacctcgtcttctacttcccgctggatatcatcaagtttctcatccgttatgcgctgagtgggagagcatggaatctcgtccttgagcagagggtaagaacacacacataagagaatgattgttgacttccaatgttcagttttctgactgtcaaaaatgcgcactcatctgtgcttgttgttgcctgccaaatgtgtgttaatcatctgttttgctggcatacacatttagattgcattcacaagcaagaagaatttcggtacggaagaaagggagcgcaagtgggcgcacgctcagaggactctccatggcctccagccacctgaggcatccatcttcgagaacaagacgaccttcaacgaactgaaccagctcgcggaagaggcccgtaggagagccgagatggcgaggtacatgctatttcagagcttctggatatcccatctagcccaagtgtagatttctcgagcgtttccactgaatgtgacaaacctgacttgccctgcccccgtctgattttgttacaggttgcgagaagtgagcaccctgaaggggaagatggagtcggtggtgaagcagaagggtttggacattgagaccatccagcagtcctacaccgtgtgactgacggatcatacaggcacgattatagaggcggtttcttcttactatatatatatgtggttaggggagcaataataaggattaaggaaccaaccctacatatgactggttcgcgaggatgatgatgatatatttacgatgccggtgtggtgctctgtcgccaacacaccatagccgccctcactcacccctatatgctgtgcattattaaccacccccggcaggcattgagattgagatgagagatatatgctctgttgtagcccttagtagacgatgttgatgatacaatacatttttgcttgttattatatctattattagcctttgctccctggttctggttctgctctgcgtgttttgatgctgctgctggttttgttgttcctgatttcctaaatctgatgaagtggtagcaatagaactgcatatctgcataggcatgtgccatgagcttagcatgtgcggtgttaccgttgcagcatgggcagcatcagttgctcacatgccccagagatggtgtcatggtgttgggtgtggtttgtgaggccgctatggtcgcagttgaattgaattcatggcatgagagggtgtcggggtgtgatctgctcgcctagttgttaaaaaatggcctgatgctatctggtcctggtgaaccatgtgcaagtccttgctcataatggccgtccagcatcgttgcctacttgccttgttgggtatcgacaggcacagtacggccgcctgccgcgtcacaggttggatggcgggacgacggttcctgcacaacgtggccggctagtgtcagagattcagtgaccgatcccgtggaaaccccatgggccgggcc

SEQ ID NO: 3712 - DNA, 5057 bp, Sorghum bicolor
ctgattttgtttctagtataagctattaacattgttgaatatgtcggttgggaaaaaaaggcataatcttttgctcagtgtcttgttttcttatctttctgagatctgaccagtagaagtgcaccttgggaattatgccatgtgtttcttcatatccagactatgaatacaaaatatttaaaggtattaagttcatttacttgagtggcatggccagatttttacaagagaactactcgtgcatttactcagaggggtcggatcagaattttgatgaggagacccaagggactggagaatcaagaccaggatgcaaccgaaagcgactgaaatctgctgatggtactagggatcatcaggtaattgaccatatatgtgtagtgtaccttttagttgtgttctgccgctgttctatgttttatgaaaacattcttacttcacatcacaatgtcaataggtggttctggttgtgaaggcagaggcccatcaggtgggctgccttgatgcgagtgataaaaatagcaataactgcactgcatcatcaaaagtgcatgctggattacttgatgttgaagctgggcctccctctggcaactgcaaggatcatggaccaaaaggataatgcaatgtccacggagtgttctctggaggtgactaacacactcacatggtagtaactgaatcacacacagagagagtcaagcagtgcaagtttgtaagattaccctttattctggtttggaagtcaaaatagttcgttcaatttagcctagattgattcgaggcagttgatggttttgttgtgtttctgagtgaccctgatacgaaaataaaatttccttttgttctgtgtttgctgctgtaacctgtaaagtgctttcatattttcgctaactttatatctacattttgctttactattcatatcagaatttcgaacgcatttcggtctccaagtttgcctcactcgcctttgttcccttatctaaaaatgttaacctcactcgcttgggcaacctttcccttgtttttaaattcaaccaaattttgataatatttggactgctggccctctaacagagaaaaattcgtatttctagctctgccagtagctgagcaaactgtcttaggccttgtttaattgacctaaaaaaaccaaaaacttttcaagatatccgtcacatcgaatcttatggcacacacatgaaacactaaatatattccttgtttactttacccccaaaacgaaaaatttttcaagattctctgtcacatcgaattttgtggcacatgtatagagtattaaatatagacgaaaacaaaaactaattgcacagtttgcttgtaaataagagataaatcttttgagcctagttagtccataattagataatatttgtcaaataaaaacgaaaatactacagtatcgaaatccaaaattgtacaatctatttagtccatgattaaacaatattttcaaataaaaacgaaaatgctaccgtaccagaactaaaaaaatttacggaactaaacacagccttaacttttgatggttgactcctgcctgctagaggacccagatttcttgcaaacagaaaggggttcagggaccaggagtctattccctttatcaattctgataatgtgttacgcatggagctttctttggagaagaatgttaatatgtttgtttttctctcacagtaaatcaaaattaatattggcattagtcgtttttacagccagccgaacagggatatggagtccaccaaagtgtgtgcgtgtagtcttcaccacagcaagtacagctgcaagatggaaaaaatagctaaatattgacctaaattctaatagcactattagcaggatcctgattgcaacaggcttgaattttttgcacaacgttcttttttgttttagttgggcttaattaagcctgccaaggcctacaatagcccttttctactttgaaggccgaggtgagcaagcagcagcaaccccttgtcagttcatttgcgttcaaccctcctccgacggtccgacctccgttccccacttcacgcgtcaccccatcccgcctctcccgttcacgcggtcctaactcccaactctctccctcgcgcgcccgcgcgctctctctagccggcgacgactgggcgagcggcgccaccctacgccaggtcttcgtggagatcatcgccggcgatgagtttcaaccaggtacggccgccccttccactcccttcccgctgtgtgaaaccgagctccccataacctaatgtaagctgtttgtattcagatctgacacaattacaggccgctagcttcgatttttttttatttttttgcaaaaagtttatcggtgcatacgtgcacctatgtccactactagatccgcctcctagttgcagcatgtcatctattaggttcagttttgtttttatactaggttgaattgtctcaaattgtggattctagtattcttgtgatgacttgatcgttgatctcacttgtggcatgtgaaatttgtagtctactgtcaaggggcagaccaggagggagaggcctagggctcgccctcatggcctgacgcagcagaagaggcaggaaataaaggaagcctttgatctgtttgatacagataactctggtactgacaatttcctttggatgatcgccagttccattttttcaactacactattgctttcgtcgtgttggaactgttgatatcttactaacatacttatctcacaggaaccattgatgcaaaagagctcaatgttgccatgaggtaaggctggcataaccattctcattttaacagccaagctgcaactaggcctctgaaattatttattttgtgtacagagccttgggatttgagatgactgaagaggtattattcgtcctatttgcaaatcatttgttttagagcgcatttccattctctagaaaagtgtatttccgttgttttgttccttggcaatcctacgacaaagaatgctatagctcttccatttatgttaggcgaattgatattgcaatcttgcataagcagtcctagagctagaatgagcacaatgttaagtggtgagagagttcctgctgataatcttgcgctgagcatttccttcttttcctgttgcagtgactgtttctttttgagcatatcttttagcgtcgctatctttcatatttctttagcagttagtttgctgatgagatgagtttgtcctgtccatgatatattatgcccctcgcgaaaataagagccacaatattatttcatattttcttttctgtgtttgagcccatgcaagtatggaaccacatccatgtgctgtggaaagttccttgaaataacactactcgccttctggttaatgcagcaaattaggcaaatgattgctgatgttgacaaagatggcagtggagcaatcgactatgaggagtttgagcacatgatgactgccaaaatcggagaaagggatagtaaagaggagcttacaaaagcattccgcattattgaccaagatggaaatgtaaagcatcatccgccttctctttcatacatgcaaacctctatgattgtactgggctacaattttgcttgccttatctttccaatcatgtcaattatcttttcaactctagtcaacaatcacccaagtggttttcataacttaaagatgatgaataacggatgcttacacaattttcaatcctctccctcctagtgttctgagagcaaaatgttagtatgtctccccttgagcttaatggaattggctgagataagaacacaaaatacttctttgcaactgtgccatattctaaacatgagtaatccctcagacaatgctataatagctcttaaagtatgttttattgtccacgcagggaaagatttctaacattgatatccagaggattgccaaagagttgggtgtaaatctcaccctcgatgagatccaagacatggtgcaagaggcagatagaaatggtttgctgtgctctgtcatctttatttctttttgcaaacttcaaagaccatcaacttcaagttaaactagctgtaatttaacttgatttcttgtttgtcacaggtgacggtgagatagactttgatgagttcatcaggatgatgaggaggactagctatggctactaggtgtatcttatgtgagtcctgacaccgtcagttggtttatgaccacaaggggtgtgactggtgtaattactatgaacaataatgttgtgatctgcttatgtttatccttttttttaattcttgctgtgcctacttaagtatggtaactagagtaatatatatgcaccagatttctgttatagttcaatagctagtcgtttttgctggtgggaggtggccaggtgggttgaagtttgtccagctttctgaactctgttcagaagtgtggaagttttgtggcttgtgcgaacatataaaactctgcaatgtcgttgctatctggtaatgaagttcggttttaacgtgggggagaaaaatatatgcaccagatattcggctctgccatctatcgtgtggatgcagatatgagcaatgaagccaagtgaaatcgaaatggttcgtgtttgtggtagcattcctgctctatatcaatacaagttcggcaggggtcctgccgaccattaccaataaaataaattgttgtagcagatcagctctgtgggtgtaggctgaaactatgcttgtcgagtaaaaaaaaaaaaagctatggtgtgatgctggaccacgtttttcagaacgctaaagatgtcatcagtttgcgcggtgtccaggacggtgctggttgcctggctgttcagttagctggtatggtagtggtagctacggtctgtcgatcgactccccaactaacctgaggtatcctgttgtcggttgaggatcatccatactgctctggatttgtagtcaaccgtgagaagaggacaggctgcgtcagggtactcacaatccatactgctctggatttgttgtcggttgaggatcatccaagacaattaattacgta

SEQ ID NO: 3713 - DNA, 7007 bp, Sorghum bicolor
agctggtggtggcgccgcctacacggtcaccggcggcgaacaggctccggttccgccacgacgtcagcctgacagtgccggtggccgtgggcgcgccgccgcagaacgtcacgatggtgctcgacaccggcagcgagctctcctggctgctctgcaacgggagccgcgtgccgtccacaccgccacagccacaggctcccgcggcgttcaacgggtcggcgtcgtccacgtacgccgccgcgcattgctcgtcgtcgcccgagtgccagtggcgcgggcgcgacctccccgtcccgccgttctgcgccgggccgccgtccaactcctgccgcgtgtccctctcctacgccgacgcctcgtctgccgacggcgtcctggctgccgacacgttcctcctcggcggggcgccgcccgtgcgcgcgctcttcggctgcatcacctcctactcgtcctcctccactgccgacggcaacggcaacggcaacgacgccagcgccaccaactcctcggaggcggcgacggggctcctcggcatgaaccggggcagcctgtccttcgtaacgcagactggcaccctccgcttcgcctactgcattgccccaggggacgggcccggcctcctcgtcctcggcggcgacggcgacggcgccgccctgtcggcggcaccgcagctaaactacacgccgctgatagagatgtctcaaccgctgccgtacttcgacagggtggcctactccgtgcagctggagggcatccgcgtgggcgccgcgctgctgcccatccccaagtccgtgctcgcgccggaccacacgggcgcgggccagaccatggtggactcgggcacgcagttcacgttcctcctcgccgacgcctacgcgccgctcaagggcgagttcctgaaccagacgagcgcgctcctggccccgctcggcgagcccgacttcgtgttccagggcgcgttcgacgcctgcttccgcgcgtcggaggcgcgggtggccgcggcgacggcgagccagctgctcccggaggtgggcctcgtcctccgcggcgcggaggtggcggtcggcggggagaagctcctgtacatggtgcccggcgagcgtcgcggtgagggcggctccgaggcggtgtggtgcctgacgttcgggaactcggacatggcgggcatgtcggcgtacgtgatcggacaccaccaccagcagaacgtctgggtggagtacgacctccagaatagccgcgttggctttgcgcccgcgcgctgcgacctcgccacccagcgcctcgccgcccgagcataggcttcggtagcattgattgatggcacgcagcagcagggcacgaaatcgttggtagagaccaggtattagagatggtctctccgatcacctgctgctgtacgtggtcaactttgtattacgcgatcaagtatacaagtcggtgacaagctgatatacacatagacatagctatggatactttttattatgcgatcaggtatacatacaagtcggtgacaagctgatatggaaatagttattatgatgaatatttattcactccggtcacaaacaggagtaagcaaatgtcttcgagctatataaagttcaatgttccaaattaactttaactacactttttttttacatgttaaaagtttgaatgcgacatgaatagcgcaatttcatccacaaataaaactatacatttgctatttcagcaactgttttgttctttgaatcaatctattatgaagttatatttcataattattataataatatttatttcatatcacaaaggttagtatttttttctataactttggataaatttaaagatggtggtattcagttttagctatcgtgatccaagtgcgccgtccatcacgaaacggacggcacagataatgccacgcactctccacagggtgcccggcactgcggcgcacgaactcgaaaccgcagaagcctttctacctcctgcagtcctgctatccccctctctcttttccccatctgcaggctgcaggcgctgctgctctcgtcctccgccagcgaccgaatcgctggctcgacgccgcggcgggaggttggtatctcgcctttcgatcaggtgcgcgccctcctcgaactccccctcgccttcctcgtctggcttccgattcggtccggtcagtgcccaagccgtgcgccgggcgaagcttccggaagcttcggggtttatcccggcatttcgcttcccgcgacggcgcgaccggatcgcttggcctcacggagtttctagctgggatttcggttggggcgtcgctctccggcgcttatttttcatttatatttatcggtgcctcaggttcacggccaaattcgttgctgcgtgaggctttggagtctggagccaatcttgcgccttagagggcggtggcagcgcctggtgggcaccatgagcttcgtcttccgagggagcagggccgacatcgaggccggtggcttcccggggttcgcccccgagcgccgcgccatggtgagtgtgtgtctgctcaatccgtgacgcatttctgctaaaatgtaactggtggtagtgtagcttaaaccggtttccttgtcctgatgtctgatcccattcgtatgtgtgcttgcgtgtagcgaattcatgcagggagcaggccggtgaatagcaattccttggcttttcttctaactggtaatccgttcgcctgtctgttaccgatactgttgagctgctaaagattattcttttggttaacgttatgtttttttcttgggcagttcttgttttgttcatggtactgaactcacaccagatgtctcccaatcttttggtaagttttcatgctccgtgcgaggtatccatgagttgattgaagttggtttcttattcatacgaagcatgcaactgtggaacagtttaataactatatatttgtcggattgtgtgatcttttcttctcttttagctttggcttgtcttgggagtcttcctaatggccacaagccttagaatgtatgccacgtgccagcagcttgctcatgctgcagctgccaacaattttcttggacacactgagctgcgtgtgcatgtaccgccgaccattgcccttgctacgagaggccggttacagagccttagacttcaactggctcttcttgatcgtgaatttgacgatttaggtgtgccaatacattccgttcgactcatttgatgatttatagtgtttcctggaaacttagcgccatggaaatcgttttgtttcagattatgacactctgagagcattggatgctgacaatagcccgcatactccttctatgagtgaagaagaaataaattctcttcctgtattcaaatataaagttcaggcgcagcaggggaatgcccctgcccagaaaaggtaagacaaattatcctttgggttgatttgttcaaatggccatgtcaagttggttccagtatcacccatcatcaacacatgaccaaacatttaattctgaaatggagacatggagtaatttgtctctatgatgtgtttctaacgaatgtttttcaatagtgatgggccatctcagctatcggtttcttcaactggatctggcaatgaggtaattgataaatactgacttgtttctcaaggtgtggtcacttgaaaaatatcgtattatcatcaatcatgtaggctgttaaaaagtcatgttattttttatgtcacagttgtcagtcatatgcatatgcaatgatattcttacaatattccattgtaaagataagattaacatatatgtatatctgtataactgggcaatacacttttagttcagccctcatttattgaagttattggttgttgtctggttagctttgggttttatatgatattttgagtcaaggatttttctagtttacactttcttatttgatgtaacagctagtgtttagaatcacatagctgctgtgatcactgatcaccatcagcgtctgtgcagtagcacatgcatggttcagactttgggccacaatgattattgtttaacttgattctgccttgcagaagaagcaggatggtttaaaatcagatggaaccagcaaaactccagaggatgaactaacatgtagtgtttgcttagagcaagtcgccgtgggtgatctgttgagaagcctaccatgcttgcatcaggtaatcatgctcattgtcttgcccttggttttccttgtatggaaactgcagatgatctccgttttgtttcctttctgaaatgatcctggtagcaccttttagctctagtttgatatagtaacttgacatgttagctaacatcctaaaacaacgtcgtgaaaccagaatcatgtttgatgtaccaacaaactggtgcattttacacattttgtggatgaacgctgtgatattgtgacacacttaagataaaagtttttttaactgttattgtttgcatatatcatattttactttacattttacatcttgcacttggttgaccacttgcttcatgctacctcttcatagataagtgacttattggacacattctccaaaatgcaactttgaatgatacttgttgctacaaaatatttgtagaacatacaaaaaatagtttatgaacttccgagacaaacctacccgaataattttcaaatatctacaattagaatatagcaagtaatgtgtgaccagaatttaaaatcattgacttaagacaaccccacaacaccacttgtttctgactggaatactggagggagtatgcaccagtgtgaggtgctatgttgttgattctgcagaacagaaagtagggagtgtgtcattgtagtttatattctttacactcagatctgaaattctgtgaattttttgaaacgaacttaaatttgactgattacttgacacatcaataacttcctttgctttgtcattctttgccccatagagttctaatttgtcatatttttacccacgcctgattataatatcaggaatcacatgtttcttaacaacaatatagaccaggaatcacaagtgaaataggattaaggggtaatacaggtgtgatctctactcccccactctgtctcgccataccattggcttcctatatttgaaggttagtaggaaccttagagactattgtacaagacctgctataagtctataaccttgcccgtaagcacagcctaacttttgacttttttttttgaacgtaaaagcttttgactttttgaggcctgcatatgcagtgcaggcgcatgtcagcagtcagcttgtgttgtcctatggaggactgatgttgttacaagtgcatacatgaagagaatgcaagtttttcgcatggaccctaatccaagataaaatcacggttgacgtctggaggagggtgctagtgtgggggcattgctctttacctctgcatgtacaggttgcaaattgcactaacattaaaagttggtgggatttgtggaaagaaagataaaagatgacacttcaacgggttatgcatctacatcatgtggaatttgtggaaagaaagaaatcggcggatttccaaaatgattgctccacgcctgtctcgattgtcctacacacaaaacaggacttcgaacaatgacaacgtgcttttcaaaactagtgttagaggccttaatgtgcatttcgtttctgattctttgtggtttgtctatctcaagggcttgggttgtcttttagcctattgaggtgtgtctaccccttagagcactcttaacaatagagtcaacttgctagctcatatgaacttataaagaaaaaagaagataaaaatagagtaacacaacatacaaaaaaagtgtttgagcttagctctttaacttatcattatctcttctgtgtatttaataaaaatattttatgacctagctcttcgaacagtgttggagctacccttggtaaaacttcctgttctgttttctcccttcagtgcaaggcacagctcttcgaaaaaaaataagtgctaatgtgatgtgtcctgatgaggcaacattcgcaacaatgcaagatttcttactttctctttgttttacagtttcacgtaaactgcatcgacccatggctgcgccaacagggtacatgcccaatctgcaagcaccaggtgagtgatgggtggcatgccacaggcaacggtgaagaggatgcctcttacatggtgtaagtagctgcctaggagtaggccataggtaactagtagtagctgctaacagaatccgtggaacgctgttttggaggtgacggttttggagtgatttcatgcaatctagggatgtggtctaagcctgtctatcctaacaaaaccaagtgtggaaccagctgtctagtgcgctgagttcttgtacaactaatgtttctctcattctatgtgatgctgatgcataaaaaggttgatgataatctttgtaacatcatggcccagggcttaataggattaacaagttataactttttttttttgaaaactcatcttcaaagaactctaaggttaagcgtgcttggcctagagtaattttaggatgggtgaccgaccaaaaagttcttgagtgcgcattaatgaggacaaagtgtgcaaaaaagactggttggttggtaagggtagtctaatgtcctagagaagcgggacgttacaatcttcttccccatcctttcttagtatgcttggttttcttttcttttctttttttttaacacagtgccaggagttctgtcttttgttaagaagaaataaattttgatccagtttacaagaaatactaggctagaatactttacatcccacacagtaataccctggtagtttggctgaaaagccaaaaagaaaaatagtgaaaaaaaaactaaacatgacagctcaaatggctaaccttgagcaacccatttacaaacaaaggtgccacaccagcgacacaaagccaccgcacgccatcgttgatgagtttatcataagatccagcga

SEQ ID NO: 3714 - DNA, 5415 bp, Sorghum bicolor
aaaattttctttagaaaaataattaattaaatagggtcatgaaattaaaaaatttcaaactgataaaatagtgagactaacatgcagatctcacgaatacgaatctaaggcaatttgaacgggtcaaatcggagttaaagcgaatattttatgatctaaataaaatcagtggcatttttgtaaatatcgaaaacgtattttgaatcaaaccatggtgaattatgttttcaaaacagcaaagcgtactcctttctatatgctttggaccacaggtcttgtaacctaaaactgcaggggctctttaacaaatttgccggccgaaagggtaccatgggatttgagctgttggatcgagattaaacggcctagattacatcttgggggaggggaggtcggctgtcggctagagcagagggtgaacacggcggtgccatgatcggacctcgtcggcattggcgatttcagcgttttagtccacgattcgataaaacaaatgcacgggaagcaagaggagctcaagtggatctcacctagggcatagtcaaagacgaggggagcttggagaggaccggcgacgcaggatggcagatcggatgtgttcctgcacgttcggcggcgtcaagcggaggacagagtgcatgaaaaagagaaaggaggagcttggcgacttcgcaaagtcaatgtgaagctcggcagagagctcacggaggcggagacgcgacagaacgaaaactcaacctcggcggtgatctcggcgactactgcggcgtggctaggatggtgattcgctctaggattgggggtagggagttcggtgaggctgtggctgctatttaaagagattctcggagtgcagagcaaaccaacgcagagaatccacgcggccggagtccaaatcgaggtggagtcctgcccgattaagaggtaggagaaggttgcgacggatgggtcccacctatcagcgagataggaagtggggtcaggcggtcagtcacaggaaggagggaaacagcgccgcatggcttgctgggctggtcggtttggccgacgagtgaggtggggagagagggagctgggccggcctgcagttcggcccacgagaagctggagagggaagagagctgggcttctggttcacagaaggaaaataggccgcagaaaaaaaaacactcggcccaaattccaaagaggggggggggaaaggaaataaatgtctttccaattttattttcaaacctttgcctaattagatttcaggagaatttgaaaacctttttgaaattcaaaacaaccactcaaacaaaaataaatgcaacaacatgcatgctcaaacatgtatctagaccctatagttgtctttagtttaataaaaattattattttctatattccaatgctcacaaaaataaaataaatcaatttaatcctatgtttaaaagtatgcaaattttagggtgttacacactcacactcttatatactccttctgtccctaaataattgtcgtttacgcttcctaaaaaacaactttaattacacatatattaaaagtattaatatttatgataaataattaatatcattagaaagatctttaaatatagtttttaataaatttatttaaaaatataaatattttacatattttatacaaatcgagtaaaatttatagtatgtacaccaacattaacaattaaatagggacgaagggaggacctattaatttccagctctactccagtttgctaggaagaaagagagagagaggggtccaaatccacattaagaaaaattatagtactggtaccagcagatgagatgagccggggacaggggtgattagttccaacgcattttccgtgcgggccggcccactgacccgccgcaccgtcgtccccgctaggtgatagtcgctggcccttgcggcgcgcgttacaagtagcggcagtggagttacagccagccagccaaaagttacctacagcccactcccaacgggcgcaagaacccctcactcactctcactcactcactcgacagaggcgtgactgactcaaactgaactcatatcgcgttgagagcggagcagaggagggcgaaccatgggcgaggtaatgcctgcggcttcttggcagcgatgctctggctctgggagaggtgcgggaagatcttgatgtgcttcgttttgtgtgtgtgcgttggtgcaggaggagaaggcgaaggaggcggcggccccggccgacaaggccaaggaggcggaggagaagaaggacgaggcggcaggaggggaggagaagaaggaggaggtcccgcctcttccgccgccgccgccgccggaggagatggtcatgcgggtcttcatgcactgcgagggctgtgcgcgcaaggtcaagaagattctcaagggatttgatggtaatagatttaccctcttctctttgctgctgtactttgtgcccttgtgttcctggtattctgttttgttttttgaacaggaagtgttcttgatagttggcatactattagctcttcttccatggttacaaaaaccatgttgaaatctgcatattttgtttgtttggtttgtttccccaggttttatttgaaatctggttctgttttctgaattgtggagtgatttcctccagtaattttgaaaaaagggcaaacttttgtggtttttctggtcatttgaaatgtaaccaagtatttctgtactgcatcgctttaaagggaacgtttaaggcgcctcttttgtaaggtgcgagtttgaaaattttctcctttttttaatctatactactgctcgttttctctttgtacttgtgcatcatcataatacatacagtacctggcaaagcggcgccacttctcttcctatgatttctatgatattgcctttggagttcaatctggagagcaaattttcagtaaaaccatgtcgctgttttggttacatttgaaaaagttaggtggggaaatgcttgcttggaggagacaactccgagccgcacgtgtatcctatgttattgatgaaacaatttagatcccagcaaccttaatgcccaatcagacatcttataatgcaaaccactgcagtttagtatatgcctctctgtgcagcatatgttcaaaagaagttcaagttgccttaagaaagatgtaacccctctgtctgtcatcagatgacgatgacggattaattatggtaaagattctgggtctgccataagtttaactaattattgtactctcaactgggaaactgaagttcatgaatttatctgaaatttgtatgctgtctctttgtgcaattgttccaaactttctatttcttttcctgcaaatgtacagtttttcaattgagcttccagagtctgaatttttatcttgtgatgtgcaggtgttgaagatgttattgcagatacaaaggcacacaaggtggtcgttaagggaaaaaaggcagctgctgacccaatgaaggtggtagaacgtgtgcagaagaagacaggccgcaaggtggagcttctttcgccaatgccaccaccgaaagaagagaagaaggaagaggagaaaaaggaagaacctgagccaccaaaacctgagaagaaagaggaggtgaattatccttgccgagattcttgaacacactgcattgccatttttacttccaattattgtttctatgatttggggctgagacattgatgttttgttttgtactaaagcccacggtgctcgctgtggtggtcaaggtgcatatgcactgtgaggcctgcgctcaagtgatcaagaagagaatcctcaagatgaaaggtacagttttgttaccacatctcccttgtatgatccatcataacgtagctttcctcttcttgtgttgaatgatgttttatattttagcaagatacatcaaacttcaatgattcatagtctgtctgaaacttgataactgttacgctgttgcaatttgtgcttgatacgagatatacttggtcttctctccttgtatttgactgagaagtacactgaacatgtagttaacatgtcacaaaaactacaaatagatttacgttaagttcactagcttaagttttttgacaaaaaatagttttaaataagaacagtgtaaattatgctttatatcgtcaattagctattatttcagtttaggtaatatcaagtcgaggtagacatctgcttctcatgtattcaccaattaatttgtaatgtgaccttgcaggagtgctatctgtagagtcagacctgaaggcttctcaagtcactgtgaagggtgtgttcgaggaggccaagctggctgattatgtgtataggcgcactggcaagcacgctgctatcgtcaagtctgagccggttgcagctgagaatgtcgatgatgggaatgccaaggacgacaagaaggcagccgaaggtggggaggacaagaaggatgatggcaaggaggaaaagaaagatggtggagatgcccgtggagacgagaaagaagcggataagcagaaggatgatggcaatgctggtgatgaagagaaagataaagaccctggcgccgttgctaacatgtatatgcactacccaaggttcaatcatccgagcggatacagttatgcctgccagtacccacctcagctcttcagcgacgagaacccaaatgcctgttctctgatgtgagaaagccagaaccaagtgatcttaaacgcgaaaataagagggattgagttatcccctgattttggagggctcaggaagtctagaacttttcttttctaaggttgaacttctatctggtacaaagtaaactcagggctcgtttgtggacaccatattgtgtaagctactggttagtaggattttgtggtgtcacctttggcttttatttttgtacaaagatgtattatatatgctagttttgaaatagattgctgtgagtctgtagtctgttatctggaatagacgtaactttctcagttaacattgccagtgctgtcgcaaaaatccatattcttggtgttgttttctaactatatgctgttggaggaacataaagcaagttcatcagtaaagttatttttgcccttgaggacatgtgttctcactccctttaccactggattcgcattgagaagtgtgcaaacacacatctcaaagcgaatctgtattgagatgtgtgtttacacatttctcaatgcgaatccagtggtggagggagtggccaagttcatcttgttttgtttcagtctggcctagttcagcggcattttgtcaacagaggccacttgccagcattgattccccagttggcaatggcacttctcatgtctgtgactcagtttgttgtggaactgtgaaatttaaggttctcatgtgcatggtcccatcaatccacccatccatccg

SEQ ID NO: 3715 - DNA, 4552 bp, Sorghum bicolor
ccatgaagccggctgcaagttaggacatgaactccacgaagatacagcttgccaaactagtcagagtagggacattcaaagaataagtggtgtgttgtctcaaggtttctttcacatagtgcgtagaagtagttattcttccaatgacgctgttgcaggcgtgctgaggtccatagtctgttttttagcagcagccataaaaagaatttgcactttggcggtgcccaggctttccagattaaggctgggaaaggggattggacttggccagcaaactgaaccatgtatgctgatttgctggagtattgacctgaactttcaaggcccaagataatcatgtcttcacctgccttgtctagagacacggtcgatagccatccagaactcaaaatattcctttagcagatcctgattcagattgtgtgcaatatcactcacccatcttctattcaacaatgcttctctgactgtcctattctttttctcgctgtgggcgtacaaccgcggatgttcttgatgagttttaactacgacaacagttgcttaccaatctattctattgtctttgtgataaattctagcagacgtcatctcagttctatgcagcatggggaggagcgaaatttctgtgaagtgaaagatgaagaggatggagataagcggtcgatgtcgtcagggttgttgctgcttccttgcgcaagagccattggaatgaggtgtcttgggaattggaggtctcagtctcaaggcaaatataccaccaagtcccttttacagatacttgactttttggtggtgtcaggaatcaaaggttgaaggaaatctgggaattaatgcagggtcccccttaaagattcagatctttctatggatggtctaccgccacagaattcagtgtggtgtacagctgaaaaaggaggagttggtgtgcttctgttctgtgtaaaacttgtgggcaagttgagacaactgaaaaggaggaattggtctggttcatattatgtcccaaccagttgcttccttttctctggacttactttcgttctatgctggggtggaccatttgaaggggttatttgttgaggtgttggaccatttgcatttgaaggtgagagttgaggagtatatcattttttttattatttttgtgcaggtgctctctggacacgatgtggtcttcaaaaacaacaaaattgtggcgtctcctatagactatggtggtggtgctccacaagactgtcatacttatcaagacgtgatgcaccacggttgttgttggaggatgttgttgaatgttaccatgtttggcttttagttgagggtttgtttgtgaggcacccggtactccggcgtggccataactgtctgttagcactttttgtaaattggaatcctcagttctgatcggggtttttcaagctttcaaacttcactcaatctgttgccgggcaggccttatttagttcgtgaaattttttatgtttggctaatacaacactttcgtttttatttgacaactattatccaattttagattaactaggctcaaaagattcgtttcgtaaattacaagtaaactgtgtaattagttattttttttagcatgtgccgcaagacttaatgtgacgaggaatcttgaaaaattttaggaactaaagcctcagtccagttcacgcatttgtagccactctagaaacagttgcagctctatggattttccgttgagctctcagcgtccgtctccacgtccacagccacagatttttcacgtgtacggttacggtgtacccggacactggacacagctgctctgctgctgtccaccaatggcagcgcagccaggacggcaccccatccacacgcccggacacgtcagcgcggccatgccacgtcaccaaaaaaaaagggctctcccatggcccaaagcccaactgccggcctggcccgctggcccctggccgcacactatcctctcctctctatccttttcctttccttccactgctctgctcttgctctccgtctctccccacactgccactgccagcctccctcccctccccttcgctcgccatggccatggcgacctccaccttctccccgcgccccgccaccctcaacaagcccctgcgacctggcgccaagcccgccagcctcctacccttcccgtgccgccgtgccggcagactcgtctgcgccaccgctgccggggaggcgccgcccgtcgaggtcgagcagcgggacgaggcggagccggcccccgccgcggcctccaacggggccgccgtcaaggccgaggcgcccgccccaaaggccgtgcaggctgaggccccgccggcgcccgcgccggtcccggccttccgggacgccaggtgggtcaacggcacctgggacctcacccagttcgacaagggcggcgtcgtcgactgggacgccgtcatcgacgccggtgaggactctctgactcctccctcctgtcgtgctagattgctagtgtgagcaagcgaaagggttgctaagcaagcacccaagtcatggagagtgtgcgctgatattacaacttgatgtggaaccctggactggattcacatgctggagtggacattgctgcctgtctgccagccattccaattctagcctgtaggttgtggcgacttcgtcctgtgcttcatgagtaatcatcacaagtgtgtctttagtttgctgaatgcttagcgtcaggcaaggaaaggtctagatggttaagctatggtgtgcaggggtatggctttgccatccctgtgaacataatgtgcataaagcttgcatcctttcgcagcctggtgtgctcaaatgaatggcatgctcgctgactggacaaaggcttggctgcagtgtctgtctgaacttctgttttttcttgtggttgtagagttgaaagatttgagggttggatctgattttttttcctcgtagttgtagaatagcgacttagcaacagctgatggttgaagatggatttccagtctaaagagatgttaaggagttaggactggggaagtgaggggaggaagatgcatcagtcccacttgaggctcagctggtcttgaattgatttagcaaaaacattttctgaactggggagtcgtgctttttcatcagttgtgtccctgtgattctgctatagctcacgtgaactgactagggaaagaatcatgcatatgcaggacatgcttgtgtaaactcaggcatttgttggtttgctacaatgagaggggcaaccaagcattgctagcttcccgacattgtcgctcctagggaatgccacagccaactgatgccagtcatctaatctttgtttgattccagaggccaggagaaggaaatggcttgaagattatccagaggccactagcacagacgaggctgtcgtcttcgacacttcaattatcccatggtgggcatggatgaagcgattccaccttcctgaagccgagaagctaaatggtttgaatatgatgtgttctattttcacttacaaactttgggtgcaaatgacattttgtatctactagggattgtgcattcagaaccaattattattctcgtctaatgcaggtcgcgctgccatggttggcttcttcatggcatactttgtggatagcttgacgggcgtgggccttgttgaccaaatgggcaacttcttctgcaaaacgctgctgtttgttgccgtcgctggtgtactgctaatcaggaaaaatgaggacattgaatcactgaagaagcttatcgacgagactacgttctatgacaagcaatggcaggcaacctggcaagatgattccactgggggaccaaagaattagttcagcattgggatacagatgcagaatcgttcttgtgatgtactttacctctttcttcggcctttttgtttcgccgtctcgtgaggcttggaggaacattttgacaaaccgtaataatctacgtgatcctgtaaaatagtatggactcactttgtgtgctagagataattacgtgcagtttcaatgctttatatggtttgccatctcaaagcatttctcatccaagcagtaagggcaaccatgccatggtattttcatcagtagtatgtcttcattcttttttacaacaattcataacagatcactatcaccaggtttgcaaatttcttcttgccagaactatgttccaaaagcaacagtgtttgccctaaaatcgtttccttaacaaaattgtcactgcctatgctacaccacttattgccttcggttaaaccaacatccctttggatatacagtggcgcatggtccgtcctgagcaattcacagatattttgatatcagagaattcatttacatatcgatcaaagaaatgtcaggtacatgtttaaggcactcatcaaagaagattagtccgaaacgaacctgtgacactgagaaaagcatgtctcttgatggttaactttccacagagtactacttgctttgatctggcatggaattcaaatcaggcatgacacgactgaattctgacctgcaaccaaagcaag

SEQ ID NO: 3716 - DNA, 7174 bp, Sorghum bicolor
gtcttagctatttgtgacatcatcggggggcatactccttcgcaagatcgcaaagttctctcactatcgcagagttgccaattccacgacagttctaacatagtgctttcatttctcccaatggtactccccaagggagcgcactgatcgaatgtcatcaataagttcattcacggttacctttctaaaccttttggagccttgcccttctaaatcttcgtcctcgtacaaatcccaagaatcatcatttgctatcatcaaaatatcatcatgtttccctaggttgtccccccaaattccctatctgattagaaacaggaacagttgccatggtcatattaacattgagatgttctccatttcctaacattagactcttggaagcccccttcctaataggcatttgttgttggtccctacctcttttcatgaggcttcttgcatcttcctgtacatcatcataatccccaactgagtctttgtgactaccttcttcacatttagattcggtgcttttcttcgggtggattccctgatccgactcccacgaatctgacccttttgtgtctgttgaacccgatgaattgctccccttcgccttccatttcttttctgggctagcacttaaccaatccccatactggatagccttcttgtcatgcacaccatcaccacattcaaattttgtgtgccctattagtccacaaatagcacaaaacttaggtaacttctcatatttaacacgaaagacttcccgcttctcttcttttccaaacgacacaaagataattctggtgagtggcttatcaatatccatgttgaccctgatgcgcaaatagtctcgccatcccttaacatcattatctggttctacccataaagtatcaccaatcttgtcacctagctgatgcccaattttctcatttctaaaacatgttggtaaatcatagacacgtgcccaaatagctaatttcttaaacttcaccgtggatggttttgtaaccccatcatacttctccagtaggacaacattccctctgaataaccaagggccttcttccatcaccttacgccagtctcctaaacatgagaactggaacacaaataaattttcccctattgccttgaaactgacctctcttgccagaccccaagcatacttcatattagctaaaaacactgaatggctaaaggtttgcaggaaattaacctttgctagcgctgtccaaagtgcctccgccttcattttctccaggtctgcttccaagataatcccttgctcttcatcttcacgtatatttaagtcatccaactcacactcaaacctcccttcaggttgtaaatctaggttagatttatccatctcttttacgtgacagatgaacactaaatacaacacacaaattctcaaaatcacaaccaaggctgagaaacaaacccaatgtttgtcctttaaccagcccgaattgcgattgagagactgctgcaagcgtaaatctgagcaaacggaagagaaaaatatgattctcacaccaacaataagtgggagtagaagaaccctagaggcctcacacgagaaatcttggagctataatttcctctctgagatccctctttgcttgtttggggagtggaaactacctgagaagcagctagactcgattcagacatcgggatgccttaccggcggcgaggcggctctccgtccgtacaggtcgccgcggatctggagagttccagatgccgaagagaagaaagcatcctactaggctactaggcacgaagcagccccggtctttttctcccgaaaatcagaaagcccatccagactctacggcccagcccaatcacttataggctcgtagcagcccgcgggccgcgtgctaaaaccccttgcagatatttttagtctcagtctcgctccactagcgcttggccccttccggttcgaaccctcctatccgattccatctcgcgttcctctcatcgctccggcagaaatggcgcctcccgcctctgcatcggcgcggccgctatccctccccctcaccgtccctctctcccgctaccggtcccacgtgctccccgcgacctgctctcgcctcctcccccggcgccgcgtcgcgctcgcgccggcccggcctggcgccgcggtcctatccagtctcagtgacgcgcgggaggaggagggtgaagaggaagaggaaggggatttctatgaggaggatgagcaacaggaatacgacgatgaggaggaacaggggtacgacggggagaacgaggagctggtcgaggtggggtacgtgtccggcgcgcacggggtgcgcggcgacgtcctcgtcacgccacgcaccgactttccggagctccgcctcgccacggtaacagtacaccaacgtcgattagctctctgtcaccccaatggcaatgctactgattctgattggctgacgcttctagtttgtttgttctgacagccggggacgagatggctgagggctcgtgctgctgggaagcagcaggtcagggaattcgagcttgttcggggaagggcccacacggggaagaagagctggatcgtcagttttgatggcatcgataacctggatgaggtctgtctgccttgcattcctctggagtcatttgccttttgcatgttaatgtgtgtacctcagctaagaggtagtgtagtaactagtaaggagccttgcttagtttctaggatgaacagtccaaataaattatcctagctgtaatactggtttatggttcagtggacaacttgctggaaatccttgaattaatgcaaaattcatgtgttgtattgcttcttttcctctcagtctgcatacgagaaaacaggattagccaaatttcagcgaagcgaacagcatcagccaaatttcagcgaaacgaacagccaaatataagatgtacagtcactaatcacaacagtcacaaatcacaacagctggccggctcaagttctatgactgggcttgactgtcagagtagtccagctcaaactgcttcgttgagtttgagttactgctttacgttaccttttctgagataattcatttccctctcgcttttcaggctaggcaaatagttggttcggctgtacttgtcaaagctggagataggccagaaattgaggacgatgaattctattcacttgaccttgttggaatgagagttattgtcaaggtacatacatcattattttaattttcaagatattgccacaatgccacttcattggttgatttcagttacaaaactatacaatgtaggcaattttaaaaaaacacgtcccatgcacttttatattacttgataagggaaatttaggtctatgcaactgtgaatggttggttaagacttaagaatcatttgtattttaaaatacctccctccactccctaaaactagagacaacagttatgaccttcatttgataccttttcaaaactgctttgtccatcccctgcaagtagagtagtaaacaccacagccaaaatgcacacataatatcctactttatttttgcgagaaatacaatatcctacttatttttccagggaaatattgttattaaatttgtaactgaaattatttcacaggatacaggcaaggtcgtaggaacagttggtcagattttcaattttggagggggagatcttctacaggtgatgattggctctgctgagggtactgctgtcgatccagattcagaaaatcaagattcaatttcatcacgtgagcatgtgtggattccatttgctgaagatattgtacctgatgttgatatggcgagcagagaaatgtggattacacctccgaaggggttacttgagctcaattctcgttctgataagagatcaaaaaaagaaaggcgtgcgatggttaggtctgcatcatccttttcttgcatccatgctcgcatctacatccatgatttgcttcttgaaagaaacaaagcatattgaagattgtcgatacatatgttgcatatagtataacaaatcaagtataaaatgaactttcatgcttcaggtcataacaaaaaacaatgtgatgtttggtgcctgatgttttatactgtatactttttcaaataattcatgacccagttttgatttttacaggagtggaaggacaggaagaggcttcaacgtcgtgtaattgcaggaaagaaggtgctctccgaaatggaccaagtccatgttctggaaggtttggtatcagggaacaaggtccaaaaggcatcacttgcagagcagattgggagcattgactttcaattgttccgacatgcagtgcattgtgttagcaagcagattgagaggtacgcctttgttcaacatcttacttaagcctttttcaaaagaaacagaacagtaggtgtattcactgcacttttactatatacccatgtttacactgcccgagcgccagatatggaaatcactctttgcttgcttttggttgaagaacacgctttagtcattttttaaaagatcttaatcatacttgctcttcaaacttgtcaatttcagctcttcaaagattttgctcgctaactcttcactgtcaagaaaaaaagtgatcaaaataccatacaagactctcatcaaccttgaggacaaagctgaacatgcattcagtagtgaattcaaaaacggtcttgagattcttctgaagtccaaagcagccattgtacttgttagaaatggctctgactctgatgctgagtttctgggtttgctcaattcttttagtgagttaatgaaggtatgcattctttttcattgtcgttaattgttggtttaacatatagatgcagaatatactactgcgagtgcttgttctctgtttattttcatatattgttaattcctagtatgcataattttcccaaagaacataataataaatataggaaaagtggagaaaactgttactcattgctactgttgaatgttgatactgaagttgaacctgcccattagtcctgtagttttaaactgtgtttgaagtggataactcctttttaaatgaggaatacttggtgaatatatcaccaaaatgattagtctgtttatagtcatgaaaaactggaacgtcctgttgcttatttgttttgcatgcacgcagtactgttagaagatgcttacttgaataacagttaccctatggataggccttgtttagttcgcaaaaaattttgtttttggctactgtagcatttcgtttttatttgacaaacattgtccaatcacagagtaactaggctcaaaagattcatctcacaaattacagataaactgtgcaattagttttaattttcgtctatatttaatgctccatacatacgaccaaagattcgatgtgacaaggaatcttgaaaatttttgcgaactaaacaaggccactgatccttttttgcttgacacaggttgtagaaaatcaagtttctcccccttttattatcgtttcaccagctggtcatgtggagtcagttcggaactgcctggtagagaatgactattttggtttggacactgaaaaggtacacagcattgtcccgctttggtcttcatcctagttccttccacctttcttcttcctaggccatcttcagtgagggtttcatgacccagttttcaacacatccatatttaggaaactaagcagaagagtttccagttgtactcccatgaaactcttctcgtgaaactctctgtactcccatccaacacatcctcatgaaactctctgtactcccatctaacacatcctcatgaaactctctgtactcccatgaaactgttatcatctctctcttaattaatatggtgccacatgcatatttaatgtccatgaaactctaatgagacctcattgatactggcctaatgcttctggaaccattcgcaggtgtgggtgctggaagagctggagcttccagttgttagtatatcctccgagggaaacaggaaaaaggttctgatgaagtctccctgggagataataaaaaggccagcaggatctgggggtatcttcagcttactggcatcaaacaagattttggaaaccctcaatgaaatgggtgtacagtatacacaggtacgatcatcggatcatgtgccactcatcacctaactttcttcccatcatacattcaattgcataaactaatccaagaacaaatcactttgctgtatggaattacatcaagagatgcattctagttaagcttgtaaattccttcggaaatatgaggattcttattacctgaacggacttttactatcctgttgcagatctgcagctcatccaacaaaccactcatcgggcatcctatgctctttggggctgtcgcttcccgcggggctgatgttggcatccagctctccaagactagtgaaacggaaaacgatttcgatgtgatcctttctatcgatcagctgaacaagatgtgccgagatgtcactcaggtcaggttctccgctcgctccgaagagaacgtgcacgtcgagcatgtcgacgggcagtgggtcgctgtccagccggaggtggctaattcccatcgtctgcacgccgaggttacgagtgtcttaaactcttgcgctcctgataaactgtgtgtcatggagattgttgagtaatagatgtttcttcttgccagtgtactgtacataatcacagttgcttgatagatgcgtgacgtttctttttcttttgctattcttctgcacctgttttgtgaatttttaggggaccatctacacagtggaataccaggcactgacacccactgccgattctactcccctgaaggattacagaactcggcagttgccgatacaagtaatatgatatgagctaataacaaaaaattccagcctcatgcctattctgacttgggcccgttggattatcatgagattgttaggccctgtttagattgcaaaaattttggcccaaagagcaaattttttggcctgccaactaaacaggggctaaaaattttgtggcaaaaaaatttggcctgcagggcctgcaactgtgcactaacatccatgccagcccaccaatcgcaaccgtatccgaatcccaccctcaacacccccccctcaaactctaaagtctttaacatctcactcag

SEQ ID NO: 3717 - DNA, 13953 bp, Zea mays
  misc_feature (2393)..(2492): n is a, c, g, or t
  misc_feature (9531)..(9630): n is a, c, g, or t
agaggccaagagggtctgcatccatccgtgtgcgtttgttagctgcggtcgcgcgtcgctcgtggtgtcctggacagcgacgcgcaccttccgcctactgtccgtcgtttcgggcatctccatcccagcccaattgagtagcctgacaacgctctcgggaactctaagaccctgtttgttttaattgtttcgttagaattggattttttttataataattgtatttcagataaaactaattaagttaatatatttatatatgtaatatatttgtatattattctaaatcatactagagatagttatacaagacatttatgctatagagtagtaagtagaagagtagtggactgtggatctatcttccatgaggggtacaagttctatatatagagacgtgatagctctcaggggtatattcggtatttgtccacataacccttcattagggtttcttaacacgtcgctcgtgatgtcctggacagcgacgcgcaccttccgcttactgtccgtcatttcgggcctttccatcccagcccaattgaggagccctgtttgttttaattgtttcattagaattgaattttattataataattgtaatttagataaaattaattaagttaatatatttatatattattctaaaacatatgagagatagttatacactatatttatgctatagagtagcaagtagaatagtgtgttataagttttgtattagaaaaataacatgtaaatctataaaattaattttcatgcatccctcgatccacgaatttgagatagctagtcttatatataaactttagaaagttatgaaatgttacattttaaaaaataacctaatacattaattagattcttaaaataatgggaaacaaacggtgcgtagtaatagtatgatgtagtactcgttggtggtatattacattacttgcgatgtgaagtgaagctgaacaggatcgctctaataattcgatcccagccccctcgcacacatacgtatcccagcccccgggtttgatgaacctagacgtgggattatattattattagagtagtggactgtggacctgtggtgtgtcccggctgtctctctttccacagacagaccggagcttctttctgctagcatctgccatatatatattttcagttaggtagtgtaataatatcaggcaaattgcaggttaaagaaaaatgcagaagccaaacactgttaagccaaacgttagtatctcattcctagctagtattacaaaatagtaaaaaaaaaagaacatgacagaacacatgtgcaacaaaaacattggatcacatggcgaatagagacgtactgtcagggctgctagctgctctcgatcgtgatcgtgacataccgacggcggctagcctaggcctagccatgggccgcggtgtcgctccgtgagccggtgcatgctgcggagactgcagctgagacgacacgacacctcaagcaagccctgtggaggctatcggtctgccagactgcctgccactcactcgatcaggctcccggtcccagatagatacactgaacttgtgccatctcgccgacgacgagataaccgtacgtctgtagcgcgtgctccttaattaaacactgatgtcgccagcagcaggcttggcttcatgtgctgctgcagtactacatgtcgttcagcgacgtccatcagaagttaacagctcctagaaacgacgtctaacaggggaggaaacgttcagttacgtccacgactggccgtgagctgtgactgtgcgtgctgatgaactaaccagtctcgcggtctgaccgccggtcgcatatcgatgcatctatgactattgactagctacagttatgttccacgtgcgcgctaatctaagttattaaaacctgaagccgtttggagctctccccgcgtttcgcgggcactcggccgcgtgcttgccgacacgtgcccgacgactcggacccgaaaaaatactcattttagctctgagaggtaacgtgcgtccgtgccctcacacgtcgtctctctcgccgcgcaccttgtctctgtcctctcccatccatctccctccgcacactccgccgcctcaccttctccccctctctctccccgccgccgtggtccccgccgccacgctgtggcccttcttcgacgccgtctgctccgacaccgccgtcaccttcggctcgctcgtcgcgctccacgagtacctttgagaattcgtcggttcgtcctcatcctcactctcccttcccacctctccctcacacacgtcgtctctgcagtctgcacgctggatctgccgcctccctaccaccacgcctatgctgacctcgccctcctccccagcgcgtccctaccaccgcctcctcnnnnnnnnnnnnnnnnnnnnnnnnnnnnnnnnnnnnnnnnnnnnnnnnnnnnnnnnnnnnnnnnnnnnnnnnnnnnnnnnnnnnnnnnnnnnnnnnnnnnttcaattttttaaagagacccgaggaaaagtagtaatcaacccgccatcactcggtctttctttggtctagaaattttacactgcacccctgatctctctggaaaatgaggccccagtccataactgtattaaaatcagagaaaataaattataatggattttttaaaatgaaaataaatactagaacttgataactccatagaaaattcattttagctccaaattgacccattccaatttctaaaattttgtaatattattctctaacatttagaatcactgttttgacatgaaactctgttataaaattaatttatcatctaatcctattataatcaccttaaatcttaggaaattcataacttaaattctataactccaaatttagtgattccagttcctatgatctcattttaatgtatagatttttactgtatattttatttacatgtttggtgcaatgttaatttttgctatactatgtatgtattgtgttgatgcgagtagacgagcaagccactgtggaaactgaggttcagcaagtagaattagctgagcaggagctcattgaaggcaagttgtgcccttgaccactttttacccaataatgttctttaatatcacttatccatgcataggttaattttgatgggacccaataggttaccctagattgtttatctcattaccttgttcacccctgaatcacttgggtagtttgctattgctttacatggttttgggataatcatttattacctctatgttccagttatttttgttattctatttatgttcatgttgagatcattaatgttaattggaacatagagcttaacttgagaaccacgtgccaccacaagggtttaatgggacgcccttggctgactaattaggaaatctagtggaagactaccttacccgaaaggggcaagggcagtaggggagaggtcagtgcgggggggtccctggttgattttgctgcgatggcggtcaaccaggaaccctgtactggatcttcccataaactgtagcgggtttttcggaagctagtggaacttttgtaaaggcctcgtagtgttgccctgtcgcgcttcctaggtagaggtgtatgggattcatgaccccttggcagatgggtaacatgacttgtgggtaaagggtacaacctctgcagagtgtaaaactggtatactagccgagctcacggtcatgagcagctcaggactctctgatgtttaaattatggaacttaaattcaattttgtcatttgcattgcatgggtttgttattaattttgttctattactttacttatggtttggtatttacttacacttagtaactgctaataaaattttgaccaactacttaaaagcaatgctcagctttaacccctatcatttgatcagccttacacttcacatgagctcccacctttggtgagttcatgtcacattattccccacaacttgttgagcgatgatcatgtgtgagctcacccttgctgtctcacacccccccacaggagatgatcaggtggttcaggaggagccgcctaacactgaggagttcgatctgatctaggtggcgtttcccagtcgacattggcgccgacgatccttagttcgttttatctttattatgttattttgtaataagtcttccgctatgtaataaattctctgatgttttatgacatttatctctatacactctgttattatatatgttgtcttcttggcgcatgtatgagatgcacctggctttgttccttaaagccgggtgttacagaagtggtatcggaggaaatgttgactgtaggacgagacctagatagaaatggacaaaccctctcttacttaccttactctgattcattctatacttacctcatcttggtcttgtctcaccttttgctattctactctgatcattcttacctctctactctaagacaagatggatttcacaccttggaatcctacaactatgaatttttttgagataggaaacctaagacgaaattaaaattattttctttattaaaaatgttggttgattgttctgatgattaatgcttgatttgcttctttgattgattgaaacattatagtcgggcatcttagcatgtaccaccataaggtaatgtattagctttagtggataacacactaacctacttagctaataaatcctccgtagtaacatttctcgtaattactcgccttgtctacaattcttcctttcttaccctatatttccaacccagatggactacccctatagtgttagaagagagcactatagacgtgatccttggtatgtcatggttaagaaaggcaaagacagtttatacattgcgctaaggaaccgtagaactcaccagttccaaaggacaaagttttgaagttgaagttgcagtaactaccgccaccagactagcggcattcttagtagatgagaagtttgttggtgtcaacatccgggtggttagagattttccggatgcctttccagaggagttgctagggatgccacctgacagggaagttgagtttgttattgatctcttacctggaaccgcccctatttctaaacggccgtataggatgtccgtagaggagttgaaggaactgaagaagcagttaactgaattacaagaagttgggtacattcgtccgagttcctcaccttggggagcaccggttctgtttgtacagaagaaggatggatcgcagcggatatgtgtggattatagatctcttaatgatgttacggtgaagaacaagtacccgttgccccgtattgaggatttatttgatcagatgagaggagctagggtattcttgaagattgatctccgatcgggttaccatcagatgaggattagaccatcggatatttccaagacggatttcttgacccgatatggattatatgagttaactgttatgtcatttggactaactaatgcaccagcctattttatgggtctgaagaataaggtgttcatgatctggacagattcgtcgtagtattcatcgatgatattcttatttattccaagagtgatagtgatcatgaggaacatctgagattggtgctacaaaagctgcgagataatcaactctacgctaagttcagtgagtgcgagttttggattgacaaggtgccattccttggtcatattatttctaatggaggaatagcagtggatcctgctaaagtgaaggagataatggagtggagagtgcccactacagtttcggagattcgaagtttcttgggactcacaggatattatcggagatttattgaagaatttttttttaagattgctaagcctatgacttcgcttttggagaaaggaagagaatttaagtgggatgagaagtgccaagacagttttgatcaattgaagaaaagattgatgtcgccgccggtattgattatgccagatctggagaagggatttgacatttattgtgatgcatgtggccaaggactcggatgtgtgctcatgcaagaaggtcatgtgattgcctatgcatctcgtcagttgcggaagcatgaattgaactaccccactcatgacttggaattggcagcggttgtgcatgcacttaagatttggaaacactacattatgggaactaagtgccaagtatacacggatcataagagtttgacgtacatattcactcagaaggatctcaaccttaggcaacgccgttggttggagcttattaaggattatgatttggagattcactatcacccgggcaaggcaaatttggttacagatgccttgagtcgaaaggagcatgttcattcagctgttgttgccagctacccgatgagattgttgaggatttcatgagacttaacctggggatagttgctcacactgaaggagttactattgatgtggaacctactttggagcaagaaatccgcaaaggtcagattggtgatgctaaaatccaggagatcaaggatcttataacagagggtagaggcccggagttcacggaggatgaacaaggcacgatatggttcaagaatcggatctgtgttcccgatattgatagtcttcgggaaaccatattgaaggaagcacatgactcaatttattctatccatcctggaagtactaagatgtatcaagatttgaagcaaaagtattggtggtatggactaaagagagatgtggctgcacatgtggctatgtgcgatgtgtgtcaaagagttaaggctaaacacgagagaccaactggactattgcacccactaaagatacccgagtggatgtgggaagacattggtatggacttcattactggattgcctcgcacctcgaaaggatatgattctatatgggttattatggataggctaactaaagtaacccactttattccagtgaagaccacatattctggagccaagttagcagagttgtacatggcacggattgtctgcctacatggtgtgccaaagaagattgtgtcagatcgaggatcacagtttacctctcgatattggaagaagttgcacgagtcattggatacaagattaaattttagttcggcttatcatccccagactgatgggcagactgagaggaccaaccaagtactggaagatatgttaagagcttgtgcccttaaacatggtggaagttgggataagagtttgccgtatgcggagttctcatataataatagctatcaggccagcctgaagatgtcaccttttgaagctttatatgggaggaagtgcaggactcctttgtattgggatcagactggagaaagacagttctttgggcctgaattgattcaagaagcagaagaacaagtccgtataattcgagagaatttgagagtggctcaaaccaggcaaaagagctatgctgataatagaaggagaccactggaatttgaagagggagattatgtgtacctcaaggtgtcaccactgcgtggaatgaggagatttaaagttaagggcaaattgtcccctcgctatattggaccattcttgatctttagaagagttggggagatggcataccaactcgagttaccggatagtctatcggatgtgcataatgtgttccacgtgtctcaacttaagaagtgtctccgtgttcccgaggaacagttacccttggaagagctcagtgttcaaggtgatttgacttacacggagtacccgatcaagattttggatacattgactcgagttacaagaaataaggtgataaagatgtgcaaagtccaatggagtcaccacagtgaagatgaagcaacttgggaaagagaagaagagctccgtatagattttccccaccttttccctagatcttcctaaatctcgaggacgagattatttttaaggggggtaggatttgtaatactcaaaattgtgtacaaggaatatatagtgttttcctcatttgatgtgtctcatttgcatcataaaaagagcatacctgaaatttagagtttaatccaaacagatgaaaaaaaaatgcatcatgtggagtttttatgttttgtgcattaataaaataataaggataatgataataaaataataattctcaaagatggactaaaccctaaaatgaaagtagggttttaaaaataagaaagagagaaaggtgatataaataatatatatcattacattcctcaaattggcgcttttcatttcgcaatgtgatttgagaataaattgcacaaattcatatttaaatttaaactcaaactaaacttagaaaagaagaaaatagaaagaaaagataaaaagaaaaaaagaataaaagcttacctgggccggctaacctcaattcggcccaatgcctgtttccttccgcgcgcccaacctgcacaacggcgccgacaggtgggtccagctcgtcagttccttggcgcgagccagggaatgtttgtctcgccgacttgtgggaccctcgcgtcagtttcgccttcatcctaacggtctggcgcgggtcttacgcggatggcgccggaggaatcggcggcgccgttctgaccggcacggccctcggtgcatatataccgaggcgctctatccatccgagccgttagaaatcgctacccacgacctagtttccctgtgcgttgtgcttcccatcgccgccgccgacacacggttgagcagggtgccgccgccgccaaaacctcgcaccatatcgccgctccccctgttttgtgcccggaggaactcgcggattcgtgcgcaacctcatcgccgactattttggacttgtggttggctcgggccacctcgattgctcaccggtgtcccagctccgcctcggatccgctttgcaccgtcgactggccgcaacacggttccaattgccggtaacaacttcccctatgtctcaccgtagctctgcatttgtatagtttacctacaatcggactctggggccctgaattgccgtatcgggttactccggcgaggagcgccgccgtagcgcgtgcggcaacctcgttgtcgtggcgtgtggttggggatgagagcctagccgtcgattgagcaatcaagggtgcaggttagatcgggagggtggatcaggccagggtaaatgcggatcgtccgatcgcgatcggacgggtcggggcgttcgcaggagattttaaatccaaaccgtagatttgtaatcgtgcggtgcctactgggtaccgattcgtttcgaagtcggtctaatcgtagccgtagaactttaaaccaacggccgggattggcccgtaccccttcgcgtgtcaacttttctaaagagaccccgaggaaagtagtaatcaacccgccatccactcgtactgtgctctgggtcttagaaattttacactgcaacccctgatctctctggaaaatgaggcccagtccataactgtattaaaatcagagaaaataaattataaatggatttttaaaatgaaaataaatactagaacttgataactccataacgaatcaagcttgattcttccgtnnnnnnnnnnnnnnnnnnnnnnnnnnnnnnnnnnnnnnnnnnnnnnnnnnnnnnnnnnnnnnnnnnnnnnnnnnnnnnnnnnnnnnnnnnnnnnnnnnnntatctctgcatctgaactgcactacaactctgcatacagccgtatcactaccaccttcacatatataatttttttcaagttagatcaacaaatagcttcacattctacagcccctgtaggagtcctcatactaaaaattttcagtgaaatttataagtctcacatatgtgcaatgctgcatcagagtaagaatttactgcaaaagtcagttgttcgaggcaaaaaattgacagtcttcatatgtagttttgatcattgtgaagagtatatattgcagtcattgtaccatggcacggtctataatacagacaattatcaaaagtggagagactacaaattaaacccttccaccacatgataaagttagattagtatagccctacaggaggcactatacgggaacataccaaagaactcacataaggacatgatcaaaagatagggtccgctgaggcatttatgcaaacagacctccgtctagcaacgggaactccatagtttcattgctaaaatctagatcatcataccagttattctgcagtccaggtagtaccattgtatcattgcactggattaaatcgatgctattcagtcctatatccccgaaggagacgccttgaagttgatagccggacagttcatcaggtagacaagtcaaatcagtgctgcataatatacttgcctcttctgaagtaagcaaaatattttagtataagacaggataattatcgatcataaatacatatgcatgcttataatataattttagctgatagtagcgattgtttgcaatagattttatcgaaaaacagaccattcagtagttatagattctctaatatgtcagccaaatgaactaagaattctgtccagatgaaaataaaagattaaagatgttctcaaagacaaataaaatatgttcgttgggtaattcactgaaaagttttctgctcccgaagccagctatggtgtgacaaaaaatatagcaagtaaatagactccactatgcagcgctataaaatcagaagacaagatgatacgacccaacatgtaatcttgtttgttgcaggtctttactatgactgcaactttgaagtttggtattcatataatcaataggctcaacagtatgtcccttgtaaatggtaggatcagagtgcttctgctatgtcatcttcgacacttcctggtgtttgcaacaaacaaagtgcttctatgctgtgcagttcttgtttcttacaagtggtgatggtggtagtggtctggtctctgtgtgagcattggtctagaggatcgtgaagctatgcggctcttctttcatgttcaagatgaagttcatgaagcttggatcgaatctggatacctttaatgatgatggcaatgaagtcaggtgatcgatcgcttcttttaatttggcttttaccttgtttctttaatgttgcctttgaatccttgtgttgttcttagaatctgactgatttttatttatttcaattataaatggtatgatctgactaagaaattcctagacgcattctccctgattgctgttactgttgatggatactagatgattatataatatgtggtcaagttttcctaataagctcagttgtgcagatcgtttgtttcttcttagttagagtgaaattatttactttatgaataactagatccatataggatgcggtgatgttatttaggatggagggattcttatcgctctttggtgcttctccctataatcagtgctgaataactagatccatagtgctgataaatttttggtgcttcttcctataatcagtaatagcatactaaaagtacctttgaactagaaaccttatgatattatttttccacaataaattcttggtgctactccctgtatatcagaggttataatcactcctgagcacaacgaagaagggatttacacgatcagattctacattcaggtatttattgtttaaaccatttgaccgataagtttgaggctgcttctcatgaaacatttcctacaagctttatgaaacatctgctgataaagctttgtttcttaacatgtccagcgaagctttctttcttaacatgttgctattgtgtccagcgaagatgcaggctatctcctgctaatgttgctgccgaagaaatgaacttcttacttttatgtagaggcaacacttactaatatgatgctcgaatttgcaatgaatgatgtgtgtgtgtgctatttttggaccactggtatttaaaactgacaaccatgaagttttggtacacatgaatcccaagcaatttgtgtaaaatatggctaaacaaaacattgatgcctgatttatgatccagctgattttgatgtcaatttattatacatgtatatatctttacaataacttcttatgtatatggttatattgcaaatactattgtctctttactgtctcccgatggggcgtccgaatggatgcctcctcttctagtaaattaaactcgcccggcctctttcgagattcccatgcatgacatgattactgactagtgcgtcgatcgcacgtccactccagaattaggcaccgtactactacgtggccgagaagcagtcaattaatttgttccttcaaagaacgacggtaaatataatatatacaccaccccacccgactttttttggataaaaaaaataaacgcacaccagaccgatgatcgatagtacgtaataataataatcaacagcacgcgcggcacggcaaatcagcgacgcatacgcatagcctctcttcgcctttataaatacttcgccaccgtctccatcctctacacacacgaaaacagcaccagagagagagaggacggcagtcacagtcaggcagtctgcaggcacatccatggagtactactacgcctaccagcacagcaacagcaacagcagcggcggcttgagctcaaaggagaagaggccgccgctgaagcgggggcagctcaagcggcagatcgtgaggaccatcagcaacctcgtggtgccgaggcacgccgccgtcgctgggtcgagggagaaggcagatcgcggcagcggattcggcggaggacggagctacaactgatgatggatctctcggagaaggcgtgatcagagatacgattcgcagcgccaggtttgtgtgtacgtactacttgccgatgccgatgcaaaagcagcacgtagcgcatctgttcttcttagagcttagtaatagcttaattatccttgtttttccccctgttgtacaaaacaaaacttgcaggcttttttagatggttgatagagttttgttacataaatgtaatgttagcttcatagcttgtgtgaggtcatgtaaagttccttttgtataatacgtacatcttgcgaagtgaaagcttgttacgtttacattgaagagaacgacatgtttcacaggggaaaaacataaatcagggtggcggccaccctctctgccaagtcacagcatttgttctcttgtgttttgtttccatgctgatctcgatcaatgttgttctgttaacgtattttcccggtaatacacagatagtgtggataaacggtacaagacataccctatccgttttcaccaacgtctatatcagggttcagtggtgttattaacgccagcacggatttcttcaattgaaagcacgcataaactctaaatgatatgataatttacaagaataagggtgtcataattgcccacaattctcatcttttttctcacagttcttccaatgcatttacattgggaggcagcaacggatgggcaaccatatataacttgctcattttctcctcaaaattataaaaaatggagagaaatgacatgtaacctagatgtggtggcaaaaagaattcggggaaccacaaagggaaaggggagaggagggggggaccagtatcatttcaaaacttagccaccctcagtgctgtcaccaactggcaccgtgtgatcagatcataaatactctgatattacttacgtggtggcgaagatatttgggctgggagcattgtgcttaatgcttatcaatccaattttatttcttgcatctgttcgtggtgcccattcaaatcgtcagtgactagttggacccctggcaggtcgttgtctttctcaggtgtctctgctctcatcttgacatctgctttgggtgattctgctctctgctcactatttagatctagtgtttctctatgcttctcatcatttgtgttggaggtttctaccatttcatcattatttgtagactttgtgttggtggagtcatcagcgttgttcggtttttcct

SEQ ID NO: 3718 - DNA, 5715 bp, Sorghum bicolor
ccgcgacgactgaacgtctggacgtatccctccgtgtacagaaaatcgccggtgccacccaccagcgggtacaccgactgagtcaaacacctaagtttatgacaaattgagcgtctctagctagcgccaataaatcagtaaatcaccaatgcaaactatgtatgcttgtatatataagaaaaagtgatcaaattattgttcaactttttattatactctaagattagagaaagattcacgccatgttcgaaaaagaataaaaatggccatacaggtaggccgttgcaaatagctatacaattcacgctttatgcggaaccggagcgtagtgagcgtacggaggccagtacaagtgaagctccatcttgtacgtcaccgtccgtccccgcaagtccaacggcgacgaccggacgtatcctagcgcgtacgcgaagtcgccggtgccaccgaccaccgggtagtctgatggcttggtgttgtaggtgccgccgaggacggagacggagccccggtggccgcggtggtggaccgtgatcttggccagcgacaggctctgcagcccgtcgaggctggtggtgatggagctcccctccgcgacgccggccaccggggacttcctgtccgcgtgcaccgtcaggtcgtcgcggaagacgtagatggtgccgaagggcgtggtggtctggctgacgcccgcgcccgcgacgccgtccaccacgatgtagccggtcttgttgatggtctcgtgctggtacagcgtgaagctcagcgtcttcccgcgcgcatctcgtcggctctcggtcttgttgtgcgacgtcgacgtcgtcgcagctgctacaggagggatatgaaactggaggccgtgaagaaaggcgagcaacaggcagagcagcaagctcgttgtagctgccatggcaaaacgatcgaaagatatattgctacctgacttagcttatcgtggagtttggagctttatacactgcagcctggcagccaggatggactagcgagctattctcaaacagctgatattgacgaattaaaggttggtcttaaagaaaagttgacggatcgagacactggacattcggtcgccgtcggagtaaacctgatgacagactttcggtggaagatcgttctttctctgtctgaactctgaagacccgtgacctgatcgacgtcctgagtccacacctcaactgcggtctgatgcacttgccaccggactgccgtggcgtatatgccagggcgttcgaactctttcttttcatcttctctctctttttggttttttttttgagcaaattctctctttttggtgacaggaggttttcccccccttgttagaacagtgagaggagctcttttcctagacccaagcagccttgtgggctgtggccttgctggagaccaacagaaactttcgtctgtgcctgtgtatggcctaggaagcccataatggaagaccggcccgatccaagaccaagattccaagacgcccatctcacgaaatccgctttctctcaatgttagcgaccccacccgaaaatacgccgtcgtgcgtcattgcttacacgccagtgaccgcagtgcagagtgcagacgcgggccggcaaaccgaatcgattccggcgggggccggaagattcgtattgctgcgcgtctagactctagactttggaccccgacaccccgtccccgtgcgaccaacctaaaaaattttcaagatttcctgtcacatcaaatcttgcggcacatgtatggagcattaaatatagataaaaataaaaactaactacacggtttgtctgtaaatcgtaagataaatcttttaagtctagttactctataattgaacaatgtttgtcaaataaaaacgaaagtactacagtgtcgaaatccgaatttttttcagatctaaacaagaccccaatgtttttcaggcgccctcggcgctgctctgctccccacggaccacggggcgccaccacaaaccaaacgcgacgcacgcgcgcaaaatcctgcgaagcgagcgcgacgacatcataatggggcagagccagggcagaggaagaaccaaaccagagacgcggcacgcgacgcgggagggcgaggaggaagaggagcagcatcagcagcgcggcgacatcgcgaggccagacgcaacagccgaagagaaggggcagagtcgaccgccgggagtcccggccaccaccatggacaccttcttcctatcgcacggctcgcccacgctctccatcgacgacaagatcccggcgcggcacttcttcaagtcgtgggtgccggcgaaggtcgcgggcgaccaggcaccgcgcgccatcctcgtcgtgtcggggcactgggagacggccacgccggcggtcaacgtcatccgaggcagcaacgacaccatctacgacttctatggctttcccaagcccatgtaccaggtccgctcgatgcccacctaccacccgtctctgtcttcaattccccgcgaatccgttgggaagcctcacgtttaagatgacacagagcttcaaaattggggttaggacaggcaacattgcgagccatctggatttatgggcgagttcctgtcttcctctgcgaagggggaaaggtcaaaattggccgatacagttgttcgttagagttcgtctccccaattactttggattttatggtcttaccagttgatcgttatagttcgttgttgaaatgcttcttgggtaggcgtagacaagatgatcgatggagtgcttttgagttaccccatcagttcatatgatctatgcaggtgcagaaatggggattcttgtcttgaatcatgagatcatgtgcttatcttatctgaaacaaggatcactagagccagtgaccaatgttctggtgaaatcaacatgaaacttaggtttcaaaaatgcagtatcatagattgataggcagttggtgaaaccaacaaggatcactagagcttacggtagttctagaaaaatggaagctgcagatgcagacatctagctgacctgaatttcaccaaccctggtgtcccatctcgtaataggctcgcttgtcacaagcaagagccagtgatgtttgatggctcgtgcacatcgaagtaggtaaggtgcgcttgccactagcctttacctataattgactgaattataaggtgtacaaatggtacgaatatttttgtgacattattcgagtcagaaactgtttagttcaatatatttaacattcgataccatatccatatccgaatacttaaataacaaatttatgatgtttatattcattcgtatcctatctgacagctgatactatccatatttaaatctgaattcaagatatactttatctatctatatgcctagtgaagtctgtcataagcagatcgcagttatctactgttactactatactttatcatctgagtttttttcttcgaaagatccgttaccaacttttgttgatataagagagaagcgtagttacaaatgtcatatatgacacaagctacccctcatcggttttgcctgggactcagatttagagtccctcgccacccctgttacattattatctgagttgcataacaatatatcatggatatggttgagacttgaggtatcatatatgcatccaggattaagaattaggtgccctctaggtccccaggcttgtttggtctgatgtcaactgaaatttgtggtttcatattttatattgtgcaagcttagttcagttgaaataatttttcatgatttttaggtgcttggcttgtttaggctccaagtttccattccagtttgacacatccaccaacttttttttgttagactaaacgacatccaccaacttgtatctttagggtttactactgattggtagcctatgcttctagataacgtaggctcaatgaacacgtacttggttggtagctactccgtattacaatactttatttggaataacatgtcgcgtgtcattgcaaatctcctcgatgtttattctttaattggtgacacatgggaatgggactcacataccagatcataagcagctgccgttttttccccccctaaaatgtataaagttctataatttctgcagcactagtgctgattagctgatttgctatcatatcacatctctgaatgaatgaaattgctaaactttttatgcttgtctaaacacaatgtgtaaatttgcaaacaaaaatgttggcagctgctgcaaaaaagatcgaatgcagcagctaatgaaacactggttgtggtcgatgatgtttgttctagctcatcattcggtcttctcgacatcatgcttgaattgaattgctctgaattctgaagtttccctgctgatgatcctgaataaagaaactcctttgtcccactgatcagctcaagtacccggctcctggcgccccggacttggccctgcggaccaaggagctcctggagcaagccgggttcggccccgtgaaggaggaccacagccgcgggctggaccacggcgcgtgggtgccgctgatgctcatgtacccggacgccaacatccccgtgtgccagctatcggtacagagcgaccgcgacggcacgtaccactacaacctcggcaaggcgctggcgccgctgcgggaggaaggcatcctcatcgtcggctccggcagcgccacccacaacctgcgcaagatgggcccgttcgacgcgcccgtgccgcggtgggtcgccgagttcgacacctggctcaaggactcgctcctgggcggacggtacgaggacgtgaaccggtacgaggagaaggcgccgcacgggagggcggcgcacccgtggccggaccacttctacccgctgcacgtcgcgctcggcgccgccggggacgccgccaaggcggagcagatccaccactgctggaccaacgccacgctctcctacgcgtcctacaggttcaccaccaacagctgacgcgctcctgctctgctgtcggtggaactagatgaacgccggccaccgccccgccacctgctgaatttcgtgggaagcatccgtcgtcggcgtgcgtggcagcatatagcccatatacaagcacgcttgtaattgtaaaaactgtatccctaataaagccccgtgtgccgttccgttcgcagtagatatgtgtttgtcgatgctttgcattgttcagcgcagcagcttattccatcgtcatttttttcaagagttcctaatccccagtatcatttcatcagcattgtcggtctcgaagtggtgcatcatgtcacgtgtcttttttgccttttccacccttgtgcttgcttcgtgaattgtgatcttctctgcacccatcacctcaactgggccatatactttccgaaagaccgatccagcccaattgaacattgcctgatgccgtgccgtcatccggcatggcagcatgtgacacaagaaaggaacagattggtttgcctagcttgccaacatctgctcatcacttgccgctgcactcagccctcagcactcagaagcttccacgagctgctattgcgcatttgggttgggccatccggccatgaaacatgcaacctgcaaccagcaaaagtcgcttggcttctctcgcccttagcttctcccagctgaggcaaagccttcgtcccttgagcggcccgcgaaaagcatgtcgcatgcatgtgcccagtggtatcgtgct

SEQ ID NO: 3719 - DNA, 2713 bp, Sorghum bicolor
  misc_feature (1806)..(1905): n is a, c, g, or t
tagaaacattaaaaaattgttgagacatacacttatatatatatatcatatttagagatgtcatcatatatgtttgacctccattaatcaaaatcgctagtttggcctttgaaggtgtccaccaccgacacgtgtgtgtgtgtgcgcgcgcgcgcgcgcaagagaccactgtgtgggggtgggccacatcgtcgtcatggggtgggacgctgaccaccaagatggacggggggccaccgccgtgtgggagggagagggtgctgtcactggataggggttgtcgtgcgccgctgatcttggaaggagtcgtcatgcgccgcccactgggaatgaaatgcgtcgtgcactgtcgttttgggagggggtcaccatgggaagctgcgacttcgggtgaagaagcgcgcgcagggaaagggcacgcgcacaaggggaggtggcaaggtggtagtggcgcacagagtcaaatccttctaatattgttttgctagtttttaggtgtcttgatcggcgctacaacctaagttctggtgtagaaaagatttgtctattttagagtttttcttcacattaaatctattgtcgtctcattaatttatttagttatcatcctacttaaaatagatagaagagtaagggcctgtttagatgcagccaaacagctaaaatttttggagaaatgagcactttatggaagaatggatctaaacaggagcttgtaaaacttggctgtaaagatttggaatttggaacctttgagcctaaaactgtgtaaacttgcttagggacccgtgtcatgtgtcttgttgaccaaaaaaaatttagaaagcatctaaataactatttgaatgtaaagttacagctaaaagttcaaaagttttgggatataagatttaggatctaacattaatatcatacggtgggactgcgcagcctacactactcacttttttttaaaatatttttgttctagtgctttgaatcaaactttttactttttaaaaaataggtataaaaaatattaatatttataatacataattattagattagtgaaaatattttatattatttttatctagagatataaatattgctaatatttgcataaatctaagtaagctttaaccggcacgaatactaggtacacttatcttagaaatcaacctgaccaattaatggctcagaacatgggcaaagcacgcgacggccaccaaccaagaaagcaatcagagcactgaacaatcgagagaagcaattcaggcgttgtttagttcacccaaaaattcaaaatttttcaagattatctgtcacatcgaatccatatacatgaagctttaaatatagtcaaaaataaaaattaattaaattacgagataaatcttttaagtctaattagtccataattggataatatttaccacaaacgaacgaaaatgctaaagtgcccccaaccaaaattttttgcaaactaaacaataaaaaatcaaatcagcgccgactgatatttgattgatactcatggcagcaaccaaagattacactgaaatcatgatcgattacaagcagatgtactcgcagcttgatatgccagcatctggggaggatggcaaggagataggaggaaaaaaaaagaaaagaaaagaagagcagatcttgatctgaatcacgccggcggcggcgcaacctgccactgcatatcgtatcctgccccggccccggcaacggccggctcggctactagcccgcgtagacgtggatgccgacggcgatgaggaagatggtgatgagcgcgaagtagaggacggnnnnnnnnnnnnnnnnnnnnnnnnnnnnnnnnnnnnnnnnnnnnnnnnnnnnnnnnnnnnnnnnnnnnnnnnnnnnnnnnnnnnnnnnnnnnnnnnnnnncacacacccagcacgcgcagcagtatacatcatacagtagctagctagacagcatagtgatctggaaggcagaaggagacgaccggccggccgggatgctggactgggcgccggtggtggtgggcgtcgtgctcttcgtgctgctctcgccgggcctgctcatcgagttccccggcctgcaccgctgggtcgacttcggcagcctccgcgtcaccggcaaggccgccaccgtccacaccatcctcttcttcgccatcttcctcatcgtcaccatggcgtgcaacctccacatctacaccggcgcctagctagctagctagctagccggccgtgtacctgcatgtactatgtcgtggccagctacctgagctgccaggcccggccctgaaggcgggcaaacggggcggccgccctgggcccccaattaaataggccccaccccaagtatacaaaccatgcaatgttttttaaagtatttgtacataaattgttacatatgaatattgcttttgcatatagtgttaagtatttatgaatttatatatacaagtactattctacatctccgaactgttatactgaacagaattcagtatcgtttaatattttgcgtttcaatgttgttcagttttttgtagtcctgggtgtagtactgaatgatatttaacgttgttcaatattattcaatattttttctgtttagtcttggcttacgatgtagaatatttaggcctagcgtaactaaactattttagctcttttttgtcagtgtgtttggattttagttactaaagtgactaaaatttag

SEQ ID NO: 3720 - DNA, 11965 bp, Sorghum bicolor
aaatataaataaaaatggagaacagaaagaaaaaagaaaaaagaataagaaaaaaaggaaataaaaaaagaagaaaagaaaacatacccgacttcctacctggacgctgccgagatgcagtgcgggcagcatacgaaatcccgtacatgcaagtgggccacgcgtggacttaatcaccgtacaagagcatcgcgcgggaagaactagcggcaaaattgcgctggaactgttcgccgcatggctcgtgtccggccgttcggacccgaaaaatcggggcgcgatcccggcctcggctcccgcccgctcgggcggcctcacacgtacgtgctccgtgctcttgtttatcagctgtttgaccttgggattgggagggccagcggcgctccgggctctctgccggctgccgcgccgcccgtcgtctcgcgcgcggtggaagccggagggtaggaacccggtttgatgagtcagatgagcacggaccgggaccgtcccgttcggccaacctcacagtccgtgggagacacttggccgttgccgacagcccgtacgacacagacgatggcgaggtcttcttcttcttggagtattttcagcgtggccgacgtgtcggctcacctgcctccagctccagatcacggcacaccacgacaaacacgcgccgattatcatgagatcagtctcccgtgacacgcatgcctgattgacttttggcatgcatatcgtgtctatcttgtgtaggtctttttagttcatccaaaaattaaaaacttttaaagattctctgtcacatcgaatcttacgacacatgaatagagtattaaacatagataaaaataaaaactaattgcacggtttacctgtagatcgtgagacaaattttttaaatctagttattttatgatcagacaatgtttgttaaataaaaataaaaatactaccgtatcaaaatctaaaaactttttaaatctaaacaagaccttatttccctctcgcttgacttaacgaggttcaggagtcagcacagatgtgtgtgtacgtatttataaagatactaggtcggtggctgcagctttataacctttttattttaagcagccgtatgtatatatagagtagggtaaccgtgtagtacgtatttggctggactatttagttatttagttagtttattattctaccgtccacagcgcttattacggcatcatcaacacacacagacatagccaggctgtgtacattatcatgcgctggtaattaatgaaatgaaatgttgcttgaacccgcggcgccatttgtgcagaggattcacgagaccaattaacgcaaataggaaaaaaaaaggtagcaaaagagttagtgttggcctgaatgcagtctatttcagtccagctccagcagcatatatgtctgccggctggcgagatttgtggtggagacgaccagcgaagcataccatttttgattcaacaaccggcgagccgagccgtcatctctccacgcctgctgcctggacgaagcatgtttcgatacgtggtacccctacagatatacactccttccactacaactaaaatactccgtcccaaatccctattgcagcggttaggatcacacgtgggcccccacgtttcgtcctccatccagtgggtcccgcgctcaggttcgcctcagcacagacgggggacgcttgacgcttccggttcacgtctgcggtctcacgcactcttcttctggcttcacaaccacaataaacgcgcagcagatctgcccgttaccacaggcaagcggccgcgggggcaggggcgacgaaggagaaagagggaagtcgtaactgctctcctcttccgtttcccatccatcccattgacagcacagcaacagcaaccggtggtaacgtctcccttcccgtcgaacgccccacgcccacgaccgaccccgtcggaccccagcgaccacaagggaacaaagagccagccacaagggaaaggaaagggtcccttcccgagtggagtgctgatcgacgcccccgcctgcgcctgcgcctgcgcctgcgcctgcgctgcgagagaggaggagataaaattcctgccagtgccacactcttcctcttccggcggtgccagtggagaaagcggccgcaagcagggtagggtagggtacgactaggagcagtgcagtgcagcacagtacagtacagcgcagggggtcaccggcgtctcccaccgtcggtcgtgcgtgctcgaccgcctgctgggcttggaggagagggcgccaagacgagcacaaggggaaggggggctcgctcgctcgctcggcggcattcgccgagggatgacggcctgccgtgccgcgccggcggttaattaggccgaccacaaccggcgcgggccggcttcgcttcgcttcgctcctccaagattgctgtgtctcttgttcctgtcaccgcaccgcaccgaggtatgtgccgtgccgtctcatgctcatgctcttcccaacagttcggctattctccgcttccaacagttcgggttgcagtcatcagatctgcttcaacgcaccgctccatttctccctgcttccgtgcgttttttttcctggctgcccgctgatttcctttcgactcttctcgccggccgattggaatggggagcacaattttgcgggcattccaattgaaccacgagtttgcttgtctttccgaatagaccagcctccagttactagtacagcgctgagcgctagagaatttgctactgcatacagccatgtatttccactgcaaattcacacctttttcttcttctttttcagcgtgctcatgtatcgtatcaactgagtttcattacatagatacgtaatagattatgaaaatgtgttattattatctaaaaaaaaaatgaaaatgtgctatttgtaatttaccggtaactggaaattcccttgtattttgacggcgggagtacatgtaccgattttttgaggggggaaaaaagagagaaaatgacagcgcagcaaatggtttcggcttccattgctttttaattttattactatattactattataacgcctttccctcttgagctgacaacttaattaaaatcgacaacttggcctgcctaatgccacctttaaagatttgctgttgctgctataacctttcttggtcccgtctcgacatgtccaggatggcttaacgcttcacacggacgtttcctagtggaacgaatttatgcaaagtttatttatgacccttttcagctgtcatgccttcacgcgtcaaattccgcacataaaacctggtagcattagcatcgttattattattattattattatcattattattattattactactactactactactactacttactattgttgttgcgtagcagtatgaacttaacttatttcattgtccgagctggaatatatgctcggccgatttcttttggctctgagaattcaaatcgttgattctattatccctttgcactggaagctgctcagctaggatcttttgggtttgatgttgacatgtacttacaccaccaagttcgttaatacttatccattgtatatctcgtagctagcctataggaaaggaataggagtttgggtttgctcacagtaggatcactggcttcatttgtaaggctgcatgctaccaagccttttcttttcagtttctcatgaattgctgtccgcccgcccgtgtcctagagttcaatcatggtctgtcgtgtgataacttagaattctgtttcactgttcttctgtgatgctcaatcatgaatattgcttcaagggttggttatgccaacttcttacttctattcactgttttcgctgactcatttctgtgccgatttgtcaatattttttgctcagtgctccgtacatctggcatgacaatgactctgttcatatacattgctgataggttgcatggttttctaatggaagtatggaacgacatacgttaaactttttctatggtagtttatgccatcactctcggtgctcaagaattcaatactcattgcagacaaagttcgattcaacttgtgcttacctagaaatggttctgtgttgttttgtgtcttcggagtgattttgtgttactctttctacagtttaggctgactcaccacatgcggtgtttgccactcgatagggtcatcaattcttacattttgctttgtttagaattgtattattgtggcatcatactgtctagtggttaatgattgtgttcttcctgacatcatgcagataaattcaattggatttcctcccaaactatttaagggacaactatggctactatccaagatataggactctctgcagctatcaacatactgggtgctgtagtgttcctacttgcatttgctttccttcggctgcagccaatcaatgatagggtttacttcccaaaatggtacctcaaaggcgcaagagagagtccaagtcatgggggtacatttgtccggaaatttgtcaatttggacatgcgttcatacttgaaattcttaagttggatgcctgctgctctcaaaatgcccgaggatgagttgattagccattcaggtctggattcagctgtgtatctgaggatttacttggttgggtatgtgacttgtataccatgtaccgtagtcatgttttagtgcttttgtttgtcgtgtcagtttcactgtcaccagttgcacctgaggtggggcattattcactaccagtttccatcaatggataattaggtttccattggcctaggcatagttgtaaatagagcattcgttcacaaatgggcaatgaacctataatgtgcactgattattatattacccatctatactccagacacatgaaaaggtaggcaaaagaatgaactggtgctaccaactttattcctagttacattggctaattcagtgctaggtctttgctctattttgttatgtcagctactctatattagatcactagtttgccaattatatgtagcctccaggatatcagaaaaagggaatttactcactttgatatgtctatggtttatcagtcgttttacctactcaccaagtgtttctgttgaatcaaaacatttgtcgttccgtcttactttatgttcctttggttcactgattgacacccatctcattttttctttacatgtacttatttactttgtttcaattgttgcagacttaaaatatttgctccaatctcagttctagctttcattgttcttgtccctgttaattggaccaatgatactctgcaattctcgaaggtagagcacagcaacattgataagctctcaatatcaaacataccagttggatcaaaaaggttagcacttgttttttttgttttggaatgtatctacagctctagatgaagcttatgttttgacaccatgattcttcgtggaagtgttggttaccgcctactgaggctaattatttatgcatatgtcatgcatgttaccagagtttttcaatacattatgtggggttggcttagatagaaggcactgcttgtgaagggagtgctgggcatttccctgtatccttttccatttataggttcaggaaagttgtaaagttgaagtaaagaagttatatggatgtgactgtgcaatatgatctactatccagcctctgacagaaactgattttggagaggaaaaatgtggtagattgcacatgagagaaaacttaggagccaaagttcataatgtagaataaataagacagatttgaacttaaaagtagttcaagttcaagcattagatttagggaaatgggttcagattctaaaatagtttcaaattttacaactcaatacacctggtcattcaaattagggattttagttttgagttcacattgactgctcaggagccctaaccaatttctctttgtgaaggtttatagcccacttggcaatggcttatgttttcacattttggacctgctatgtactattacgtgagtacggaatagttgcaaaaatgagactgcgatttctttcatcagagaaacgcagaccagatcagttcacggtatgactaacctatgattgaattatgccttgagcacatagtgctatccagatgcttaaatgagttgaagttggtgtttgtgctgttactgcatttcacgtagattttgagatgagaacttgtttcttttttcccttgaactgatcaagtggattttgttgctttgattatgacttgttgaatgcacttactcaatgattatcttttaggttcttgtgcgaaatataccgcctgatccagatgaatcaattagtgagcttgtggaacatttctttcttgtcaatcatcctgatcactatctgacgcatcaggtaataattacataacatatttcatgaatattcatgtgatgatccttactttattctaagaatatctggattctccaccataccatcttcctggtttggtgtttcctgtttgtacagatgcatgtttcacaatttttggtagatccttgtttgcttcatttaagtttggtatatatgattcctattcagatggatttttatttgattccttgtcaagtatatttgaatggtaattttgaaatttctttttctgtaaaacagaatcagccatgctatgttagatttatcgcatgcacttgttttgtaggttgtttacaatgcaaataagcttgctaaattggtgaaagagaaagcaaatatgcagaattggcttgactactatcagctgaagtttgaaagaaatgcatctaaaaggcctactactaaggttattccacaaagacaaaccattgctgctgctttcctttcatatggtttcattatatttgaatcaaaatatgaacccttctttttgaaatttcattataattctttggaattctcttctgctgcagactggttttcttggttgttttggtacgaaggtggatgctattcaatactacacatcagaaattgagaggatagaaaatgaagtgagttaaattactgttcagtgcttgtcatttaatgaactacattcatcttaagttataattatgttattgcacaaatagaatagttggatcatagctaaacttttgtcacagatacacagttacactatatttcaaacatacacacattaagaaaagtatagttagctgtatatgttttttcggaagtggatttttggttatttagtgacataaaatgtgctactgaagtagccttttttttacttatgtattctgcatgctatatagaaccaaactttgataggactgccagtaatatatttgtctttcacaatgttacatttccttttctttttaaacaaaggatacctaccataaattatcagatttaaccccacatctaatattcaggaagcagaagagcgtgagaaaattgtaaaggatcccaaatcagttgttccagcagcatttgtttccttccgatcacgttggggtgcagcagtttgtgctcagacacaacaaaccagtaatccaactgtttggttgactgaatgggccccagaacctcgcgatgtgtactgggataatttgtctattccatttgtctcccttacagttcgaaggctgatagttgcagtggcattcttcttcctgaacttcttttatgtgatcccaatagcatttgttcagtctcttgcaaatattgaagggatcgagaaggcagctccatttctgaagcctctgattgaagagtacgtctactaacatgccataccttctccacaattttttttttcttattttcagttctaccgcagtagttatattgctggttttaaatttcccttatgttggacatatatgtttgtgccactttgcttgaaccataagttaggcgaaactacccacatgattatcccgtttaggtcactgctgccgcatatttttttctcaaaaacacaggagagatgcgcttcattatattaagaagaaatacagggtaaagaacccttagtacagcacacgccgacacacccttatctttatctcataagatacatttgcgctggtaaagaaagaaaaaagcgaccctgcacctacaacaaatcaactaacagcttgggcaggggcagtcaagcgagatagcccacgagcccctgtcattgtccaccattgacgctcaccagcagccaacttcaaggtttcagctatgttaggaattgctccatattgatgtcatctaactgactatttgatttaactgggacaaaacaaattagtggaagaaagttaacgagtaccaaattggcaagctttttctatttctcaaacatgcaggaagttgtttattatttgacttggagaatcatactcaccagtgcttgattagaaaaccgacctcaacccaaaaaactaatagccatctggtacaaaagcgaggagatgtgtgacacctcgagccccagccaaaacccataactgtaactcctcagtagcaacagataaacaccaaccagactaggagaaactccaacaaagacacattgattatgatggcaccaaattgactaagcccccaatttggcattgtttctttcacactgttatatgggcatgttcctcatctatctctgaaaccttttagttgatcttttttttttcctcaggcctactattaaatcattcatccaaggtttccttccgggaattgctctgaagatcttccttatattgctcccaagcatattaatgtttatgtctaaggttgaaggattgacgtcaatatcttcactggagagaagatctgcatccaagtattatatcttcatattcttcaatgtgtttctggcaagcattattgcaggatctgctttagagcagctaaaaagctatattcatcagtcagcaaatgagtatgtccttggctatcctttgatgccatgccattaataattgtcatccttgtattgtgtactgatacattatggagatgcattaacataattagaagttggcaaataattcatcatctatccattaggcttgaccaaaaaatttgagatgatcatagagatgcattaacttaagctttgagataattatatttaaactagaaatatttatcagataattatatttaacctagaaatatttatcattgatatataaaacagtgaccaaccattatccattactataagtagctaactaactattagagcagttgatatgtagtctttggatatagcacataggtggaagtatttttctggagctgtgtctgacagggtacattggttctacctgtactctgaatgttgcacaacattgcagaacctaggttttaataagttttccatgatgtacctgtactttaaatgctcaccataaggacataatctggatgcagaattcatccctaaaattgttcatatacttactttctgtataaggagaccagtggcggaaccagcaatttttatttggggggggggggggtaattatatgtttgaagaacttttaaaaaaaagttatttcttaccaaaatcatcatattttaacaaaaaataggtgaaattaatattttttgtgctattgtgctataaatattaatatttatataggtgtttaaatgaatcactgtgcttgggggggggggggggggcactgcccctgctagcccccactctgattcccttcgtttgaaattatcttataggcatgctaattttcagtgtattctcctttgtttttctggtatggcactagtttgaaggtcctactattaacatgtcatatttgagccccttcatttctccttttgagtgtatgaatttattgctattatctaattttcctcatttacagaataccaaggacaattggtgaagcaattccaatgaaggcaaccttttttataacatatacaatggttgatggttgggctggggtagctggtgaaatattaagattgaagccactagtgatcttccacttgaaaaactttttcttggtcaagactgagaaagacagagaagaggccatggaccctggaagtattggttttgactcaagtgaacctcaaattcagctatatttcttacttggtcttgtctatgcagcagtgacaccatttttgctcccttttgtattgatattctttgggtttgcatacgttgtataccgccaccaggttagtaagcatatcataaatgcttcacatttctcatgtgcttttttttagcattgtgtttggcattatgtggtttatcaggctgtgctacataattcttgttcttttaactagtgtgttgcctgtgtttggttacagattgacttaccctgatgtgtaacttacacgatttcactgtttcagataataaatgtgtataatcaagaatacgagagtgcagcagcattttggccaagtgttcatggacgtataatcacagcattgattgtatcacagtttcttctccttggattacttagcacaaaaggcgctgggcagtcaacacctgtgctccttgttcttcctgtcgtaaccttttatttccacaaatactgcaagaaccgctatgaaccgacttttgtaaaatgtccattgcaggtatgtttccttttaaaatacgggagttaaaagtcatgaatatatgttagaatgctgatcatacttcttttgacattaacaactccttggtgcatcttcaaataaacatgatgtatgttgctctaaaacacattgagttttgtgctcagatttttattatttaggttcagatcgttagtttggcaaattggttgagaattaaggtgtcaactaaagttttatagttaatgcccattggaagatcactgtttcattgaaataaaagcttgtgtcgaaggagataccaaattctctcttcatacttagttatggcgtgtgattggaaaaatcatggtgccatgaccatctaattcttatgagatattttgtggttggagagctagaatgtgtgacctagttagaattagattaaaaaacagaatgaattcaaacatttttacaacaattgcaccatggaacatgactaccaacacatttccattttcttaccaggaggcaatgaagaaggataccctagaacgtgccagagagccaggatttgatctcaaaggatacctaatgaatgcctacatccaccctgtgttcaaaggtgatgaggacgatgagaagttctcaatcgctgatgaaccagaaacagagcaagttctggtggcaaccaagcggcagtccaggcggaacacccctgtgcccagtaaatacaatgggtcggaatcaccttcgcttcctgaaattgtaaatgatcaacggctataagatgtctacagttttttcctatgtatattgagtaaaggatacaataatgcttttgaatgcctctagtttatactagtaagcagtgatggccaatatatttatgcatgtggttctttcacccttgcttcttgttcggatcggccataattgcatgagaaaactcactccttgacctaaaagaagttaggatttcttcttttccccttttagattcaaagttacctatttgacatgaaatctaactttccttccttatatggcaaattcgtcatatttagcaactaatggtgttaagtggggccatgggggacaacatgatgactttaccccaaggcgaaatagataggttcagttttcatatattccattgaggattatttaaactataggccttgtttagttgcgaaatttttttagatttcgctaatgtagcactttcgattgtttgtgataaatattgtctaattatagactaattaggatcaaaagattcgtctcacgatttacaggcaaactgtgtaattagtttttattttcgtctatatttaatacttcatgcatgtgccgtaagattcgatgtgacggggaatcttg

SEQ ID NO: 3721 - DNA, 4641 bp, Sorghum bicolor
  misc_feature (2881)..(2980): n is a, c, g, or t
caagatatagtagccggaaatcagtctcaccgttggaatcttttatcatgcgccatcactctcagtctcagctgagctttcaaccattccgccaagatatttggaaacttcgtccatttatttccttcctctggtttcagattacacgattggcgatcatacagctttataaaaaaaatccatactgtaattttgagacttttcgaatgcgaccttcttgtaagtttcaaatacatgtgtgttgtataccttcgtaaaattttcatgacagctttggacaaaaataatatccaaatattgcctccaaaagtcaattttaacgtatgccaaggtcattgtgcgatagctagtctagcttttcaatttcattgcaaagcgatagactatctggggtttcacctacggtaattctgtagagccccgaatgttttggagcaatctaacactcgatttcatcacttctctaaatctggcctcttgctctcttcttctccaagtgcagtagtttacaaggggctcgagagaggtagaccgaccaaatgttagggacaacggaaagatgactttaggttttctatggctgtggaggcggtgggaggggagagggatgcccatggctacgacggtggtgggagggaaagaaggaggttgtaacaggcgcgatagggttttagcgaagctctggcaagatcctaccacaccgctacagggcggtgggtggcggcggtgtgttaggaggaggaagaacaacgaaagaaaaaaaattagatgctctaacactctgagcatagattagacagactttttcacttatttccttcacaagacttccgatttatatgaaatcatcgtcctcttgtatagtcaaaaatttcaaatacttctatcatcattctaaaagagtaggcagcggtgtatgcgctcaattggtatgtgaagatgcaaataagatcaggtcaacaacaagaataaacgagaaggataatgtccggctgtcatgaacagactgaggatttctcagcgcctctgaaaagtcatggctgaaaatactgttcgctgatttattataagagaaaaatattgttggctgacagaaaaaatataacgtaggcatcatttagatcttttttttggattttaacactgtagcctttttgtttgtatttggtaattattgtccaactataggttaactagactcaaaagattgctcttacgattttcaacttaactatgtaatagttatctttttaatttatttttaatgctctatgcatgtggtaaaatattaattttgaatttttttttgaattccgtgggaaactaaacaaggccttaatagcatatccgaatactagtcaccatgctattgatgaaaatagtactagtaataagtactgataaaggtttcaaattttatatgcattgaaccacgagacctctgtctacacgcaccaaaaaaaaaaaagaaaaaaaatggacagcgcagcggcactgcggcagggcagtgaaaaactgaagccaggcacacaggacaggagcggaggcggagcggggtttgaattgaatccaggcgagcaccggcggcaccgtcacgttgggagggacgcggccgacgcccgacgcaccagcacctgccttccccccgtcttttccttccacccttccttcctcctcacccaccaccatcaccacaccccctgtttcctctcgattgttcgttgcttgcgtcgccagccagcctctttcctcctcccccatacccgccgagtaccgccccacgctgccgccacgccatcgtcatccgggggcggccacccggccaatcgccatttcgctccgcccgcctcgcttttccctccccccaaccactccccctcgtccccgcctcccgcgtcacccgaccccaatccgatcctatccccccaccggcgccgcccgagatcccgcccccagggttccgtcccgtgtgatgcgcggatccggctgaggggcgagccatgccgagcgtcggcgtgaagatctacagcgtcttcttcaagctcttcctccgccaccgcctccagtcgctggccgccgccgccgccgccgcgggggacaacctcgacagcgcggccttcggggtctcctgccgccccgacgaggccaccgcgccgcccaacccggccttctccgcctccgccgacggcgtcgcctccaaggacctccacatcgaccccaactcctcgctctccgtccgcatcttcctacccacgcccccgccgccgaccccgcacgcgcacctcctcgcgcacgcgccctcgcgccgcgccagcgaccccacaccgactccccccgcgcccgcagccggcgcgccgtaccgcgggtacctcccgcacgccgtcgcctcgccgcgcgccgccgtgtcggcgcgccggaggctgcccatcgtcgtgcagttccacggcggcggcttcgtcaccgggagcaacactgccgcggccaacgacgccttctgcaggagggtcgccaagctctgcgatgccattgtcgtcgcagtggggtacaggcttgcgccagagagccgctaccctgccgcgttcgaggacggggtcaaggtgctcaagtggatcgccaagcaggccaatctcgccatgatgaccaaggtcgggggtggtgtcgacacctttggtgcatccactgttgagccgtggattgctgcacatggtgatccagctaggtaaatgttactgatcctcctgtttatagcttcccaaatgtgtgattgcgtgctaaactttactagttgattaggtaaatgttactgatcctccagtttatagctgcataaatgtgtgctaaactttactgattgatgaggcaaggtaatctgaatcagcgnnnnnnnnnnnnnnnnnnnnnnnnnnnnnnnnnnnnnnnnnnnnnnnnnnnnnnnnnnnnnnnnnnnnnnnnnnnnnnnnnnnnnnnnnnnnnnnnnnnntgtttgtgttccctgagaagatttaaatgtctaacgcttaagagttaagcttggtcaacttgtcatatgtgattatgctatatcacaccgtttccacgcattctagctgttattttttgtgtgaagcccctgggataaataagaagcttctccaaactatgcaaaaaccttttcaacataacgccagcacatgtatgatgcaaatttaagctttacttggcatgtattgagtagatgactggaacttttgcagaactaagtcttgtattcatgtaattagaaccggagaagattgttctgtatgtctcctgtgatttaatttaatccttccatcatgaaaatggaattctcttgaattactggaatggatggtgacttattgttgactctagtaccatgactctgtttgcgtaacaccatatataagggagcttcacttgagcaaaccccttaaattatgctttctctggatcaatgggatgagttacctgcgcatctcagtcatctttatgtcattgctagctactttatccagtcagctgttagaaattcctttttgtgctaactgttgtataatggtattacaggaatttgactgtatcatgtgtttcttggtgcagatgtgttctacttggtgcaagctgtggtgcaaatattgctgattatgtcactcggaaggtggttgaagatgggaaaccgtttgacccaattaaggttgttgcacaagtactgatgtatccctttttcatagggagtgttccgacacactcggaaataaggcttgcgaactcatacttttatgacaagtccacatgtttacttgcttggagattatttttgtcagagaaagagttcaatctagaccaccctgctgcgaaccctctggcgcctggcagaggagggcccccactgaagtgcatgccgccgaccttgacagttattgccgagcatgactggatgagggatcgagcaattgcttactctgaggaactccgcaaggttaatgttgactcgccggttcttgactacaaggatacagttcacgagtttgcaaccctggatgtgttcctaaaaacaccacaggcacaggcctgtgctgaggatattgccatatggatgaagaaatatatctccctccgagggcatgagttctcatattagctgtagcaaaaatcatgcattgtgaaataggccctttacagggaagcatcaacgtgttcttttcaactggtggaaagagggatgttggattgcactcaagtaaccagttagcttaatgtgagtactgaatccttcagtgatttttttgaatgtagtgtgcaaagttgtagactgtaatcaaaagatactcttcgccttgtagagctcaattctttcattccttttgtgccctttgtgtattatggaataactggtgcttgaggttaccattttttgagaagaaatatcagtctcagactctcagtggcccagttgtgaagcattgagcattgagctccacacaacatgtaacctgatcgttcatatagttcatattatatcagggtgcatcctttttgctgaattctgcatttcaatcaggttttattacggtattacctatatgggtgtgcccgtctggtattattcctcgttttgtaagcttcgtaaatgtagtgaaa

SEQ ID NO: 3722 - DNA, 14074 bp, Sorghum bicolor
aacatcatatgtatattgagtgaacatcacataaaacatcataaaatatcgctaaatacattatcaaacattacataaacatcactaagtagaacatcgaacatcacatgtatgctaaggaaacatcactaaatacgttgtagaacagtgaacaccataagaaatatcatagaacatcacatgtattctacgtgaacatgacagaacacaatatagaacactaaatatatactatgtaaacatcatatatatatagaaaataaaaaaataataaaattattaaaactttaatcagagtaaaacaacaaataaggaaaatataaatttgtcttgtgctcaggatgcccaaagactacggaagaaatttgtgatcgaactattagcgtgtgatgagaattgacagtgttccaggattcctctattcgtataagaatatcttagccgcatcacgggtataagacaatggaagagatagttgtgaaggacttatctttcatgcacttattttgacattgttaacaaacttaacgcttattatttgaatgtggctccaaacattatgttgctaagccaagttaaaatttatttgtcttcattttgatccactactttttgatactcttaccgcgttgaaaatttgagctcataacatgcttttttttattgtgtgtaatgatattgaaaattttaagattcccgtagcaacacacgggtatttacctagttgagcacttagtagtatttctcccgttgcaatgcacggatatatttgctagtataaattattttcgaaactaaaaacactttcaaatttattaagcctaattagtgcataattaatactagttaattcatggttgctatagtaaaaatgtgctaatgatagattagttagacttttaataaattcgtctcgtagaatactaacggaatcgacaatttattttttatcagcatctaaacatttcatggccaccccatatgatatccgatgtgatacctactaaacttagtacctaaatttaaacaccccttaagtatattgtaagccaaactatgctaagtcttactaaattttaacataatttcatggaatttaaggagaagagtattaaggtcatacgggaatattataattgaaacttgggacagaaggtgtatatcagctaaacagtgcgtgaggactgaagacaccaaatttcgggggcatcctaagcatataagagaatctccaaccatttggcaaaatttattttttaaatcttattattggtaaacttctaaaataatatagagaggaaaaaaagatctcaacttcaacagtttcacaaatttcttttcaaaaacaaaaaacccgttaaccaaatgaagagccccactaagcatgggaagaaagactgatgctaatcatgaatttcgcgcgcatatttgcgcgctagataaggagatatgccaagttagaaattgggaattaggatagaaaactattgaaattttttctttattttgctaaaaaaattataaatataaaatcatttggtaaagtgttgaagatgcttttaacttccttctctattgatttgtactcatgtaggttgcgtcaatcaaaatgtaaacacaagcatgttacatccgcgcggggtgggaatctctttgagcccttttgcaaggccttgtttacttctaaaaaattttgcaaaatacacatggtaacacttttgtttgtatgttgataaatattgtgcagtcataaattaattaggctcaaaagattcatctcgcaaattgcaggtaactatataattagttatttgttttatttatatttaatgttctatatatgtgctgtaaaatttaatgtgacaaaaaatttaaaagaatttgcaaaatttatttagaaaaaacccgaaactggacaccgctgtatggcgccgcgttccgcctcagtcaactccccacgtcttgtttgagttcccaccttagcgtgcaagctgctcggtgctctccatataatttccaaactccagtctcgatctaatctaaagagcatctcaaaaggaagatagcatcgtcatgagaccggaaggcgcagcgcggttggcgtggctgctcctgctcgccgccgcggccgcggggcatggcggcgtgcagccgctgtcgcgcatcgccatccaccgcgcacgcgtcgcgctggacgcgtccgccgcggtgcgggcctcgccggagctgctgggaaccaaggtatgtacatattcctctgccctttattcagatgctttagatttttttttcttcttggttatatctctgcgacctgcgtgcttggaattatgcattattgttccatgtgccggccgtcgcctgctcatccttggattcttgcgctgctgaaaaaatgcattctctctagagacttgccagagttaaacaaagatcaaaataaccatcatattagagaatcctaaggaaagcatttggcaacttagggcttgtttagatgcaaaaactttttggattttgatactgtagcactttcgtttttatttgacaaacattgcctaatcatggagtaattagacttaaaagattcgtctcgcgatttatagacaaactgtataattagtttttatttttacctatatttaatactccatgcatgtgccgtaagattcgatgtgatgagaaatcttgtaaagttttggatttttgggtgtatctaaacaaggccttatagttcctctttttgatcccatcaatcaatccaatgaaaaggaacctaattccattattcaccactgacccctgaaagaactctatcgcagtaggatttcgtgaacgcaatgcgatgggacccttcttttgcgtccacttgcagcagactacgccgtactagaccataagggaggggagagcagtagctgggccttgtttaggccttgtttagtcacccctaaattcaaaaagttgttaagattcttcgttacatcaaatcttgcggcacatgcataaaacattaaatataaacaaaaataaaaattaattacacagtttgtctgtaaatcgcgagacgaatcttttgaccctagttagttcatgattgaacaatatttgtcaaataaaaacgaaagtgctacagtagcgaaatccaaaaatttttgggaactaaacaaggccttagttcacccaaaaactaaaaacttttcaagattttcgtcacatcgaatcttacagcacatgcattgagcactagatatagacgaaaataaagtttacatataaatcgcgagatgaatattttaaacctagttactctacgattgggcaatgtttgtcaaatacaaacgaaaatactacggtccaaaaaccaaaaagtttttcgaaactaaacaaggccctggccaagtgagctgctgcgaggcatgcacattttctccgcgtcatctcagtaaattattccaagtcaaatattgactgctaaattattgggttttgctggggcctccaattaagaacagtatttccgccactcccaatattcgcgcactccagccatcaaacttagacgccatgcattcatatatgtacaattcctggaaggagaagagctcctaaataaaggccttgtttagttcccaaaatttttcgagattcctcgtcacatcgaatcttgcggcacatgcatgaaacattaaatatagacgaaaataaaaactaattacgtagtttacctgtaaatcgcgagacgaatcttttgatactagctaatctatgataggataatatttgccataaacaaacgaaagtgctacagtagcgaaatccaaaaatttttccaaactaaacaaggccaaaatagaagtgagatctgtacttttgcctctcgattgttcttaaaagaacaacttagcttgtgtttggttgcatgtgttaaactttatcatctgtcacatcaaatgtttagacacatataaagtattaaatataaactatttacgaaacaaaaatcacagctcgaaaataatttgagagacgaatctttagaatctaaccagtccatgattggacactaattgataaataaaataaaaatactataatacccattaaacattaataatactccaaaccaaatacccgcttaaataaatctctacctgctaagcacgcctttcttccaatcggtttcccctatttttttttttacttctcatattatcctcgctcccaccctattttctacgtgaccaggatcagtgacccgtgcttatatacactctctgactctttcttaagtgtctctaatattcgagctgttaaattcttcagcctgactagatttataaaaaaatattaataacatttgcatcctaaatctcacaaaaaattaagtttttgcaaaaaatagatttaacgatttatctaatgatactaattatataccatatatatatatttagtcaaacttaaacatatttagcttcttaagaagtgagaaggataactaaaaaggaccgagagagtaaggccccgtttggtaggactctctcgctccggcttcggttcctaaggagccatttggtaattattaccaaatgaaactaaatatatactataaatatatatttcatcaaacttaagtatgtttggcttcttaacaagaagtgagaaggataactaaaaaaaggaccgagagagtaaggccccgtttggtaagcctctctatggctccggttttggttcctaaggaggagacattgttattgtttttagtgcaaaaaactagagccctaccaaataaggtctaagttagaataactcacatgcaccagtgatagagtccaattccaaaacgtattaagtttagtaaaacacataaatatgtttgctattaaataaataaaaagtaaattacatgcataatacaacttgtgcggttgtatcactttggtctaacaagttgcaaaatgtaaacgggtgcatatttaaactatcgaatatacatgtttacggtcagatgcacgccgcacagccatgataaatgacattcatagttttatgaatgtacccccctgccgtcgtctgttcccctctcatctaggttttatgcatatagctgatgaatgatgatatgtagattaacgtaaaaccatgaatgcatcaagacgtctgatggccgttgcgatgcaaatgttaaccataccacgtacgtagtttagaaatatatttgagggtactttacttacttttaataataacaaatatgggtaatttagacataaatttaaaaggttatttagcttataacttaaaacaatagaggttggtgacttgatgcaaattttggagatatatttagaatatcttaagttaaatgtgatatttggaggcttttacactattacaggactatgttatagtttcggttgagaaaccccctctaatctcggttttccaaccagaacggctaatccaagactaaaagtgttatggtgggcaaggtgtatcgccgtcgtagtgcctgatggtgggcgagttggcgtgagccggagcgcggccacctgcagctagcgcctcaggcgcctgagtagtggcaggtttagtttgttagggactttattgaactattgttattattccttagtttcaggatatagtctattgggatttgggtataaatattggacaagtcagttgaataaaaactcagcctaggattggagtttatctgcccctcgggcccctgggtctcctgttccgtactccctgtgttccccctcacgatctaatctctagtgctccctcacgatctaatctctagggcgacgagcacggcgcctccaactcgccgccgtggatccttcaagccacgaccacccatccaccactcctactccctcaggtctattagccgcaacaacctggtatcaaccatgtcggctcctcgagcatcacctcccatcgatcccacctccaccatcaacacctctgccatcaccacctccgccattgccaccaccaccgcatacaattctgccattgccgccaccaccgctaccccctcgcccgtgttctccatcacgtgggccctcatgaccacgacgccactgacggcaccgtctccacccctacccatgaccaccactgaggccctcaatgtgttgacggcaaccgtctatggcctgcagcgctagatgggcgacttcatcgtgcgcctgtctgctatcgagagcgcgcagccctccggctagcagcagtcgttcctgccctatgggcttccgggctatggcggcctccccctgctcacagcgcctgggcaggggagcactgagagggttctccacaccaccactgcccgctgccgcacctatgtctcccaccatagcggtcaccaccgcagcggtatcttctccaccaccgtccataggggtccccatcacccagataccctttccaccttccccatcaccagtgccatcactgtcatccatcctacatggccccatctctccacagtcgtccgtgatgccagccgtgtccctatttgcaccatcgccacaacctcacatcccacccgaaccagcagggccagcagtgccacgctatcataagctcacattcccaacctacgacggcaccgaagacccccttggatggttgaacaaatgcgagcagttcttccgcgcatagcagacacgtcatggggaccgggtgtggttggcatcataccacctcactggcatagcgcaacagtggtacctcatccacaaacgcgatgctggcatggcatcatgggaggagttccgccattgtgccaccaatgcttcgggttgcccctcagctccaaccacttggcggacttggccaggctgccctttaaatcgacggtggaagcatacttggcggcgttccaagcccgcctcatgcacgctagtcgcctcacgccatactagcaggcgcaactatttactgggggccttccggaggccatccgggtggacgtggagctgcacgacccgcaggatcttcaccgcgccatgcgccttactcgggcgtacgagcggcgcaacgccctgtcactcctcgccctgctagcaccaccaccacatgctgggcgccggtctgcaggcgcgctgccagcgcctccatcttcgacagggacggtcggcaaggtgtctcctgcgccttcttctaccccaacggcagcacgtccattcaagagactgccgcccgaagagatgactgagcgccgaaagcaggggctctgctataattgcgatgagccgtacatgcgcgggcataagtgcgctcggctgttatacttggaagctgcagactacattgtcgacgagcctgctgaggaggaggttgaggccgcaacggctgaaccagtgacctagccagcgccttatgaccccaatgccccgttgatctcgcttcatgccatcaccggcatccgcactaaagacacgatgcacctctatgttcatattggcaatgagcagattgttgcactcctcgactcaggatccacgcataattttgtgcacaacacagtgccccagcatcttggccttgcagttcagcccgtgccccggcaccggcgtgattgtggcaaacggtgaccgggtgccatgtcgtggcgtggcacgcgacttggggattcgcatcgcggacgagcagttttccattgcctgctactccattccgctggacggctttgacatggtcctgggcatgtccttccttcgcacgctcgggcccatcctatgggactttgacgacttatgcatggccttcatgcgggctggtcacagggtattgtggcgtggcattggctccacacgccatgacgtgcagcccacacggcgtctcaacgccgtccgccatgacggccctgccttgctggatcgcctgcttcaagactttgacgacttgttcgccgcaccccaaggccttccacctgcccgtgcctgcgaccatcggatccacctacatccccagacggcgccggtcgcggttaggccataccgctacccccagctgcaaaatgatgagctggagtctcagcgtgccaccatgctggcccagggcatcatcaggcccagcacatcggcgttctcagccccagtggtgctggtcaagaaggcggattcatcttggcgtttctgtgttgattagtgggctctcaacgagcacacggttagagacaaatttcctattccaatggtggaggagctgctcgatgaactcaagggcgctcgcttcttcactaagcttgaccttcgcttggggtatcatcaagtccagatgcacatatacgacatcgagaagacggcgctccgaacccatcatagccattttgagtttctagtcatgccgttcgggctcacgaatggatcggcgaccttccagagcctcatgaacaccatgttgcagccgttcctgtgcaagtttgtgctcgtatttttcgatgacgtattgatatacaacccatcctgaacggcgtacctgcagcacatcaagacggtcctcacgacggtccaggccaaccaactgtgcatcaagcgccatggcttatctgggccacattatttccacagaaggtgtgcaatggactcctccaaggtggacgtggtgacatcatggccgcagccacagtctgctcccagaaaaaaaatgtgttcagcacgttatgagtttgtacggattttctcatttctccaaattcaatccaatccaggttcaaatcaaaccacaggacaaaaaaacatgccaccaagcaatcgtatttatcaccgaaccatccaatccaatcgagaaaaaaatagacaaacaaaaatcaatatgctcgctacgttgcgctcgatcaaccatggccacatgcccgcagtgtgacctcacgtcgtaccgtcatgtcatccttaggcgtgctcaatgactgcacttgccgtcgtcaacgctgtgcttgtgttgttttttttaagaatctggagaggttttatcccctacagtaattttattatttaaaaaggagaaaacgagagtgttgttgcatggcccacgagtcgaagtagacaatcctcaacctgtgagttgccaccgtcgcagggctcactggcagctgctgtcagatctcaggtcttgtttagttagaaaaaattttgtttttttggctactgaagcattttggtttttatttgacaaatattgtctaatcactgagtaactagactcaaaagattcatatcacaaattacaggtaaactgtgcaattagtttttattttcgtctatatttattgctccatagatgcgatcaaagatttgatgtgacggaaaatcttgaaaatttttgcgaactaaacaatgcgtcaaccacccagccaccatcgcatgacccacgagcagccgccgtgagtcctcacccagccatctgctgctgaacgcatggaggagaagaggaggagggatgagaggtaaggcgaggaggagcagagactgcgcccaacgatagaggagaggagcaggtaccgcatcaggatctggtccatggatggcaaagaagaggagtatgggtttgtgacagggtaaccgatacagagaagcgacaagaaccgaacctactagacagtggtgttaggggtgcaaataagtgatgattaggtgcacctgtaaatctttttagttcaaatgtttatactactccaaaaaaattaagaagtaatacaaatatttaaactaaagaggtttggaggtgcacctaaaggctacccctttgcacctctaagtggtgtagccaggatgtagagcaaggatggtctatttgagtcaaaccatagtgagttcatctactttggtttaatcttgaattaaattttagggtgatctattgaccgcctgtccatctaactagctccgtctatgctcctagagctagaagataggccatggaccctttttttccttttttatttaagcttttccctgtagctatgagtctatgactggccagccaaaacaaatgatgagtcattgtttcttttttcctcttataaatcctttctttctgttaaataaatgttttttctattaatatatggtccttgatttttttctatttagatgagctgctaccgcgccaccacatatatgatctacatatccatacgtaatattattaaagacaacatatttagtcatgaactagagtaatgtgtgacacgaagtaagtgagtccaattctaaaataaaatagtatataatgtgatcattaattaaactttttaactctattatgcacatgttagaataaattagagtatataacgtgatcattaactaaaattttcaaatctgtcatgctcatatgagcaagtatagtgcacgtctacacacagtagaaaagtcttgcctcaacgttcaagtgcaggagaaattaaaatacatggcatgatcattgaataaatgtccaagccatcaactctcacacaaattataaaagtgtgcatttgaaaactctaaaatgaattggaacacaagactaatctaaagcctcgagttattccttgtatatctgtgaaatactactcctatcagccctttactgcaagaaaaagaaatatgacagcgttttgttcacagggcgaagatactgcctgggtgaacgttgattttattactccccatccaagtgatgatgattggatcggcgtattttctccttcaaacttcaagtatgcctgtttacatcatctcaattcaagttgaaaatacgcagggtattcattttttatagtgcgagcttttgtatgatggcaatcatgatgtaataggtatcttcacattcttgcagcgcgtccacatgccctggttctcacggatctggcccaggtcctgtgatatgctcagcaccaataaaggtcagatgaaacaaataaatgtgtaatcttcacattcttctgatgaatatcggacttaaatcttcatatgctggtttcagtatcagtttgcaaattactcatcagattttggaaagtctgggaaaggggcactgaagttccagctgatcaaccagcggcaagacttttcatttgcactgttcaccggtggactctcgaatgtcagttactgcataaggcactgcagtgtcatgctatcccttctctatcattcgatggaaagcaacgaccctgatttcatctatttctcttttacagccgaaacttattgcagtgtcgaatgccattgcttttgcaaacccaaagtctccagtttatccacgcctagcacaaggaaaatcctggaatgaggttggtcattctctcgtgtatggcttagaaggtccaactgcaaccatgcacactctaaaatcctcttgtgtgttggctagatgactgtatcatggacaagtggctatgatataaatgaggcatatccctttgtcgaatggggaataaaatggagccccgcggtacgcactgcagctggcaccgtcacttttgatcgtgatagcatctgcggtatggcttatatgaacattgtatccagtagcacagaacaaaaatggttactgaaagaaaaatacaaaattttctattccttagatatttgctggtgacatgaaatgctaattttggtagcctgttgtctcaatttagttgagtccattctactgtatttagtaagcctccaatctctttacctgataggcaagaaactgcaggattcagagaatcttttacttggttattttcagtttgttgcctgaattgtctcactgtacttgtgcaggagaacctgctcgatctgttggttggagagatcctggtttcatacacacagctttcctaacagacttatggccaaataaagagtaaattcttgccttctgtcctacagtaagttctaagattccaacactagtgtcctgagtacttctatttgttccctgaccaggtactactacaaaattggtcatatgctgccagatggaaatgttgtttggggcaagttgtcgtccttcaaggcacctccttatcctggacagaagtcgctgcagcgtgttgttattttaggagatatgggaaaggtaacatatgaagattgttatggaagactattacgtgattgtgtccaacaaatttttcacattttcagtgcatagtccttattggcttatcgcttttttattacatatcaatatcaatatgataggctgagagggatggaagcaatgaatacgccaactaccagcctgggtcacttaacactactgatacactaatcaaggaccttgacaacatagacatagtgttccacattggcgacattagctacgccaatgggtacatttcacaatgggatcagttcacacaacaagtggaagagatcacttcacgagtcccttacatgattgcgaggtttataatcttttgtgttctttttgccccctgtaattgaatccactcagtcccttttttaagtctttcagaaatctccggtgattgataccagcttgctttgcctgattcagtgggaatcatgaacgagattggcccaacagtgggtcatacttcaatggaacagactctggaggggagtgtggtgtgttagctgagaccatgtactatacgccaacagaaaacagagcaaactactggtatgcagtgcaactcaatccatcgtcataacattgctggatcatcaacagtgacacttgaccggacacaaccttctggtcttgttcaacaggtactctacagattatggcatgttccggttctgcgttgcggacagcgagcacgactggcgggaaggcacggagcagtacaaactcatcgagaactgcctcgcgacggtcgaccgaaagaaacagccgtggctgatattcatcgctcatcgcgtcctcggctactcctccggttacttctacggcagagacggatcgtttgctgagccaatgtcccggcaaagcctccagaagctctggcagaagtatagggtggacttggcgttctacggccatgtccacaactacgagaggacatgccctgtctatgaggtacctccatctgctaacacaggaacttttttttttttttttttttgcgtccgcgcgctaacttttgctgtacaggaacaatgcatgagctcagagaagttccactactcgggcaccatgaacggcaccatccacgtagtcgttgggggcggcggcagccacctgagcaacttcacaatccaggtcccggcgtggagcgtatacagggagatggactacggcttcgtcaagctcacggcgttcaattactcgtcccttctgtacgagtacaaacggtccagcgatggcgaggtgtacgatagcttcactttgcacagagagtacagggacgtgttagcgtgcgtcaaggacagctgccctccgactttaaaatcgacatgacatgcagccattcagttttctgaacgtggcgctgcttctgcgtgtaactgtgagtgactaattaatttggtcgtcgaccgacccacctatatataaattctacattgaaataaagagcatattatattgacgctaattagatcactgcaccggtaaaaacagaggccaaagatcagtctgtccgactttttcatcgaccgtcctaagagcatgttcacaaacatttcacctggtgttctctagtgatgatatgcgagacatatcactagaagagttccgtccagagcacgttatgcaagacatccaaaaccgtacatgctacaagaaacacaaaaccagcctgagtcaatagttgtctccatgtgttgctttggtatcagcctcccgtaagttgttcgtctggttacaggaaaaacacgaattttgctgggactgccaaaactggctcaggcaggttcctattgaacaccgcgagaagtttgccagaaccggcctaagccagtttagtatgcacaaacccgcttgatctttttttttttgacaattgcaaagaaatttattacccgcagcaagaagctgctaaccagtggcattcttatcacagtagaaaatctaggccgtgtttagttcctta

SEQ ID NO: 3723 - DNA, 6151 bp, Sorghum bicolor; identical to SEQ ID NO: 3666

SEQ ID NO: 3724 - DNA, 4145 bp, Zea mays
ctgttctagttatactgctatactctaatccaaggtcggaggaaaataactccagatgacactaatcactagtaagttttactgaatcggtacaagaacaccgatcactattcgtccacaaatgtttgtcggtattcataaagtttgactagatttataaattatattagcaacaattatatcttaaaatgttttactacaaatagattaaagatttatctaatgatattcaatatgtaatataaatataaatactttttatataaatacagtcaaagttaaaaatgtttgactcttccaaacatgaccaacatttgtgtactgagtgacagctttctcctcctcatcaagctccatagcagtctgtgtacagagtacagctagtagagtttgaataataattaaacagaaaaccagtaccaggtggatcgtggatctagatcaggcgacgggaacgggtacgcagcaggcggggcaccggacgagcccgttctcgttgcactcggcacaggcgcggaacccgccgccgcccttgaggctgtaccgcttgtggctgccgtcgcaggcgccgcaaagcaggtagcgctcgccgccgcagcgggcgcagctgccggagaacgcgggcccgggagcgggggcgacgatgcggcggagctccccggactcgtggaggcgccggacctcgtcggcgccgccgaggtggcggccgccgacgaagacctggggcagcgccacgcgggggaggagcgcggcgagctcgggcaggtggccggggtccatggagaggtcgcgctcgtcgacggccgcgcggagcccgcgcaggatggcgcgcaccgcgcggcagtcctcgtaggtgccgcggacgacgcggagggacgtgaagtacagcaccacccgcccgccgcccggcaccggctccttgtccttgccaacgggcgccgccggaggccgggacgggggctggtggagcgtgcggagggcccggagcgcggaggcggcgacgcggatgcggtgcaagacgcgcggcgacggggaggcggagggcggggctgtggcggcggagtccggcgccagcagcgaccggaggtccttgagagacgggttggggatggagaggcgcgaggacgcgccggcgcctgcggcggggacgagggctgtggaggtggaggcgtgtcatgacccaagtgtggcccagaagaagcccagcctacctgcccatttgccaaggccgaagcccactctatccaacccaattgctgaagccaaagaccacgaggacaaagaggagctgaggcatcgatgcagaggacaggaaattattcagaaagaagaaagaccgaggaacacaggaagctcgtcttcctcctctggctgtgagatcctatccccctctcgatttcccctgcaattactcacgctcccggattgatctcgccggtgtagccacgggtattacagtggtatcagagccagttatcctcggcgtgggtgttgcagcggtgctgttgcagcggcggcggtgctctccacctcgtcttcgctggtgttcctgggcacgggttgctcgagcgccgttccgacgcgcggtgccctgatccagccccgacccgccctgccccatctgctcccttcttcccgtgctccagcaagcccaaccctagtcggcggcgctgcgggccccactcgccggcgacgcatctctccggcctcgattcggccggcggtgcatcttctccggcctccccgcacacggatccgacgcgggcgcgcgcggatcggccctcctcgcggcgattggaggcgcatgcggcggttccagaggtccggttcggctcgggcgccgtttcgttccgcggcaacgactccccggtgctgcagtgactcctgtcggcgcttcctccggtggcgggttcgcgagtacgacaggcagtgagcgacggcggcgctcgactcctgcaggcacgcagcgcagattcccatcagagacgtcgatccgcagcatgggtcgagttgagctcgacttccagtcgacatgcacatcgagggcgcggtcagatcaccatggtcgtggctgctacatcagcggtgtagagtgtgaggcttgtctgaggtggtctgaaggcttattggatctgctagctcgtggtgaagagtccatagttgataaggaaaccaagcgagttgccgatccagacatccatgatgagttacctcatgttaatagcactcagtttgctttagagcttcacgtgaatgctgcttctatggtgcctcttgaaaatgagatggtagagaacaaagatgcagagaaatttcgtgagaaaatgcctttcgataacatcgtatgggatgaggaactagcatcagatggcaacacacatgatggcttattgcagcagctagctgaggtggaggaccagacccagtacaagaaggtctgcacagtgttgtctgagagcgaggcacaggtgtatgatgaaatacttggcaaggttgtatgggacgaggaaatgtcatccgagcttgacatggacaatgacttattgggactgctggtttctggcggggagtacccagttgatgagcaggttgtggatgactcctcggatttcaaagagtttggattggtcgatgcagaccatgtttttgtggaagggctcgatgaagatagcaaagcagtttgcaaggcaagcatgagtgatgagctaactcttgagataaacactccttttctctttggggttgctatagatcacgtgaatgagatgcctgtcaacatcaatttgcaagatggcctatcacaggagcgagcaagtggtagagagtatgtgtatgatgataagatggaccctattgttgagcctgactttgatctcagttttgctgtcagtattcaagaggagtgggatattcaatcacttgtgagggtgccagaacaagatcttattctgaaaatttgtgagcagtaccatggaggacaacccattgttttgacctgtcaatatatgattcaaactgatcaccattttggtggtacaagaaaaggagacaatgagcagagaggagtatgctttgcaaggactcatgttgcatggggacaagctgtgttgcaaccatgggcaagaaatgctttcagtcctggacaagttgagcagctacatcaaattgattctgctgcacataaggtcgctctggagctgggtatcaatttaccatctgatccatcagttcggatgcaatgggatccgggcatcagtacggccacagcttggggacaagctgtgtttcgaggggccggtaaatgtcatgacccaagtgtggcccagaagaagcccagcctacctgcccatttgccaaggccgaagcccactctatccaacccaattgctgaagccaaagaccacgaggacaaagaggagctgaggcatcgatgcagaggacaggaaattattcagaaagaagaaagaccgaggaacacaggaagctcgtcttcctcctctggctgtgagatcctatccccctctcgatttcccctgcaattactcacgctcccggattgatctcgccggtgtagccacgggtattacaaggcggcggcggtgtcagagctgtgcgccttcacccaggacgcccacatgaggattgacgcggcgcggttgtgcgggctcaggcgggaggcgcgtcgcggacgggaacggcactgctactactactttgcttcgctcgccttcagctttgtgtcttctcgcgcggcgaggactggggagtgggttttatgagatgggagtatgggacgagctttcgtccaaccaagccccagcgggccagcccactgaaacagttgttatccattggactcatttattcgcggtcgcttccccagtccccaccgccgcttcgctgcggcctccccagtccccggcagccggcgctccacactccgtcgtccgtcctcgccgcttcatctcttctgaccggaggctccaacaaggtggtgggtcctcccaatcaagggcccgaacaagtacagacatacgcgtcaaccggtggctatgcctatacgtacgtactcaagaaaattcagagaacggtagcgggacaagttgaaagcggacgcagtggaacatgcaaagcgggtgaagaaa

SEQ ID NO: 3725 - DNA, 7174 bp, Sorghum bicolor; identical to SEQ ID NO: 3716

SEQ ID NO: 3726 - DNA, 11041 bp, Sorghum bicolor
ctaatgataaaataagttataatcaaatagataatatttatacaaatattttgaataagattgacgatcaaacaagatgtctggaagttaattttattttggcagtgagtaggaaagatttgataagaaaatacattacgtaaaagtaaaatgataatgaaagtttattagatttttttacattaagataaaaattgcaattatatatagacaaaatactcaaccggtccagaacatggaagttgttgtccacgtgcagccggcccttctccaacctcctggcaaacagtatctaccctacctctacaaatgaaaaaaagtctacgtaacccctccaaactatctaagtggactacttaacccccgaactattaaaccagatattttaccctctgaacttttaaaaccggtcaaataaccccctcgagtggttttggagggtggttttgtctttttcttttttatttatttttgctgaatctttgaaaaatcataaaaaatcataaaaaaatcataaaatgaaaattttaattttgtcagacccctgatgagttgatctacacaatgaatatataatatggtatactttagtacaaagtttttgctgtaaccttaaatctatgttttactgtaattagtttgaataattcatatatgcagttcctgtggtccaattgtggtaaaatttttatggtgggctcattattatatgcttgaactatggtaaaaatttcatactcattggatcacgtataacttagttatagataaagcatagatttaacaaaaataaagctaaataaattgagaactaagttatacgtgatccactaggtacgaaggttttaccatagttcaagcatacaataatgagctcaccataaaaatttcaccacaattggagtataggaactgcatatatcaattattcgatttaattacagaaaaacatagatttaaagctataacaaaaaatttatactaaagtataccatattatatattcgcttgtagatctactcatcagaagtccaacaaaattgaaattttcattttatgattttctataatttattatgatttttcaaagatttagtggaaataaataaaaaagaaaaaagacaaaaataccatccaaaaccactctagggggttatttgaccggttttcaaagttcagggggtagaatatccggttttatagttcggagggtgaagtagtccaccttaatagtttggggggttatgtagactttttccctctacaaattcagatcacctttaaatttatagtataattttttagagtgtgacatcgagtataacataaggtattacatcaaatattcaaataataatataaaataaattatacataattaatttttatagatagttataatctatataattagttgtttttaagtctatatctaatatttatacgtgtgttcgtgtgttcagatatgtgacgataaggaatccgaagtaaactcaggccttgtttttcaattttttttttaattttctgttacatcaaattttacggtacatacataaagtattaaatatagataaaaaatagttaattatacaatttatctataatttacaagataaatcttttaaatatagttaatttataattaaataataattactaaataaaaataaaaatgctacggcagataaatctgaaatttttgcgaactaaaagtctaaaacaggaactcagacgaggcctgagccgtgcacggctgtaaccgaacggcgctgctgagcgatccacgtgttgcccgagccgcacgatacgtggcttgtgaggaagcgccacgaaatgccccgggggccgcaggctgccgcctctcttcttcatcgggcatcggcgacctgaccaagtcaatcaccaccgtccgtccgccccatccctccctcctcacactctccgaagtccggtttccgaaccgaggcgccgccgggcacctccctgcccccaccacaatggcctcctccctcgccgcgcgccgcctcctctcccgcgccgccgcggtgcgccgtatccccgtccccttcgcctccgcccccgcctccgcgatggctccccgccgcttctcggccgacgcgggaccgcctccgccgctcccgccgccgccgctggagcccgtcgtcgagccgcccacgtcggagggcgcgggcacctcgtcttcctccaccaccgccggtgcaggaggcggcgcccacaggtcgtcgcctggagcctccgcgggggcgcggcgccagggtggtgcgggctacgaggaggaacaggagaaagtcctccgcgcgtcgctgctccacgtggttgcgattcgaaccccgctcctccaaatctacttccatttttgcgtgtcttagtatttaatttagcatatatgaaagagatttttactcttcctgtatggctgtgtatgctgtagccgcgcatggggtggagcgagtcggccatggtcgcgggggcgagggacgttggcgtttctcctgccatcgtgggtgcattcccaaggaaggaggccgcccttgtcgaggtatcactgcttctcaatcggatgatttgcgttgtgagcttttcgattctgtgaggtggccaaactaatctccctaagaaaaaagaaaagaatatttggccatgttacatcgcagtgcagatataaagacgatgcatgtttcatttaaggtatggattcctcgcgctgaaagctaatatgaccattctcattactggcggtaacgattattgttgtgtgcactcatctgatgaatgatccacctcaaatatacatgctcccacgcttgtcctgtgctgtgtgctttcattttgtgcacctgtgtcaaggctagtaacaatccaggaaagagtatcacccccacagttcctagataaacgtcactttgaaacatatgcttctatttttattattttacagcttaaataaagaacaattgttaatgtgaacatttgagatcgtattatgtcctagacaacatccattttggaacagagggagtgctttagttcacagaaaaaaaaaatccctctgcagtcccagtgcttggaatcagcgactgatactcatgtcataactaatggctaatgcagtaatgcttatctgacatggcttctattgaatttagccaacttggtatggtcgtattccttgtgtttatctaagtttggccagatggtggattctatttattttgttataatgaaagcataagtcatgactgtcctttttttagaagtgtatgatatgctagattttgtccatctgttgaaaccatggattcattgcacagttatgtgataatctgctgtattaacattcaaacttgctccacaaagtctagcctgtgttgccctccagcacccaacgtttacttgatctgcaacattaagtttaaagatctccgtccgtatgggcaactatttatctagataccctgtctcctcgaaaggactatatgtgatggatctcaccaaagcttgtgggctataggctgatgcttattttctttaactgcattgtcttaacaattcatatgtctttccatttgctaaagatagtgcaaatgctttataaggattattgggcagagcatacctacatcaagcccaattgcttatacaagtagctatttaggtctgagtgtctgactttttttaaaactatatggtttctagtttttcttgtcattgcaacatttgggaaactacttctgcatggtagctcatgatcactgaaccctgttattcaatactcagtggtcactttgacatatatcctgttagtgggcatggcttcttccatgttccactgttatctaccatgttacttctagaaccatttacatatcaaatagtgcagttcctttaactagctaagacattttatttgcatacatacaacccaaaactttacaagattccccatcacatcgaatcttacggcacatgcatagaacattaaatataaataaaaaagataactaattgcacagtttacttgtaaatcacgagacgagtcttttaagcctagttgctccatgattggataatgtttgtcaaataaaaacgaaagtgctacagtgtcaaaatccaaaaagtttttggatctaaacaaggcctagaaaaaataaaagtgcatgctagctatgtagcctgttcaataatggtctgtttggatacttccaaattttggaacctatagcttccagaatctacttaggttagggatccaaacagctccagcttgtaagcagcttatacaatccacacatctctagattgtacaatctagcaagctgaagacacccagcttctatcagcttctggattgaacttgaccaatatgcccctttttggctaactcattgcagccagctcttagaactaagggcattttggtaatttactctgtacagtacagtgctataagccaggttttacaagttatgaatccaaacagcctctcatttcagcttttataatccagcttataggaaactagcttttagaagctaacttctgcaatccaggtggatccaaacgcaacctaagtggttgccacatggaaaaaaagggttcgaagattgctcagatgttttactgatgggttcatgtaatggaacttgaaaaattaacggataaaaagatggtgtttagttgccagttgtgtgcttggtggacttgatgggaaactagaaaatagaaaaagttttttcctaaaaaaaatagtcggtttgagtatgctctgatgccctgccctgcttaactatagcaagcaggagtacaggataattatggcccaggatgtctctgtagttcttcctagacaactatctctgcttccatttgtcatggtcctctgctgtaacgatcatcacattgaacaaacatatgtcactggagtgcccagatgctactaccacctgtgtcggcttcaatcattccgtgtcagctacagtgtgctcacacttactgtgagtcatgacaatgccttggtcctagccagtcatgacagtgtgctccaaaaaaaagtttgtcattgttgtaacccacccctcctagtaagaggggtgcttgtatgggccatttcttttccctataatacaaagatacacaggtctcctgcgtgttagagaagaaaaatacatgacaattcactttttgctttatttgttggcaatgcattccacactgatttaggctactgttctatgctcaagttctgcatagatgataaacaccttgcatctgtttcttgtatttatttttttcttttattgagctgggaggtaaatgagaaacaaagagatggaagaaagccaaacagtgaggaataagaaaaagaaaagggagactgaaaaggggaaagctatatttagttgcatggcaagatcatggagggatgggctaagtttacaagttctaatacttctatgggtgaattactgtaaaaaaattgttgtcagtaacttcaagtcatcttgaatgtgatggtgattaatttgattcagtaaaaaactaaaaactcaaaccttctctggtcagttctgtcattatgcatgttcaaaaagaaaatcattgcttatctttcgatgttccttttttgttgccttgtacagatgtcatggtagggaatagttataggtgcaggaataggggctagatggcaagcagctcaggaattaagcgtaggaacatgcatggagatcatgcaggcgcctgatttagcaatacggaataagtccattagcaaatgagaggctaggagagtttgtgatctctttaaatcagtcacgatcaatgaatgaatcaagcaattgtagccaactctagttctcatcttctttctctgttatctcatctcctttttctgttatcccctcctgtgctattatctctaccaccatcaccacgggcaggaagtcggcggtcgagcggccggcaacctctcacacctaccccatccggtcactgcctaacagccatgacaacttgggtatcagttgctttcaaactagtcgacaccatctggctttgcttgggtggaggtgtctgcaaattgtgattgtgctctactactgtgttcctagatgtattgcatgatctatttggtgatcgaggatcagcattgtcatctagaccagcagcaagttttttagatggtgtagcatgcaaaccctgaacataaatattttgtcttgccactaagtcatcaagaagatggcattggttcagccaaaacaccaaggcattttatttgtgaagcaacacatggcctgacaacaatcagtgagttatataataatgaacctttctcccatgtcatgctttccaaaagctgttcttctaacgaatttaggtgctttttcaattctcttgggagggtctcttcatgtctcacaaagttctcaattattttgctcaaatgaaatccggttagatcagtactctcaagaatagcaggaaacatcatgatgcctgtcttatgtgttgccaatattagctcatcttcaaacatcagtgaaaatgctcatttgacagcaatggagtaagattatttacattgctgttttataattcagctctgtatattgcctctaataccctatagtacaacttagtatctagagcctccgatcctgccattggttccgccaacaccgacgagatcaagcagctcctagcggctcaggaagacaccctgcgcaaggaagctcaggaggccttcaagacggtcacctctggcatcagcgagcttacctcggtcatcaagggatttctggcatgttcagtggagataatattggcgacatatgacaggcatcatgatgtttcctgatgttattgacaatactggtctaactgcatttgatttgagcaaaataataattgtgaactttgtgagacatgaagagaccctcctaagagaattgaaaaggcacctaaattcgttagaagaacaacttttgtaaagcatggtatgggagaaaagttcatcattatataactcactgattgttgttaggccatgtgttgcttcagaaataaaatgcaaatgccttggtcttttggctgaaccaatgtcatctcttgatgacttagtggtaaggtagaatatttatgttcagggtttgtctactacaccgtctaaaaaatatgttgctggttcagatgacaatgctgatcctcgatcaccaaatagatcgtgcaatgaatttaggaacacagtattagagcgcaatttgcaaacacctccactcaagcaaagccacgtggtgtcgactagtttgaaagcaattgcagccaactctagttctggtgacggtggtagagataacggcaagtgaggggataacagagaaaggagatgagataacaaagaaagaagatgagaacgcatcgatcgagccatggtaggggattgtccttcccgtcgtattggggaaatccatcttgaagtagcggggtacgaagccttccatcttcccgcgcagatgatcctcctcgtgatcgttcaccaggacgaaagcgtgtctttggcgtcagcgagcttacctcggtcttcaagggagagatgtcatggtagggaatagttataggcgcatgaataggggctacatgacaaggagaggccaagctcaggaattaagcgcagaacgtgcatggagaccatgcaggcgcttgatttagcaataaggaagaagtcaattagcaaatgagaggctaggagagtttgtaatctctttataatgatataatcagtcatcaatgaatgaatcaagcaattgcagccaactctagttctcatctcctttccttctcactgttgtctctaccaccgtcaccacaggcaggaagtcggcgaccgagcggccggtaacctctcacacctaccctatgcggccactgcctaacatccatgacaacttgaacctggctctcatacagttgttaggcagtgaccggatcgggataggtgtgagatgttgctggccactcgactgtcagacttcgtacccatggtgacggtggtagagataacagcaagggaggggataacagagaaaggagatgagataacagaggaaggagatgagaaccagagttcattgatcacaactcattataaagagattacaaactttgaactgatgttgttcgaccattcttctaaatgtttaatgcatctaaatgtttaatgcatcttcccaaatcacttgacctctacgatggatatcagggaatgaatgtaagatgcctgattttcctttagagatgggttaaaatcttcataaataattggatatcccaaagttcacaagaatcaataacattgcagaaccagatcaaactctttttacaccattgagcgaataaaacaaatcactgctgtccttgggaaaaatttattagaaacatcctcgaaagtgacggtacttgtcatgtgggggcggtagtatagccgccagcccagagcatgagatgccgccaggggagctcccaagggtgtgcaagagcccaaggaggcataggcggctgtaatcaatagtgtttaagagttggctgagagattagaagttaaggtagggctagaatcaaggagccagcctcaaggccgtgcaagagctcaaggaggcacatgcggctgtaatcaatagtgtttaaaagttggttgagagattagaagttaaggcagggctagaatcaaggagccagcctcctatatgtatctggtactcggttgagatgaatcaagcaatgaacaacaaacaatccagttacccccaaatattctagtctccctccacgccgactttgcccggtcttcctcttggcaatggttatcctccctattcccgatatgaactaaggttcatagcagtacttatgattttctctgtttgaatgtgctcatattgattatagtcttgtatttatatgtagtttttcatggatgactgcctccaacaactgatcgatcgaattgatgctggagaaggagagcagttgaagaacttgatactgagtgagagactctcaaaacttgtccggatgaggctggaaatgcaggcaccttatatatctaagtggcctcaagcactgagtatccaggtgtgctatagtcttctttgtttgggacttggagtttagttcagttgcatagttctaatagcagctatatcctgtttgccaggctcaaccagcaaacgtctcaacaagcttgaagcagcgagctgtcctggtcgatgagatatggcatgctgctggagattctggatcagatattgattggtatgtgaaacgtacagtgcttggtggtatctactcaacctcagaggtgtatatgttgacagacaattctccaggtttgcacttctcaatagctctatgttggtttccaattcttgtttcattttaaaattgacttcagtaattttacctctgcaacaacttgacagcaaggattgaaatgaaagtgtttctggtaaactagttgaatgaaagtggttcagaacgcagatgggggcgcaccggatgctgcctggccttttcactgtttctctgttgcttttgccgcgtcacttttttcgctgttctttagttgtttttgttattattatacaactaaagcacagaggaaaagcagtcctaaactgaaatacagatcttttgctagttcagtcttgaaaaagcacaagatgcaattaataatatggtttcttgtcttgtttggtgtttgtttgaccacattctactacagtaaaaataatatcaattcaaagtattatgagattctagactgtcaagatgtactgctgtttatatgattgtgtactagcgtttacatgttaatgtagcgttcccacttctggcacttggcagagttccgcgatacttggacgtttgtgaaccgcagaataaaggatgctcttgatcttcagaaaacattccaagaggtaagcatattgtgagctcaaatcgcatcatcacattcatgagcagtttcaccatgttacgtgtcctcattctttgtaccaagtacagtatttaacctgtttaactgaaaccatttttcctcaggccgcatacctggctgaagccgtgggagcaggcatgggcggcaccgtgcagggtgttctcaacagggtcttccagaaacgtagtggatgaagtttttctttcccaaacacgtagtggatgaagcacattttcccgttcaccaactggcgtatgtctataataaagcaaatggtgatgtggttgagatgcatcacgttagggtagaaagtgaagatgtgtttgctggtggtgatgtttagctgcaggtttttcaaatgagtgctcagatcgcgcaggctcagtccacatgcatgtctggcgctggtgagcgacatcaacgctaaacacaacattttaagtgaaattttattttataacgcttgccctctcgcaacaccctgtaagtgaaatcttacatccgtgtttgtgagtttcggatatgtgttgttgcaccaagtaatatatcatcatgattgcatcatcggaatagaaagatgaaagcaagtaattatttttcatctttactatcacacatcaattattaacaaatataagtaccatgtagttgtacaagctcttgaatgaaatagactaaaaactcgagatctataagggcactcacaatgtacactctatcatggagtctaaagctatttattaacttgaacaatgtggacttggagtctaaataagacttggagtcttattttttctacctctttcttcaataaatatggtgccacactacgttatacgagtacgggtacgagtatcggatacaatacgtatcggatacgcggatacacactttctcaaaagaaaatccactaaaatggtgtatccaagtattcgtatccgcgtatccgacgagtatcggatacggatacgtcacctctcttggagtatccgtgtaacataggtgccacatcagcaaaat

SEQ ID NO: 3727 - DNA, 4208 bp, Sorghum bicolor
agcaagttttagctgtatttgcttcatagaatacagtttcttgagctgttattgttctattcatatttactacaaatattgaccactgcaaaaagcatatattcagtcctttaactagctgttattttattacaaaaaataactacagcatagctttttcttgtatcagacatcctagcttttgtacttttaaattctcaatatgatacatctgagttttcgtttaagttgtttagccacaaaagagagcataaaagaaagcaactaaatttgtgatgagaagaaaggtaaattggccttttccatatctattgacgtgaatatgtgatcagtaatggcgtgaaagagatttaaatttatagctagtggcattgataagatttgagttttttagtgacagatgaaagatacaagttctagcaaatgacatacagaaaaatttccctttcattttcagttggcatgcgtcatgactacacttctatattagcaaatgaacattgcatatgttcagtgtcccacggtataagctgcagttttttgaggaaaggtaaaagctacagttccatgcttccatggaaatctgctgcaaacgcttttcacaggcaacagaatagagttgagtgcaaacagacgttctggctagtccagaccgatgccggccgccagcaaccagacggtcacccctggccctcgatgaaggtcgactcctcgtcctcgcaaatttaacgctgacatgcggctggagcacacggagaaggtgttcactgttcagtgagagcgtagtgttcaaaaggggaggcaagaaggaagcatgtagttcaggggtagtattgacaaaaatgtcagtctcagcgtcacgtgccaaatgtgacaatcctactctaagataaaattgatagttttttaaggccatggattcataatagtaacaactactcttttcatttgaaattgtaagtggttctaacttttatagatacatattttttttatgtatctagacataaagtatatataagggcttgtttagatgcaaaaactttttggattttggcactgtagcactttcgtttttatttgacaaacattttccaattatagagtaactaggtttaaaagattcgtctcgcgatttacagacaaactgtgtaattagtttttatttttatctatatttaatactccatgcatgtgtcgcaagattcgatgtgataaggaatcttgtaaagttttgggtttttgggtggatctaaacaaggcctaaatacgtagcaaaagctacgtacctacaaaagcattaatgacctataatttagaattaagagagtggttgactaatgtttagtcacaaacgattcaagcagacgaactaattattagtcccttagtcatcgactagttgttaatccattagtgcatataggagttaaaatagtcgttagttctagtccatcaaactggcatcaaaagacggatgtcttttggtgatattttatgaaaaatataatattattttggtgctacaaaaccaattttctcaaaaagactttttatttaggttctcaaaacaatcatctacagaatcgtcctcaatctttccactgtcgatcgacgcgagacctgctagctgttgaacggcagtaccatctgtgacgatgtgttgcctgcctcgcggcaccagggaacccgctgctgagccagccgtgacggtggtggtcacccgtcggcgaaacgctcggaggccgtaccggagcagagctcacgctggtcgcaggacattggagcacgggacccgagcgagacaataggaaagagcgcgtgcgttccaagtcaaccggacgtcacgtcggagcggcatctgagctgagctggcggtgttgttccgccacttggacggcccgatcctctcctgctccctcgttcggctccacgtgtcgcgctcaggcccgtcgtcctcgtccggtcgtccccctctgagcagtccacactcaacagcccaacagcttccccagcttccttccccacccggtccaccccgccccagtctggcagtctgccccttcccttccccctaccgacgccgatccccattccccaatcgcccatggatcccaagccctctgccgacgcgcccgccgcggcggccgaggagcacgtggcgtacccgcggatgtctccggaggacatcgccccgccgccgccgcctgtcgtgccgccggccggcgccaacccctacgtgctctccgccccgtcgtccaacccgccctccaagggtgagtcagcgcccgccccctcgatgcggtctccgccgctcttcttcttcttcttcttcttcttcttggtgatcgcttcgctgcctagcttgttgcggcctcatcgctctggttttgggggatgtatcgccgcttgcaggcgctagggagaatctgagggacatgttcggcatggtggggaagaagttcaacgaggccgcgcgcaagaccgagggcatcgccggcgacgtctggcagcatcgtgagtgcttcgatttcccccacactgacaccaattctcaatactactgctagatgatggtaatccgtagcataacaagtgaactatgctatgttcagatcagcaacgtaccacaaagtaactattgttactgaaataatactccattctttgtgcatctctgcagtgaaaactggacccagcattgctgatactgccatggggaggattgctcagatatccaaggttatatccgagggtggctacgacaagatatttcagcagacctttgagtgctcgcctgatgagaagctcaagaaggcatacgtgtgctacctatcaacgtcgcatggaccgatcatgggtgtcctatatctctcgactgtgaagattgcatttggtagcgacagccctgtcaaatatgtgactgaggacaacaaaactcagtcatccttttataaggtacgtggtgccctcgtctcttgttcctccgcttcggtgtgtgtgtgtgcagtggagtgagttttttggtacttactctggttttgcatcagagtatgtgtgaacttttagagtacacgaccaattgattgctaaatatcgattacttgattgcacattagttatccactgttttatgtatagtatagagattgatatgtgtgcaacaaagttgctacttcctagtatatttatattgacaaaatggaaacggtaggtttgctattcttggtctataaacatctacatgctgctttatttgagtctgaattttggccattgaaagatatactcacttgtggctagttcctagtaacaatcacgcctgatcgtttatgtacgcttgaacaggttgttttaccacttcctcacctgagatcagttattcccacagcaagtcagcaaaaccctgcagagaggtacattcaggtcgtttcagttgacaaccacgagttctggttcatgggtttcgtgaactatgatagcgctgtaaagaatcttcaggaggctgttcgtggtgttcacggggcctagagattgcccattatttatcccctatgtggatgtagtatggccgtgtaaatgtatttgtccatggcacctgtatagttgtgcatatttgtgttgagactggtacacatcattaagtagcgcattcagatccttagcatgtgtactgaacgaagttgactgaaaccagtattgtttggtatactctatttgattgcttgtttcacgagtgaaacatccatttccattatatcacgttgaacaggttatggagtctctgaattttactgactgaaagatatacacacttgtggctaattcctagttccaactatgccagatcattatgtacgtgtgaacaggctgtcttaacccacctgagatcagttactctcacagcaaggaaaaccctgctcagagatacattcaagctgtttcaattgacaaccactagtagttcttggttcatggccttcgtgaactatgatagcgctataaaccttcaggagtccgtccttggtgttcatggcgcccctattgagattgcccatgtatatatcctcctgctgatgtgctatgcccatgtaaatgtgtttgtgcatggcacatgtgtagttgtgttgaaatttgtaccattggacatcattaagtagtgcactcaggctttgtttagatcaaaaactttttggattttgacactg

SEQ ID NO: 3728 - DNA, 2818 bp, Sorghum bicolor
tcatttcaggtatgcatttgtttttgcagatcaaagaatgcagcccttcattgatgtatgtatgtgtgtgtgaaatgtaacagggtttaattggatgatttgatggtactccttatttggtatttactcactacctgacaatttgtgtattttctctcagcttatgaagtgagaattgtatatgtaatctataccattgtgtgcgcttatgtgatggatatatttggtggcacccctttgtttggctacatgttataaaactatataacatgggattctttgtaagatatttccagaattttcccctctccattgcacctcacctttacctttgatgcttttgtggatcagtgcacgtagccctttgcaaacacgaggagccaagaaactgatcaggctcaggaaggaatctcaagatgcgaagttcacataatcagcactgccaggtagatcttggggataaggatacatgtctatccacattctccattgtcatcttcttgtcctggggggtttgcatcatacatgagaagatcagaagaaccgtcgcagcatatcaacggcgactgttccatagcatcatttacacagcacgtcgctgctgatatgcaatgcaaggctgtacagcactgtggtggcaaggcaattgcctgcatatctgataaagattatgctgtggtgaaaaagcttcagataacaaaatatagcaagttgagcagaattatcagacaattgtcttgactaatgatttactcaccaagtatggtgtaactattctaaggaatgacacagcaaatggggcagattctgctactgcgataaggtaagaagagagagagtgtgtgtgtgactttgtgtgagggactgaatgagaccgtagtaggttctctgtctgaagatgctattctgaacctgaagatcaggattcaggaggttgatccctccaatacaaagtgcctgctcttagccagaggaatcagatcctgctgtcatattgtcttgtgacgaagcgatgccgtgttgttgtcggcaccttcgcattctgtgtggatttatgtatttacagtcggaatcaaaggcctgaaatctctgcagggacaacactcagacttccacagaaccgaggagcacttaacagttactactggatagaggaaatagcatgcattgcaccagagatttttcagttactacaagtttcagaattcagactacgagcaacagtagaagaaacttaactgcttttcagcttgtcaaccatataatactagtactgctgtgaaaaaaaaacatatatcactaatatctttaacgtgagtacttggtcagtttgtaaaaatacaagtgtaattgttaatattcttcgaagattgattttgcttataaactatgaccgaagaaaatccccatatatctatactgctctgtcctcatgagtcatgacttttgaaaagatccttatggtttttttttcagatttcttgatatagtattacaaatttggtatgttgtcgactcgtgagtcatgaccagatcgattccaatgttcccagggccccctcatgcttgaacacagacatggattcttatccatccaaaactatccggtctctaataaccaacaatcgatcatgagaatcatttttcagttattatatatagagaagaaccaaatctagctatgtcccatttgcacatattataatatacaacatgttcagcaaatgctatcagttagctgtcaattaagaatagaatcttctgtcttgtatctataacatccaatgcaagtagaagtaggtactgtactacgtaccaacaatccaacaacacctttttgcaggctataaaaggcaagccgtcccacggccagtagagcaagaaaccacatctatcaccatcgaaatcatctcacagaacctaaggagagagggggggggggactagaagcctctagaaccttccggtccggacaagcaaaaacaaggagcagagcgaggatggcaatggagcacgtggcgaggctggcgtcggagcgcgcggtggtggtgttcacggcgagcaactgcagcatgggcgacgtcgtgacgtcgctgctgagcagcctgggcgtgaacgcggcggtgcacgacctggacagggacccccggggcatggagatgcagcgggagctggccaggaggctcggcgccggcgccaccgtgccggcggtgttcgtgggcggcgacctcgtcggcgggaccagcagggtcatggcgctgcacctctccggcgagctcgtgcccatgctcaggaacgccggcgcgctctggttgtaggaattcagagcccgcgtccatgcaatgcaagcatggctggtgacctttttccatcaggtgtgtgtgtacgtacgtgtgaataaaaacgacggtaagaacagggggaaaaaatgggaaacgatcgatgtatagtagaagagtgtgtgacggatgccaggttttttgtgtcctgtgctcggaatggaataaataaaaatgttgcctcttttcactcgaaactactcccactttttctgtgtcctatatgttttcaaggaggatttgttcagggctcttgtgccaatctccacaggcaacacaaagcaggttggagtgatcttgagggatctttgagcttacggagggtggtgatcatgggcacgtctcaacgaggatgtatgtgactggcatggcaaaccactgaacctcgagagagagaaaaaaaatcttgtacctgttaaactttagtatctctaaccaaacactctcttattgacatggctattcaccattcggtccat

SEQ ID NO: 3729 - DNA, 8713 bp, Sorghum bicolor
ttcaatatcttgtctgcactctagagagccaactccggtctctatctttggttgcgagaaatctagaatatagtatattaactagcaaatttgccagtgtgtggcaaaagggaaaaaatctagcaaatgctaatggaaaataacgacagataaaaaataaatctataattcattttatgatgaccgacatctataatataaagttaatgttggcgataatataataatgttctattaagccatgtcaaattaaaatacaaaaccttcacaacttttttacccattgcaaaacacaaaaatatttaaacataaatatgtaataactttatttttgatggtatccagtgttgtgttgctatagttaaatactgagcttcttggttttcttagagaacccataaatatgtaataattataattccaatctctgatcaaaattgacaagaagttagttgttgatgtgtcatcggtgattatgatgagagatgtctcttgattttttatataacacccctcatcgaggattgtagagataaatctatttagaccggattagtaaacaaaatgcttaagatttcaattcatgatgtgattacattggctgattttaataaggataagtttttttttatattcaaaactatatcaataaattgaaaattttaaaaccactggcccaaaaggaaagagctaaaacatatgctaaaaaggaagaaagattaaaaccaagtgggacatatatttgggatatgttaaacaaaaatattataggctacagaaaggacaagccccgtaaaaaggaagaatccgaaaaaaggaaaaaaaaatgagtccaacaaaatggaacaatcggaaaaaatgaaacaagaaaagataagaagtttgtattgcggtggacacagaagaagagattttttaattttaacccttttttaaaataaatttcaaatttgacatttttttttcaaaaactaattcttttggccactcttgaagccatggcggtgccatgcatgctgatgtgatggacctgccgcgccagagatcttgaagtagtgtgttttccatgaccccctaataataaggaaaaagaaaaaccctaacggccgtacagctgtcgtgagttgcgacagcacccggatctgtagtatcggtgtgttttccatgacccccctaaggccttgtttagtttccaaaaattttgcaaaatataaatagtaccactttcgtttgtatttgacaaatattattcaatcatgtactaactagacttgaaagatttgtctcgtcaattccgaccaaactgtgtaattagtttttattttcgtctatatttaatactttatgcatgtgtctaaagatttgatgtgacgaaaatttgaaaaattttgtaaatttttttgaaactaaacaagccgagttgcgacagcacccggatctccgctcttccctcctgcgtttacttctttccttcttttcttggttcacaagccaaaatgatcggcgtccggcgcctcggctccctgctctctggtgaccatcacagccgtccacgttcacgggcccacaatcccgatgctgtacgtacccggggttcgggcgtgcatgtacgaacgtggcaaatgggagtctccgtgtatccctgattccctaattcgccccttcatcatagtctaaattagcaaactcatcccctaaatgagagtctccgtgttctggagtactttatttgtaggtgctgcgaaggttacgttatttggcgttcaattgagggttggaatgaaaagtaggcataggcacgacgacgcagggaaaggctttcgtgcgtgctgtactccgctagtactcctatattaggctcgcccggaaggcgaggagggcgccctcgtccccccgtccgccgccgagtgttttgggaagcgagcaaaccgctcctccccatccttgttcacatcccacgtcgacgcgatcgagggagtccgggctgttgccagcgagcgatggcgagcaacggcttgtcgctggtgcgccgagccgccgaggcggtgcgccgcacgccgcgatggaagaaggggctcgtcttcttcgccgtcgggtgcgcccagcggcctcacctctcctatgcattcccttgttttgttttgttttgttttgttttttgaccatgtgattttttccacccccgttgctagttgattgattgatacgtcaaccgcgccgccgtcgtgctgcgttgggccgtgtgctttggtgcattctgccaccatggcttcctgaattcctgtagtttcattaacttttttttttgaactcaatggcaggagttctgcctttcagctaagtagaggagcaaaaaactttagtttcattagttttcgctgagcttttccctttagttccgggctcggagcaacggcgtttaggagagtttttttttaaaaaaaaggttattcggccggtcgattgaattttaaatttcttgggtatatttttttcttttgcgaatataatttcttcgaatgatgacctgtaacacaacagttttgttacgccatcgtagatccctctccgctatttcgtttccttaacattcattccttaaaacaacgctgggtgcagtccgtatcaaaacattgtgaaatgtgctagaatgcatgatagattagtaaatggatctaatcattctcctgctgatatattctgttgtttatggggtcggaaacaaggattttgtgatcttaaattaccaatcttgcaatttactctggtagatgagcaatatatgaaaaaatgtgaatcagatcatgcttccttattagcctgtttcgtgtttgaatttgcctggtaagagcatctccaaccattatgcatttgaagttatgcattttaagcaaattgcaaacccctaaatgagaatggcaaggctaaaatcgggtgatctccaaccgttatgcaaaatgccaagtcgatcccgcgccaaacttcccgcggcactgcatcccgcgcggcactccttccacgcgcggccaaacagcccgccgccggtctccacgttcagctcgccgccgtcgccctaaaccctaaacgacctaggagccgcggccatgctccgatccacgctcagctactctatatatgatgaatatgcatgattacctggccggcgttgatgagaaaggcttcgtcgcgagcgaagctgtcgaagaggacgcgcgaagcttctgtatcgcgcgaagtttgtggcggcgcgaagccaaaccgcgcgaagggaggggttttgcatagccggactcctttggcatatatgccaagtttccccctccaaatgcatagctatgtaaaatgcaaagtccaaatgcataacgattggaggggttttttttggagttttatgcattttggtaaatgccaagtccatttgcataatggttggagttgctctaactgatgtatgccaatttttagagtgggttctccaggtatttaacttgatttatattgttcatgtattgtaacactctgtgtgcttactattattggtcattgagattgagtgagatgatagaaggtgaaaattttcatttatcttcctatacctggagatgtgattctaattatgagcagtagtatagctttggttcattctactgccttgtgaatatgatgcttccagaattcctaatagtttcaccttttcgtaacatgtttttttcataaacttcagctttaggcttggagcattgttaagcatatatttgtttttcatttggccaatcacatggatttttaaattgcttcggttgatattaaactttgtaaatatgtcacattgttacataattgtaaatctctctccactgatccattgttctgcgcttggtttgttaaaaccacacaatatttgcttattgaagtcagtgtgaaaaccatgttaaaatatgtgccaggttttgtattcgtgagtgttaggtctcatacaataattttgtgatttcgaatttatgatccagcaaattacttgaatatttctggaacatgatgcatgcaattcaaatcagaccgtccttgtttcacactttattcttgttgttttgttgatgaattaacctggtacttttcgaatctgggatttattgagccggcagtaggtgctctagatgtttaaaattgttacaatgtctcatgagaatgaattatgtactgcaatgtcaatgctatgcgtgaatatgctttttattatttgtcatatagttaatgagatagcagaaaaattttttagttcctctacctggaatgtgtttctaattcctcagcattacatgtagttgttcaccatgctgtttgatggtcactaaaaagtagcaaacggtttttttttttttggaattgtttcttgggttgcataagaaaaacaatctttagcccttgtactaaaacacttctattatgaatctcagatgtgtggatatatcaggaaatagtgtcaaggaaacttcagttttaaatgttatgacaatccaacaggcacacttgacttttttacttagtgcagtgtcatttcactttatttcaggagtgacacttttaacttttttttttgtagagctagcaccttaacttttgcttgtcaagataatcgggttcttcaaatttgtgatgggactggaaacaagaagaaggtggttatccttggaactggttgggcaggtgcaagtttcttgagaaatatcgacacatctttgtatgaggtccatgtggtatcacctcgcaattacttcaccttcactcctttgttgccaaatgtgacatgtggcacagtagaagcacgtagtatcgtggagccaattcgcaatatcgtgagaaaggtatgtccatatagttctaaaacggaatatgctccaaatttgtagtacttgatatgatcatttttctaattctgtgtcagtaaataggatatattatggacgactgtacaattgatatgtataataaagtgctagttctgcaactgatttctgtataacattctgtagagaaatggtgcattccgattttgggaggctgagtgcttcaagattgatccagcaaacaaaaaagtccactgcagatcagatgttgggacgaacattaatggaaatggcgaatttgttgtggattatgattacttgattgtcagtgttggggctagacctaatactttcaacacccctggtgttactgagaattgccatttcctaaaggtaagtactgtaaggcctagtgaagcaatgaagtacctacttgaatttacaaacaaaggttttgcatgctctttatttacttttatgtagattccagattttaccttgggtcctacaactttgatcaagtttttagaaaaatacattaacatctacaaagttcaaataaatgcactatcaagatatgatttatggagaatttttaatggaactaatttgatgttgtagatattggtgcttttttctacaaacttggtcaaagttagtgaagtttgatttagagcaaagctaaattttattaattggtttacttgtcgtgtttatcaattacctgctgttttatgtggtgatcataacctttttttaatatattttgtacaattgagtggcttttgatagtgtcactattgtaggaagtagaagatgctcaaaagatcaggaagagtgtcatgaaatgttttgaaagagctgcccttccaaacctttctgaggaagagcgaaagaagaaccttcattttgttgtcattggtggtggcccaacaggggttgaatttgctgcagagttgcacgactttgtgaatgaagacttggcaaagctgtatcctgatgtaaagaagtatgtaaacatttcagtaattgaagcaggaggtcatatccttacaatgtaagttagttcgatgcttttaacccctttgatgtttacttcactcattctaattaacccacaggtatattgtggagacaacaaatgaaatggttagacgtgtctttgctcttttttctttcttttgcaataaagaacaaacaagtgtttctgaagatttggtgtctcataattgctattttttatgtgccgtttcatatgtttatgcagttataatatgaaaggttcaagaaaaatctcctgaatcagtttatatgtttaatgcacctgttgtctcctgatatcttagatctgttgcaatctttttataatatttgatggtttatttaggtttgacaaaagaatcacccaatttgctgaagagaagttcaagagggatggcatagatttgaaaacaaattttaaggtcgtgaaggtgtctgataacgatattaccatgaccaatactgctacaggagaggtcactgttccttatgggatggcagtttggtcaactggaattggaacccgtcccataattatggatttcatgaagcaagttggtcaggtatagtatatcgtgtattcttgttctcctccattcacgagtgaaaaatgtccatgtacacaccaagttcaatatcaacatgacttctgcaggggaatcggcgtgtgctagctactgatgagtggcttagggttcaagggtgtgaggatgtatatgctcttggtgattgcgcaacaattgctcaaagaaaagttatggtacgttgctattgaagttttaaagcatgttataccaataagcacaccatgagtatgctacctatttatcaaaactcatggcctcctctctttgttgatttgttgaaactgacacctgcatctagcttgttcttaagaatggcaactgtgtgtgttgtctttacctttttttataatctctctaataccaaaagtatctgctgtcttcacacagagaggaaccaattagaaaattgttgttgctttagtgttgatttcctagctgctgatatgtctgttttgtgaacacaaatacaaatacaaatactttgtatcaaataaattttgtattgtgtcagctagcacaatcttcttacatgcatgtttaaagggatgtattaatggatttttcagtagtatgctgctccaatgttttgcctagcagaaatcaattatattacttgcggtcatctttatatgacatttcaggctgcaaaataaaactgcaagcaggtcaaaatcgctttctgaaatatcatatgaagctgactgggtgcttacatatttattgggccatattaactttttcaggaagatgttgctgccatattccgagtagcagacaaggataactctggcactttaactgtgaagaaaataaaagatgttcttggagacatctatgagagatacccgcaagtggaattgtatcttaaatccaaccaaatgaagggcttccacgatctacttaaagactcggatggtagctccaaggagttgaaagaactggatatcgaacagttcaagaaggccctggctcaagtggactctcaagtcaagatgctcccagcaacagctcaggtattcacgtgtagctttagaggcgagctgactcatcgagttcagagagtggaaagatcacttctgtaatttatgtgctaacctcgcactgcttgttggttcaggttgccttacaagagggacgttacctagcagactgcttcaacagaatgaagacgtgtgaagaatatcctgagggtcctataaggatcagaggtacagggcgccatcggttcaaacctttcaggtccgttttccaaacttttatatgcctccacatggaggaagtaaagtaactgatctagattactaaattctgtcaaaaacatacatgtaactttgctgtacttgatggttgatatgtgtaactggatgttacttccatttgcatggctatgattgttcatccggaacctagcaattactaatttttgtcttgtgatgtacaggtacaggcatcttgggcaattcgccccactgggtggagagcaaactgcttatcaattgcctggtgactgggtacatgttggacacagcacccaatggctttggtattctgtctatgcaaggtatgttcttgttccggtctcagtatgtgctatcttagatatctaattgaatgctggtttttattgtcgtttgctcttgttaaatacagcaaacaattcagttggcgtacaaggatgctggtcgtatcagattgggggaagcggttcatctttggaagggactcaagtagcatatagattcaaatctcccgatttcgtagtccacctacgttctagatggaacatactgagagattcttgcatcagttttgctgccccagtattttggaagcttagcctagcaaggtttctgataccaaattttgaccttgccaattcttttgttacctcgtgatgcacactgagcgattcagatgttattcgttttgccttggacatatgcatttgtttttgatgtagggcaatagggcaatatgttatctgttttgattctgtcagttttgagttatgttgccactggtggtcaagtatatatttttgctaggtttcttatcacctttatattggtgcctatatgcctgatgagaatctgctgcatttcccccctagcgtgtaaacatgtactcaatccatcccaaattataaaacgtcttataatttgggatggagtaactgttattaggctgctgcacatgcaccttaagaaaaccagtcaactaaaccagtagcaatgccga

SEQ ID NO: 3730 - DNA, 183 bp, Zea mays
taccactagcatatatgccatgctttggtgttggtgctgatgaagatgaaatgggatcccaaaacatattacaaagggaaaggatctctcatccgtcttgcgactcttgcagctcttgcaagctgtatgccttgctctgtagtgtagtgtagtaacccggccgtacctcggtcgtgaccacgc

SEQ ID NO: 3731 - DNA, 6699 bp, Sorghum bicolor
tttaggtctagatcaatcataaactagattagttctagatcaattataatttataatttataaactgtttaggtctagattatatataaactggattcaatttactgtgctgtttgagcttttgaacaaactttctagttctttgggctctgcgtcttacaacgttattggtataacatcttactgagactgtaatgctaggtcattttggattcacaccgttgggttgtgatgccatctgttggctttgtcacaactagcaaatggagttgtggatgagacttctgatgatgctccaccttctgttttaatatagcgtccacctcttgcagtgtttgttaacggcaagttctgctaaatcattcttagtattttgcttctgtcattctgctcgaacaaaacttatggccttgtgagtgcatgcatggtagatcagtggttttgaatctgaaaaaagagcattgcttgttacagcacgcgtgaaacaaaactgaatggctcagagccttacccgtcaaccctaattgtaaacagtaaacattcgtgtttcgacacagcgagagctcacatcttacttccccattaattttttagctgttcattgttatagccgatacctagatgtcttagagtgagtgtgtccagcctgaataataatcaataatatgatatcgtacagatcatgttcaccgcattgttgactgcacatccaaccaagatctgatttataagtccatccttggagatatcattgacagaactaacaatattaatatttttctttatctagttccatagattaaattgagtagaacggagagtgcaagcaaagtataaaatcaaatggagatggagtataaagaacagcagctggaggaggctgaagccaaaatatgtggcgatgacgactaggccggtgatttgtatgcgtgcgacccatgccgttgtgcatctcatctcatctccttatcctatactcaattcacaaggagtatcttattcttcatccccttgtgacaacaccaacgcatcaaaaacaaacaatactcaattcatctcaaattataaaatattttacttttttaacatcaaatttaaccacatattttatttaaaaatttacccaaaatattactttttttttgttgtggtttgatttattaataaaagtttttttaaagtaacttaaatttaactatatttatataatttttttgaataaaataagtgatgaaatttaagattaaaaaaagttaaatattttataatttaggacggagagagtacagacatacacaatggcaatacgaaggatgaaggaaaaaacacagagtttgctggattttactaaacgtagtaacactttaggccttgtttggatgttttcggattcacctcaatctacatgtgtcggagtggattagggtggaatttagttcaagtttcactccaatccaccccaacacatgtggattgatgcgaatctgactacatcctttttaatccatttcttcatgtaagggcctgtttggtacagctcacaacagcttcatgagctgttgtgagctgttttttttttgccaaacacttatttccaaaacagcttcatgggtgaagctgtttttcccctcctctcacaaatacataagttggatgaagctggaaaaaagtagcttattgcagcttctctctcatttctctctctcaactatgtatgaagtagttggtgaagttattttgctaaacactttttccaaaacagttcagcttcatctagaaagtcactcatgaagctattttctaaaaaaaacagctttactagtgaagttgagctgtgccaaacaagtcctaataaaataaatataagagactggcagacgggctggcacagttagcaatgaaagcggtgggcccagcacgaggctccatgaaaagaagtccatgtccatgacgtcgctttaactcatcctggatggaccaaaaggaagcgcctccgcactccctttatcacggcattttacctggaggcccctgaccgccctcgctatttacatccctgccaccctcctctccgccgccgtcgccgccgccgccggggatggggggagcgcagttcctcggcgacaacgacgtcgtcgcggcccgcgacggggaggcggtggaccaccgccgcgacgtcggcaagatggagcacgggtgagcgagcgcgcgcgcgcgcgcgcgccttgaatccttcctaattcgtgctccccttgcttgcttccgacgacggaatattcgattcgctccttccggtgccgaatcgctctgcgctacgtggctggctgatctgctatgttcggtttcgtgtggctgcctgatttttgctcgttctcaccctttgttttttttttccggatccaaggtatgcttaatcatctgctcacgtcagaaattttgctcgtcgccgcaggtgcgagcattaccggcgcaggtgcaagatcgtggcgccgtgctgcaaccaggtgttcccctgccgccactgccacaacgaggctacggtgagctagtgcctctccccctttttcctcagaggctagtatcgtgtggctttttttatggagtaagtagaagagtgctctctcggtttcaaagtgtaaatcgtttttggctttactatgtatgtaacttttgctatgcacctactacataacactgtgtctagatatatagtataatcaatatatatgtagaaaaagccaaaatgacttatagtttggaatggagagagtagtttggcagcttgtggaaccttatgtcgtgcttgacaattagctagcacattggcatgcatttttgtttgcaccaagggggattgtataggcatagctattacatttgcacctgaaaggtcaatagtttggctctatacttttgttactcttagatgttgactgtgttcattttggttaaattatggaattcaatgccagtaatctttgcggcgtacagaagtgttcgggcaataaattgtgaaacatgaaacaatctccttagcagattacatatatgaatctgtggttcctggattgggaacttgatagcagatttttgaaattgtgcctttagtcattctggagcaatgaaacataacgggtgtatgaaattgtgcctttagtgatttttggagcaatgaaacataatggatgatgacattgtgccttgtaaaatcgaaccgtctggttttggcactctggaatgggaactttatagtagatttcttaaattgtgcctttagtcatttttggagcaatgaaacataatgggtgtatgaaattgtgccttctaaaattgaaccatctggttttggcactatatgcaaagaacaactaatgctagggcacttcttgttcttttaaaaaaaatgtgaactctgttggttctttcttcactgtaggcttctggagatcggcatacaatagttcgtcaggatgttaaaaaagtaagccttccatgtttttctactttctagaattaattaattgactttactatgttcagcaaatgtggaagagtaactctgttcattcctgcaggtagtttgcctactctgtgaaacagaacagccggtatgacttatttattcagtgctcatgtcatgtaagggttattgtgcttaaactgaaacttcatttttgctgtttaggtgtcacaagtgtgcataagctgtggagtcaatatgggagagtacttctgtgatatatgcaaattttatgatgatgatgtaagttttaagtttcattgtttttgtatttgctttgtaccatttaaactgatgcatgttgctcttttacagatagggaaagggcagtaccattgcaatgattgtggcatatgcaggtgagcacaaagaaactttcaccaatgtataaattattaagctgatttctgagcaggtttctcacttaattcaaccagggttggtggcaaggaaaaattcttccactgtgtaaagtgtggtatgctttgcttcaaccaatttgattatgtgattttgagttgaatgttcttccatactccatggtggtgattcaatgtttttccatacgcagcagtggtgattttgagttgaatgttcttacatatgcaacagtgaaaattttctgtcaactttttgtctctaatgagaaattttcatacccccaagttgaagcctgcaatggtatcaatataaatgattattaaccatctagggtgattgaaattcagcaacaaagaaacaacattctaaattttatattcactggtaaaactcgcatgtgcctattctttgtgtggtaatgcttatgttttatatctctcttttctttttctgcaatgcacagggtcttgctattctgttgaactgcgtgataaccatcggtgcgtggagaactcaatgaggcagaattgcccaatctgttatgaggtaacatccatagcttgcgctgcttctgaagctatctagatattataaccgggactatgtctgcagtatctatttgactcattacaaggaacaagagttcttaactgtggacacacaatgcacttgacatgttttgaagagatggtggagcataacaagtaaatctctacacctttttgttaatatagaattatattgatacttcattttcattctttgaacctactctttgacacagttttgtttatgtaacttctattggtgtttgatgctacagatacacttgtccaatatgctctaaaacagctcttgatatgacacgtcattgggagatgttggatcaagaggtatcatatatctttttcactgctagaatcttgtatactgacagagaaacaatctttggttgtaatttaagattcagaattctactaagatgtgtgttcctgtctattaccggaaataatctggaagcagtgtaagaaaaacaagcctttcagcaatcaggagacactctttgcagatgatatgatatagtaaaaatagtataatagcattttggttggacatgtcactccagaaatatacttttgtgctgaatttgttttgttctgggcaactatattatggtgtttcctggtgcttgctgaatgactgatggctagctccttgtctttttgtagatcgaagccacaatcatgcctcctgtatatcggtacaaggtattcttcattcctttctggtgtacctatgcagcccaactcccagctagcttagtacattattaacccaaggataataagttcataacttagttattggtatgtaaattagaaaccttcactgaatggcattttccataacctacctacaaaacctctctgcagtcttcttatgctgatgaatcatctatgctagtggaataataaacatcctaaaggagggagctcccttatgttgacgttctgttctatttttggctagccatttgaatagatcagaagataatattgccatgccggttcattcgatgtaactaataatgattttgtcctctgcgtgaaaaaaatggcagatttgggtgctttgcaacgactgcaacaaggtctcagaggtgaacttccatgtgatcggccacaagtgcagccactgcagctcgtacaacacccgatcaacatcgcgccctgcagattcatcgggaagcagctcaccttcgacagactcatccgacaacaacatgtagagaagagaaaaccagtggtgccagaaccaatacgacagaagaaatgaagaaggaacattgttttgcggcgtgcgtgcctgccaaacttgaagactcccagccatttatttgccctcgttttgtcaagattcgactcaatccatgagtcttggctgtcgtgggaaattccagcttcggcattgctgggttaacccacatggccagcgtagatgtttgttggatcttggtcgcagccagtcgtgattgtatcaccgtgggtgaaaacccagcatgttatgaatcgcatacttactgtaagctatatagcagaagatgggtacggggtacccctgactgatgatgcctggtctgtgtgtatgtgcgtgtggtgaactgttcctgaattgccgtgctgctcagtagcactaaatattgcgtttgggttttctgatgatctgtcagggacccccaaagtgtgcagtgaaattgtaatggcattacacacttgcaatgaataaataaaatcttataatagaaatatttattgatggcatgctgtggaaaatcaccacagtcgatgacaggtggacctgccgaccgcaaattcaacctgcccgtggctaatgctctgttggatggagggacactgccgctgcagacctcgccgccggccaccgacctgccaccgcgtgctctggccgtcttcaccaaggtacatgtgctctggtcgtcttcaccaaaggtacgtaagcgccctccctgcttcccttacttgctctttcatgtggcaacttggcaggattgccgaccctgccattgctaaggttcagtccagcagtttctcggattgctgattgcgatgcatccagttcaggctttcagtgcgccatggccatggagctgcatgcggcctgcttgctgcctcttccgctgtgaactgaaaaggtgaaaaatgcataagctattatctgttgttttggccattattatgcgtctgtgccctgctaccagattcgtgagccaatcttca

SEQ ID NO: 3732 - DNA, 5066 bp, Sorghum bicolor
cagggaacaggtaaaaaagctcgcccactcgcacgcggtcctcaaggaccattgtgtagatcggagagatgcagatgcagcgatgagttttgatgatccggcccctacccgtgatggcgtgatgggcgaaggagagatcaggaacaggggacacgccgatcagagatgacgatacactgacccatcagattgggggtccagtagcaacggtcaccgccgggtccgggattattgagcaaagcagatggaattgttctccttgtcgatgcaagtattaagggtacagttgtcactgttccaacactgatcacttcacgtgtgtgttattagagcaagtattatagtgggctgtaagctggctaaatactgaggtggaggagagaaaagaggagagaggagaagcgggctgtaagcttacagccagcttaggcacagaaaccaaggaactttgtgagagagacaagtgggccatgtattaatagtgaatagctaactattgtatggatgggctggaagaaggctgtaaaaaccttacagccagcgagtgggctgtattattaaatttgctcttagtagtaaatcgatgaagagacagccttttttagatatcgaagcaaggtggggtcaatttgcatttaacccactggcaacaccacgtagagtctattttcggattaaaacgttaagagcctgttagcttggcacaaaagttatggctaaaagcactattcgctgatttattgtgaaaaaaaatattgctaaataattgacaaattcggtagataagctcaagcgaacatgctctaaattttgactacataacgggagaaactgtttcatactagacttgagaattatcaaggacttaaacttatccatgcctaaactggtccataagtgaattgacatccatataatagtgcagatacatggttgcacatcttaagtatgaaagtcatataacacgtcttaaattttgggtctttggtggtgcctccaagcagagttgtctagtcggacgacaaaccatatcattaattttgacactgcctaggcgacacgctacttggtaaatccaaacatattgtggtggaaatgaaccagcaccacctatcacgaggtctagggatcaagagcctctttgaatcatgtcgtctcaagcaatgttttgctagggaagcgaacattggcctcagtgtccgaaatcgaacatctgggtgtgctgcttggcctaggcacttggacaccgccatcaaccaaacaagcctcaaatcccaaacttatgtgcctcacataggtctaaaaaaatacaaaattcataacaaagagttgaacttaagattgggctccaatgattaaacaagcctgatatttgagtagttttgaagttttaatgccatataaaaccaaatctacttttgctggaatttgggacaggaaaaataaaacaggaattgcgaattttggtaggtgcgacggtgaccggcgaaaaaaaattaagcaaagtagtatcaaaatcggtgcttaaaagtccacgtagctaatgtatgtacgtatgcgtgccactatctctttattatgtcttgaccacatcaatcaacctgtaaagtatgggattaggctggatggatataggtcatatatagaatagcatcacagccgtgataccgtacaatattatactacatcatatccagcataattagctggtggtcagttgcaataatcctcagaggacttgttgtctttgtctccatcgggtagctagctagcctgcatgatcgccgtgcacacgtccagcaggccagccgagatcagcgcgtcgcgggggcgccctatacgtccagactgcttttttatttgcgaatgcgtacttggcttcctaatcccatttgaccgaattatacaagtagtaataacgtaacgtcccgaggtcattctggtaatctagcattttcgctcagcctataaattgggccgcacccaccgcctcgctctccacacaaactcagcctgcctgcctcactgactgtcaagctgcaacccacagcgatcgagctagtgagagtgagagacgagagttagagagcgagatggcagccacggcttcgttcccggtggtgaacatggagaagctggagaccgaggagaaggccacggccatggagatcatccgcgacgcctgcgagaactggggcttcttcgaggtgtgcatacatacttactgcatacacacaccaccagcaagcacacaacaattaaccaacgcacacgcaccgcagttggtaggtcactagtaatctgaccacgcacacagcaggaagattgttacagttgttattgtttgcctgccccggcccctttgttcaacatcaattcgttctggatgtcagtctatatatctactagcggcgccgttccagaaaaggcaaagcattctctagtactagctagctagctttacctaacaaacagcctgctcgaacgtacagattcctattctccatgccatcgaccggccgaccaatttgattctaccacctcagttgcgtcgcccggccgccggtcgatgggaacaccaccaccacctcaccggcctcctctcacgcctgctggctgagccctgaccactaacgagtacaggatcttattgtctcgatccccttgcagctgctgaaccatggcatctctcacgagctgatggacgaggtggagcggctgaccaaggcgcactacgccaacttccgggaggccaagttccaggagttcgcggcgcggacgctggaggctggcgacaagggtgccgacgtcaaggacgtggactgggagagcaccttcttcgtccgccacctcccggcctccaacctcgccgacctccccgacgtcgacgaccactacaggtacggtgcagtgggggtgtgttcaaacttacgtcctagctgatgcgctcgtgcgcgtcactaaattaacgacgatagtcgttgccaatctacgacccaatcagtcttttgttaaagtttttgttggcttctgacggaaaaagctcaaagtgccatgtcacccgcttttgactcttgtctctaaaccagtttttttttaatcttataatagtctcagcttgggtgactttggtctaccaggctgagctagttttatggctttgatgcaagcctacaaaagctagctgtcgacccacctatcgtgctataggcccaatcaaacgctaatttgtacgtacacgtctcagatcagaaaggctcactacctgacctgacgtgaccaaacctgctccaattaacggtggtggtagactagtactagcgtgtgttccgtctacagtatcagaattttgcctgacggcgacgcgaatagttatccgatagatcatttcgttgttgcttgacaagtgttcatcagcagatcgaatgctgtgttagtccagtaactatcacaagtcgaatcacttttttagcaggtgatcgacagactacagtgcgatcgatcatcgatacatcgatcgacaacgcgctttaatttgttcggtggaatattcctcccgtgtttaaaacggcttcttcttcttccttgtcactcgctggctgctgcaggcaagtgatgaagcaattcgcatcggagatccagaagctgtcggagaagctgctggacctgctgtgcgagaacctgggcctggagcccggctacctcaagtccgccttcgctggctccaacggccccacgttcggcaccaaggtgagcgcgtacccgccgtgcccgcgcccggacctcgtcgacggcctccgcgcgcacaccgacgccggcggcatcatcctgctgttccaggacgaccaggtcagcggcctgcagctgctcaaggacggcgagtgggtggacgtgccgcccatgcgccacgccatcgtcgtcaacatcggcgaccagctggaggtgatcaccaacggccgctacaagagcgtcatgcaccgcgtgctcacccgccccgacggcaaccgcatgtccatcgcctccttctacaacccgggcgccgacgccgtcatcttcccggcaccagcgctcgtcggcgccgccggcgccgaggaggagcgcgccggccaggccacgtacccgaggttcgtgttcgaggactacatgaacctgtacgtgcgccacaagttcgaggccaaggagccacggttcgaggccatgaagtcggccatcgccaccgcgtgatgaacaaacacactgctgccttcaattctgctccttgtcccttcgtgtcctgcattatgctttgagcttgaagccttgatgaggctgcaatgaacagtgtccatgtgcttatatgtagtttggcacggtggttatgcgtgtatcgtggaacggcgtaatgtattttggttgtctcggatctatatgtatgtacgtatatattgagtactgtatgtaaagtgtgtgtagcatctgatccaatgtatgagcagtgtgtacgtgaccaggacctgatgtgctgctattactaccacctcaagtggagggaacatgaattattagtagttctcatacatgtgagttatgtgcctcggtgacgaaccccagattgaaccatttggtgtatggaaacttcgatattcattccccacacccaggtattcacaatcaaaacggaatatgtttatatgtcgtgcatggaaaaacaggatgtcccaactaaaaagggcgggcaaagtgagaatcatcgaaaaatcaattgtatcccgcctcatttttctagtttgccaagatagagaaaatgaaatgattgaatgaccacaaatatgaattcgatcctcttaaacgtagcaattggatcggggcgaattgagatttactctgaccgttttcacatctaaggccgaccaacaagtataaatcgccatctctggtcttcaagatcagaaaatgaacaacaacatgggtttgaagaaaaaatagggtttagctaatttgtttgactgcataacctcaatcagttatggctctttatatttatagtgtggagagggtattgtcttgttaaaagatgaagggacgaa

SEQ ID NO: 3733 - DNA, 4476 bp, Sorghum bicolor
cacgcaggcaggcagcaccgggtccgagacgatgattccggaaagcgactcatcaggcttattctgtaagagcaactattataatacagctggctgtaaattttttttatagcttttttatagtccacttatataatggttagctcatcactattaatacatagtccatatgtctgtctcatagacttttttgtttttgtgtctgagctgtctgtaaacttacaacctgcttttactctctttcctcttctctctcctccacctcggcatttagctggcttacagcttgctataatacttgctctaaggccagtctcagtggagagtttcatggcgttgtttccaagactgccatatcatgtgaaatgaaatgaaacttggatgaaacacccaatcacaatggagagtttcatttcatagtttcatagacatttaattccaagactcataaagagttggtaatcgtgccaagagagtttcatatagatgaaactcatttcttctctctcttcttaaatacactgccatgtcatcaaaaaagcctatgtggcaacatatttaatgcaaatgaaactcacataaaactcccattgagactggcctaaagacttgtttagtttcgatttttttttgattttgggttcagtgataaatattatttaattatggattaactaggtttaaaagatttatctcgtgagtaaactgtgcaattagctttttgttttcgtctatatttagtgattcatgtatgtgtcacaagatttgatgtaacgaggaatcttgaaatttttttagtttttagagtgaactaaataaggtctaaatcatatttttttcaataatgttttttctttaataaatcaacgaacaatacttttagttgtgacttttcagactagagattagtaaccacctaagcattttcatttggctaattagtcaggactaaaagtactgtttgctgatgacaattaatattcaattatggactaattagatttggaagatttgtcttccaaattactctctttagtttcataaatagtctatatttagtacttttaaactttgacacaagttaaattttggtcttgtttagttcctcatccaaaaatttttcatccatcacatcgaaactttgaacacatgcatgaagtattaaatgtagacgaaaataaaaattaattgcacagtttggttataaaatcgcgagacgaatcttttaagcctaattagctcataattagtcataactgctacagtaacccacatgtgctaatgatggattaattaggtttaataaactcgtgtcaccgttttcaagtgaggtatgtaatttgttttctattaatctatatttagtactttaaatatgtgccgacatatttgatgtgacacccaacaatctttgttaactaaacaaggcctttgccgaaaagaatcagaaaccgctgcgggaggaatctgcggaattcccacttttttttgcattattattagaagaagaagaaggcgggacccgccatttgaaacgaaacgctaagggtgtccgtaatggtattcaaatcgctagctatttgatctctaggaagaatgttattgactctcaatggtaatttgcaaatagctagcttaagaagtcgctagctatcaggaagtcactagctattgtggagagtattgtgagagagttatttctagaagattgtgctagattagctatttatgagtcgctagctatttgatctctttcctcgatagccaatgagagtgctacttttttattatttttatacattatctcgctagctatttgtaaagtgctattgagagttaatagaatttctcctaattagctatttgataatcattgcggatgacatagagtgtcctgccgcgcactagtggtgtcccgtttcttccagaaatcattgtgcgtgctgtacaaggaaggaaggaacccccagctgtccatccaaccttggggatccgatcccgtcgaggagcgaggaggacagacactagagggagccagtcagcgctacagcacagccatggcggaggaagcagcagcgccggcggtggcggcggggacggaagccgcgccgccgccggggaagatgacgatggtggtcggggtggacgagagcgagcacagcttctacgcgctgcagtgggcgctgcagcacttcttcccgccgccgccacagccgcagcagtaccgcctcgtcgtcgtcaccgccaagccttccgccgcctccgccgtcggcctcgccggcccaggttacaatctccatctccatctccatccaatccatgtcccttggcttgtgtcacacgattcggcggaggcttccgacatctctgatgattccctaatcgatgggttgggttcggttcggttcattcaggcgccgcggatgtgctgccgtacgtggaggcggacctcaagaaaaccgccctgcgcgtcatcgacaaagccaaagcactctgcgcacaggtccaatccaatcccttagcacgacttgaatcaatttttttttttaaaaaaaaacagcagtaggagatcgatcagcttgttttttctcccccaacctcttcgcttataaattccattcccatggtatggtatgatgtgctgcaggtgagcgacgccgtgtttgaggcggtggagggggacgctaggagtgtcctctgcgaggcggtcgagaggcaccacgccgagatgctcgtcgtcggcagccatggctacggagccatcaaaaggtcttgcccatctcacctctctgtgctacctcttctcttctccccacccctactacaatacatagtacagagttgttgccatcttcactcgtcactgattgcaacgacaaccactaacgaaaaagctaaattgagatgaatgaacaaccatgattgccatgctcatctccttgaaattgctttcacatcgtcatcgatagtgtttgttagtgatgttcttttcatgttctacagcaccacctttcctctgtttgcctttcacatggtttgtagctttccatcatctatgcggcaaaacagaatatcatgattcatcagagagtaatgtttccagcaggcacttgtgggcaacatacaaaactcctaaactctagtatatatgttccatgaccaatgaactagcctaaacaagaattattctgtgtgtctgatttcgcattaaccaagaatgaacaaggagcctaatccttgaaatctcataatctagaacatactataactcacaaataccctcctagtattggcaacaaaagaaataactatttcgaaagatctatacactcgtttcgacctgtcttctctacacatatctttttcactctctatctacattatattctattgaacaatttactagagtggccattgctttacgtttcaactcaactacatccctttcctcgtctacttcaagtgtctttttccccctccataaagatctacgtacttcaagtgtcttcttgttctcagttcactttcgtattattactgactatatacatactccatctcctccctcagggctgttcttggaagtgtgagcgactactgcgcccatcacgcgcactgcaccgtgatgatagtaaagaagccgaagcatcacaagcactgatcaatgatccagtttgacagatcactacgtatacttcaaataatatgtactgcaaagttgtgtatatgcgccagtttgtgaataattggatcatcaaccatcacacgttcggttgcttctgcaagtagtatccgatgcatgcatgcaatccttctacatggggattgggaattaccaataattgattgttctctgaacctcaaaacaatgtatttgtatcaatgtgttgacgtatatgtgattgcaacttctttactgtgagctgtgtgcgagtatgtacattttattaggtaagaaaatgttatatctaccatcacaacatgacaagggtgatgcacatggtgtactcagtctgatacgtgtttatttgttcgtttggctgataagtcacggcagaaagtactggtggttgatttactgtgagagaaaaatactgctaaatagttggtagattcggctgataagtccaatttatcttttagaccaaaatactgtttgtttttgttacccttttgtttgctgtgttgctagccggccgtagcttagtttgaggatgatgttggttttgtctgttattaggctaggctagatgcaggggttttctggaggcagatactttatatgcttccaatataagtagctagggctaatcctttttggtctaaaagataagggtagggtgtgctggatttgaaccaccttagaaatcaaactgaccgttgattttattatgaattcgtttattttatttcactttgatgtgccgtatggatgcaagcagccaagcagacgagggccggcctccttttctgcta

SEQ ID NO: 3734 - DNA, 6784 bp, Sorghum bicolor
ttattatccaagaacatgtaacctgtctttatcatgctatgagtatctcattaatcatgcatatgcacctctacgtgtagactacgctccggaggaatctaatcctcagtgggttgcttccgagtttgtggatccatctggttctgctgagttgtcggacttcccttccggccaaggcaagccccggacattaaaccctatccttgtattttcataaagttatttatatcacttgagttaatatgatgcattaggtgagtaggagttgagtgaatcctatttgttgcattaactaccttgatgattcttatattaaccttgatacttgttttatgaaaatacttagtatgcttagccctgcctattagataggttttaaaatgagaaagtttgaagggttgttgtggaatacttttatggttaataatgtttaaacttgagaccggtcggtggacttgctttaagaatggagtcttaaagtagcgtctccaactgtgtcgattaaggaccgttccgttggtggcctgctgtgattgagacctttgagtacagcccacatgcgatggtaagccttacctatagctattccgatacttgagaacggctaaccgcgtactgggagtggagagatggcgagagtagcgtgtacccaccttacggatctgagatgaccgggaaacatctagattggctgtaggatggtggtgtactgtactctcgggtgacgctggacccgttcttgtatgggaggatctatagaaacaggttgacatatgcaagattaagttctacatatgtcgtgtggtactgaatccccagctgggtttaatcgattcgaatcgccgtgtttcctcggttatggagcctcaatcctcaccccatcatcgtagtaataaatgaatctttggtataagaaagatgtggtttgcttatgaaagtttgataataattttggttcgtcataaatgatgatcttgagttaaaacttgaatgtaggttttactcttagtaagcttttatgcaaaagaaatgtcttgatcttgctaaagccttactttgaatccttatagcctgcatacctgagtcttcacctcttttctagtcggttaagtcttgttgagtacttctgtactcagggtttattaacccctgttgcaggtgaaccctttgataatccttttgatggtcgttgtttcttcactcttgtggaggagagtgatgatcatgaatctgatgtgtgaccttgggcaagtaaagcaagttgtgtgactaatggtttatgtaatataaagttccgaaccttttatgtactaaatccttatggcttgtaacctttggacttaagtttcaatctatgttatgtaacctttccgcttttactctgatttatcttatctatgaaatgttgtaatactgtaatgcttaatgagggaattcctggaaagaatgtaacgtggatgattcgggtttcccgatgacacccgacagacttcttgaatcatttggaactcatgcacgccgatcagaagtctttgggacaatgatgggtgcatgtgggccacttaatttaggaggttctgccacaattacacacctgtaatttgcgagacgtaaatctaaaaatttttacaattttttaactaaataatgcccaattacaaagagcttttcaacaccgacggacgagcattactaggaacttgtttagttataaaatttttttagatttggtactgtagcattttttttgtttttacttgacaaatattatctaatcatgaaaagtttttagtttttttttgataaactaaacaagacctagacgtggttttggtcaagcagcaactgaaaaccatcggacgtactgtatgtatggacgagcaaatctttaatctttaaataaataaaagattagaaaaaagcgagacaaaaggagcagatggtgggacaccactaggctgctacgtgtacaacaagtcattcttccccaaatcagcctcactgttgcaaaggttcggagcaccccgcactacgcttgctctccgtctcgcacattccatttcggcatttcgaaccaaaaccctctctcctcttgcctccacctcggatcaaatcgccaccgaaaattcccccaaaaaataacgagcacttgttcttcatcagagttaacgcggcagaaccctagcgcggcgttcctccgacgactcaccacctcccgcccactcacccaccaccccatggcggccaacccctccatcggcgctgacgtccccgcggccccggcggcggtgcggctctcgtcggcggcgcaggcggccgcgatccagccctcctccccgcgcttcttcttctcctcgctggccgggaccaacccggcctccccgcaccggcgcatcgccatcgccgtcgatctctccgacgagtccgccttcgccgtcaagtgggccgtgcagaactacctccgccccggggacgccgtcgtgctgctccacgtgcgccccacctccgtgctctacggcgccgactggggctccatcccggtctccgtcgctgacgaggctgacgcggccgaggacgccgccgccgccgccgtcgagggcgggccctccgaggaggagctgcagaagaagcgggaggaggactacgacgccttcacctccaccaaggcgcaagacctcgcgcagccgctggtcgacgcccagatccccttcaagatccacgtcgtcaaggaccacgacatgaaggagcgcctctgcctcgaggcggagcgccttggcctctccgctatgatcatggggagccgcggtttcggggcatcccggaaaggtggcaaggggaggcttgggagtgtcagtgattactgcgtacaccactgtgtatgccccgttgtggttgttcgctaccctgatgatgctgcaggtgccggtggagatgcagcaggggcgacagatgagttgcacactgtaccagaggacgaacctgtttatcacgatgcgcctgaggtgcagaaaggtttgcctcttttcttttcttataactctatatgttttcactttaataatgctgattgactattttgcagtgaagtgttttatgcaacgattgagtatttaactttctgatacggaagacaaatgttagtacagtatagttgatacaataaggaatttccttcagttatttcattatttgttaacctttggtctcttgtaaaaagttctagcgtcaacaacaagcctgatagcgcgctgtgtttcatggtactactgtcctcaggcttatttaaagactcataaatctttttggccaggcaaattagtttatgttaaatcaattaacttgcttcaggctcttgtaaactgttaagaatactgatagtttttaacgctacattttgcctgttctcttagaattgtaccaggacaataccatcgcagtggcaaatctacaagtgtacatgatagtatggtgaagatacatctgcttctgcagactgcatatcttcactgttaatattgcttttttattccttgttcaatgcaagaatctgcaatgcaatattcctgtgtattttgctataaaatgccactgtgcttagttggttatgctggatagtgtacattgaaacattgaggaaatatttgctcggatatgattttaatgtgtttagagtaagcacaagaaatttatattcaagagaacaacaattttgcagatatttagcaaacactgaaccttgccaatcagaattataatgtcaatacctatattattagttgcacatgtggcagggcagcaggagttgggggtgttacatctctagttactttttattcatgagtggataggctgattgataaatcactattttattttaattttctaatagttcaatactcgctgtagaagtttatcataaatctaaatggtagactatgctttccagttgaataaatagggaaaatttgcatcatcggacatgatttttagctacagtggctcagatgctttgccaaagtttcacatagctacttagcttgttttgcaatgtaatcaaagtagttcaaaactgctggcttaaaattagtctgtctttttcttaggtctaatctgtcacacatttaaggttgtctaaagcagaaatttattcactgcgaagtgtttgcttttttttggaaggttttgcctagggacacagagatttaaaaacatcatgtacttcagagatctagagtgtttttttttctagttaaaaacagtgtttaaaaggcgattaggcatccaggcgagtgctgggtctgcctggacgcctaggtggcacctaggctgaaaacggaccaaaacggtcggaaacggaattacaatatagaaaagggaaacgggcggtacaggatttttctacatgttactgattaaagagtacaaaatatgattgtgaaaccaaatgaaaattttttatgtttggctaaattcagaaagtgttggaaacaatatcataatatagaaaaaccgttttcatcctcgcctaggtgacaagttgctttctttcaaaaaaaaaaggtgacaagttgccactgtttcccaaggcgagctgggtatgcctggacgcctaggcgaagccttttgaaacactggttaaaagttgattgtctgcctctctgatcctttatgcatctggagtatttgtgtcacttctatggtgacaagggtccttcgtatcgctactgccatgctattatcatctcttattgccttggtgttagtactctgttactttcatcctctcatgttgttacttctccccagttgcattaaatgagaaccgacattatcattaaaccacttcatactacagatcattcacatatttttgattgaagcataccattttatcatcttatttttcatttctaagtaaccatgttgtggatatagttactgttgtctgctagctcaagaacacaagctattcttcttacttggaagttgtttggaacaaatggatctggactagggccttattggtttgttggccctgttgtcagtcaccattttttttcttcttagcttgtgggcaacatgtgacagtaggtacagggagtttaacacgttgtccttggttgcagaaaattgtagcaaaagattaaaaaaacccaagacagggataatttccctacacgattgaactgtacgatgtactaggtcctttagtttggtatagaattgtcctactggtttctgagtgttgtcaacttactgatgatagtttaagatacaaaaatgctttggtccttgtgtatatctatttgttgttcgcatgcagttttccatcagaggataaaacacatttcatatgcaattgccttttaaatattctttgagaaaaaaaatgttgttgcagtagaatactggtgcctatgttctatgatgccatattttaactcgattttgcaagaacagtatcgctgcattagcattagaattgtgtttgcttttgttatttcatcttttctgatggagcatatattcatttgctctcatgtcttgcatgctgggtgtcctatttgacaattgacaaaaacataaccagtcactagctcgtaagccaatctttgctttcttgacctcataatcagcctgctatccaacttttgtagcatggtgcttgcttgattctgattccactgtatctgtggatgcagaaaactgaggtaatggtcgcaagcagctgaagaacgaaggaaaacatgaggcttgtagtgaggcgatcctgtgtatctggaagatgggactggctgtttgtctttgcttctgtatatcaactggcgtatcatgatcagctggctgcttcccgtttgagtttcataccagagtcctagatcatcggagtctttgttggtttgcttgtgagatgtttatgtcgttgacactcgacaccatgtagagtactcttcccgtgggtagaagctgtattgcatatgcttatgctgggggctgggttctcctgtcttgttttgtggagccggtgatgagctttatgttctcaaatggtagcttatctacacgctatcatctgctctattcagcctatttactgtattggatacttgttaatggagaaccgctacttttctgtatttattactcctccggtattggatagataactgcttagctggacagtttttgctgttaaaaacatgctccacgtttgtattttgtaagactggtttgtgaagaatttattagaaataattttgtcaaaagaaatgccattctagatcagtactcactctttctcaaataagtgcacatttcgtattttataaaatttatctagatttataaaaaaatagtatgtatatttaatttttttactgaaaagtacgtggcgtgattattttaatgaattttatttgttataataaatataagtatttggttacgtttgagattagttaactctaaaaatgcgagttgtgcacttgtgtaagcctgggcaaattgcccgatacctatacccgggcctgaattactcgaacccgaggtatccgatcctaaattcggataatgattttgattatccaaaattaatttgggtaatttgaataatatcctccggtatccgaactatctgaattacccaaatatttttctatatctttgtatttatcatgtattgttagttaaatattagaacttatcaatttattagaacataattctctttgtttgaacaagtgatagtaatatattattctctacaaaatgctattgaaattct

SEQ ID NO: 3735 - DNA, 2755 bp, Sorghum bicolor
gtcttcatctcaggttttacctgactgctggttcctgctcacgcggatgctcgatggcctagctggtcgcacccacgctgcactcgctgtagtagtggcgcgacgtcacccgtcttcacgggtggcactacacaaccacacggaggagaatacaaacgggcggagtccaacatgaatacacaacaggtgaactctcggatctagaaggccaagtgatggtgaatcctccagtgcaaactctatgggcttttgtggagccgagcgcagggtggtccgcggcccacaggccacagggacaaccttgtagctccgcccctgtgtagcttcacggggagggcccagacgtgcgcttctgttctcgggatatagaagagaggagaaagtcgggttcttgacttgaaccggtagtaatacgcggataccagatcactgccggtatatggcccttcactgccagttatggcctagccctaatcattgtctcaatttcaagcttaagaaccggcagtgaagctatatcactgccagttctcataaatctggcagtgatgatgccggcagcgatgtctgaatctgtagtagtgtcggagactatttgcttacattactgtgatagtttagcactaaccgtgattgacgatcaaatttattagccaatatataacatggaagtaatggtagccgcactcggtagaaatattaacaaagtagtgcctgtctacatctgaatcgaactattggagtcctgagcatcaaatgctgtcctgcatgaccattgaaacctgatgagctatctatatatccatcaacactagatgatggtgcctacccaacgaacagcactacagaagtgaatggagtacatgcatttagatgaacagatatcaactggaacatttggacagtgtgacctttttgcagttcacacggtgttgtgtgtcaaattcctgaaaatccccagtatgaactgcaagtgtgggagatggtgcactatcaacacttaaacatatcaatgctactctactttaatttggaagtactcattcagcctgctcactaaattagatgaagttgttgtataataaggagcagcggtgtatcaatgaaaacgaacagggaatgaataaaataagcactatgaattaccaacaaggagttctcaatacagaaaataacaaagggcagcgcggctgcaacgaaacaggctgacatgtactgcaaaataatataacttatcacgaaaataagatatctctttttactacattgcagctcaatcttaaaacatgttctgcctacatcgtcatttatttttaaatggatacgttggaacatgcaagaaatttatttatataaatttggttatttaaaatatctgacagatttgtttatttcatgagcttgctgtaacaaaggtaggttgttttcgaaagcttgttgtagcatggtaagttgtgttggaagttgtttttgagagagctcctggcgatgtatccaaacaggtaattggtcttaaaacaaaaatcgagaggactgtattttttttctttattagaaggatgggagaagttttccgcacaatttattaaagacaaaaaaaacaaaggcaagatattgccccaagtttttcttaattaaaaaacgaccaaacgttatgtagcacttttgctttattttgatacagacttgtgtgcagctggaaatcacatagctagatcaaagaaatgtatcctgctgggacacaacaataagtttaggaataaacacataagtgcatgatagtgcaccatctcccactcccacacactgtcctcctataaataagagacctcatactaaacactcctcacaccagcacaagcaaaacatagagcagcagaaaactctcaacaatccagaccagtagctgatctactagctagaaaacgttaaatagaggtttaatggcaaaagcacaggcattagctgcgctgctcatcgccatgttggccctcgccacaatggagagcgccgacgcaatctgcggcatggcgaacgaggacttcaagctgtgccagcccgcggcatcggtgagtgacccgacggacagcccgtcggcggagtgctgcgctgcgctgggcaaggctgaccttgggtgcatctgccgctacaagggtgtcgccggcatatggatgaggatctaccacatcgaccccagccgcgctatggcgctgccgggcaaatgtggccttacaatgcccagcaactgctcgtgatcctgcgaagcatgatcgtcgaattacaagctcgatcgtcgaccggctggacggccagaagttgtgtatccgtacgtgtgttatggctagctaaataagtagagggagctcgtgaaaggctctcttctgtgtgctccttgatggcttcatctgttttttttttctttttgagtgtgtgattgtgtgtgtgtgtgtgctgaaagctcaatgtgtgctcgtttcagctcatcatcagctcgatccgcatgtgtaacacccgattttacaaaatcagatatgcaccatatgtgagttttagaagataaacctcacatatagctacaaataaggggtaatatcaaaggacaacgcataaattatatagcgtacataataaatcagaaacaaccttaggcagcaaaccacggaagataactccaaacttcgggtgttaacttcactctacaggatccaactgactggttggtcacaagcccaatacttctcctaaggtatggggg

SEQ ID NO: 3736 - DNA, 4114 bp, Sorghum bicolor
agcagaggtgaggtgagctctggctcctgtaaatactaaaactgtaaaagtcgaccagtcttttcacctggaccctccctcgcttatcattggacgttacgtggtccatggaagatagatagacagatagacgccctaccggttgagactgtaacaaaaaaacctgtagaacatgctgtatttcccttccgcgtgaaacaactctgctgctcctatctgggactgggagtgagaggagcaagaaaccagaggtgaaaacgtgaattggcagggagaatatgaaagaatatgcgcgtgtgtgaccatgtccatggtgtggtcgtgggctggtggtggcgctgtcactgcactggtgaccggtctcggcgtccgtgcgtcccagcagcatgcacaagcagcacggcatgccgctgccgatgccgcctttggacagaagcttcctttttgatccatccattgcgatagcaagcctggttgcttgcttgcttgcgtgcgccgagatctggattagattccttgattcccctgtcaccgccacaggccaagggaggggaggcccggggcagtttgtttgccagttgcatccatcgcccccagcagcgtgcccgttgttgtgcgccactccactctgaaagccacacctgaatgcctgaaatcgaacgcaaagctcatcagatatattctccccattccactttttcttctccattcaatcaagagagaaaaaagcatgctctgttcttctctctctctctctcttttttttttgttgccctcctctcctctcctctgacatttacctgtcctgtccatatgcaattcctgacggatcgtgcacgcccggccgggtcgggccatcttttggttttgggaaccaatttttacaggcgggccggcagtgagattgagatcaaagcaaagatggatatcgcatctttgatgcatatgcaccgtgtatctctatcttatcttcacttgaaatcaaagcaagttttcgtgtgccgggaaagccttgttgacgctgctgctgctgctgctgctgcagaggagaggcggcatgcgtttgctcgctcgtgagacggtggtgctggtgctggtggtggtggggctccgagcgaggagagaatccagtcagtccaaggagcaagcaggcgagaagggtgagaaaacagcaagacaacaacagcaatgcttgcttccaatgcatgcccagcacgagaaatcaatgcaatgtcgtccatttgcttctctctctcttttgttcctttttcaatcaactttttttaaaaaattttcaaaaagaagaagaaaatgttttttcctcttctctcccaaaaagaaaaagaattctatccttttgatgagagggttgtagttgaactgtttcgcttttgccccgccaactgctgaaagattctccttctttcaggtcaaagaagtgaaagcaaaagcagcaaaacaattgaggtggtgacatggagatggaagaggaggtggagaggggggatgcaaagaaaagaagatgctgccatgccatgccatggccctgctgttggcccccagctgcctcatcacgcgccatattccctttccttgatgccgccgatcgattcgattccaccccgtccccgcccgggcgtatccatacatacatataccgccggaggtggagacggagacggaatatctctgagcggtggtggagtcccaggaaagcaaccgaccgaccgacccaccgcctataagagcgagcccccccgcgcagctcgcactggcatcgtccatcaccctgctgctgctgtcgctgcttgtccaggagtagacctgctgctgctgctgctactttctgtgtcgccgcggtagaagcagccgccgctgtcgtcgtcgtctcgtctgcgactactactccggccgccgctgctgcggcttctcatgctggccacgccaccgacgctgctccttttgctgcgatacgaagcgccgcggtgggcacgctggaaatgtcgtcgctgggtggtcagcagcagcagcacgggcacggcgaggccgccagggcgcggctcaggtggacacgccagctccacgaccgcttcgtgctcgccgtggcccagctcggcggcgcagacagtaagtgctctgctcacggccaatcctttctttctttgaccgctgctgccaccgacgtcggcttcctttgccattgcagaggcgacacccaagtccgtgctgagggcgatggccgtgccggggctcacgctgtaccacctcaagagccacctccaggtacggcgaggcgaattatttatccgagtagcagcgacagtaagctgatcgtcggccgaactctgcctcctgatcatgtggtccacactgctgcttctgctgcagaagtaccggctggcggtgagccgaggcgtcgcctccccgctcggcgacaacggagatggcaccatcgagcggtcgtcgtcctcggagagccagccggacgagtacgacgacgacggcaccatcgccgagctgcatggtgattcttccaggaccatggcgcggatgcagagggaggtgcagaggaagctgcaggagcagatcgaggtaaatgataggaggtttcagctgattgccggttcgttcatggttggttgctgatcaagctgagctcggtgcatcgtgacctgaccctgacctcattcatggcatgcgcgcatggcaggtgcagcggcacctacagctgaggatcgaggcgcaggggaggtacctgcagtccgtgctgcgccgggcgcaggaggtcctcgccgacgaccacagcctgggctcgccggccggcgcggaggccgccaagggagagctctcggagctggctgcctccgcggtggagacggccgggtgcctgtcctcctcctgctcctgctgctgctgctccccctcgccgtccccgacgcgccaccgctctgccgacagcagctgcgtcacgtcgtcctcctcctcggaggccgagagccaccaggcccccgccgccggcgccaagtggcggctccacacgtgtggcgctggtactacgcgcgactgctccgacgtcgaccagccggtgctgcaggccgaggagagtacattcctgcagaggcacgacgcagaggatgcagaggacggcacttcatcagagattgatctcaacaggtagggggggacgacgaagatggtgatcagaagcatctctgctctgcatgtgcccagcatcggagaagagccaggggatgattggcggggtcaggcttttgagcaacgtctgctgcttgaaacagctggctgcactgcaagtctgcagcagcagcagcagcgacactgctcttcattccataatatgatatacatatatattttcatttatgcaaatggttcttgtgtttcatgtaccctctgtaaaaaaaaaaatatgtatggctggaactagaggcaggcccagctggcagctgcagatgatgcgaatgcaccatgcttgagggtgcaatgcaaggatgaatgcaaagtgcagaactgtggtagctactatactattaattactgagattgatgccttaagagggcaatgtcatgaaaactgaagagggtttagaatgaaacttaagattaaaattccaaacctggtaatggtatggggtactgaacagcaagttctgttacagcactttgggggataaatcaagctatcgtatcggtaacaactaataaagcagcaaaaaggggaaggaaaaaaaaggcatcagggtagtttttcttatagtaaaaagaagaaggtgtggaaaattgtcatgatttgcattagtaatgaggactgaaaattgaaatgctacgcaaggaatatttatgttgaaagaattgcaattgggagattcttcaatgatatttcctttacctaacaagagagaaaacggacaaaccagagaatcttgcacagctagcaagagaaatgacgactggaccctcctaatccatggcttctctacacagttgcgcatccgaaagtttttggagaatatttctgtcttgttgcaagttcacctgcccggccgtattctctactagttcaataaccctacaagctcggacacttgattcc

SEQ ID NO: 3737 - DNA, 2922 bp, Sorghum bicolor
  misc_feature (2595)..(2694): n is a, c, g, or t
tccatcagcgacggcctctacgagtgcaaggacaggatcgtcaacttctgcaagcgccgctgcacccgtcctcctgctgctgctgctgctgctgatgcgtgatctgcgcggtcgtcgtccgatcccagagccggcaaatgagctttgccaataaataatttccgttcggacttcggagttccctttttgcatctttctcaagatgcagacagggtttgaataaggtgatgcttgctgttttctgaaataaagagcatggatgtgttatgctcggagttctgtagtcatgggaggtagagaaaatgtaataatcgctttgtttatgtgcatctttagatgccatagaccgaggcatgactagctaataagcgcatggctacttgcatctctttgatgcaaaggccgtgatatggacatgtctatttcatataattcccacaaatatcacaaacattttatgaatagtgtcatattaaggtcactgtgagtgatggtatgcatggtgcagtggcaatgagtggaacgttaggagctattgacaacgaggaaagaagatgctccctccgtccatatttaacttcacatctgaggtttaaaaaaatctccaaataaaaggtctcgatggcatctgaagctactagacttggactgccggtggctacaatctgtactacaggcgtgcaaataaaaaatgcgaacttgccggagtgctcctgtccacacgtttcaatcccatctgagcagaggcaaaaaaaagaagaagaaaggaaacgaaaaaaatcacatctgtacgatgccagtgatgtgaaccccaattttagaggtagaattgtaatttcacatgtacgagagtgaagtagtgaagtgatgaaggtaaaactgggctcccccacctcaccaccggcccagataatttcctatgaccagcccaagagtccactaatgcacaggcacgcaacagcccatgcagtagcccagtacattgattatgctagctaccagatcacttgtctttgctcaaaaaaaaaaaaaagaggaacgcttgtcttttttaaaaatcaaaacaaccgctccacaccccaccatttggtccacgcttcgttgcagatgatggcttcatcagtttatatctcaccactcaaagcacctcaatttatattggaaaatcagtcaatgctatatatctatggatagcgagttcagtaaaagttggatgcttcggatgtactccctccatataaaatttagaagtcgtttacgataagatttgagtcaaatattggaaatataaatcatcaattactttaaaactattgagtttgcaaatatgaaaattatatgaatagatttatattaaaaaatatttttataaaagtatacatatatcatttttttctaaatacttatataagaataagaggtaaaaagttatgttttggagaccgtgtcgctgacctaaacgaattctaattcctatatggaggaagtactcccttcatcccaaaataaatattgctctcgtttcatgaggagtcaaatatttttaactttgatcaattatataaaaaaatattaatatctagatagattgttgaacttatttttataataaacttatttagagatacaaatgttgctaatattttatataaatttaatcaaatttaaaaaagtttaactgatacggataccatagtacctctttttttgagacgacagagtataaacttattaccatgactctcacgtttagactccaagacaagaatgatgatgccgagcatccttccatactgcttactgttgcgcgtgccgattgttgacgtgtcatatgtccccacccgatttccctatttctgtcactcaccattttgctctcttttagctcggaaacacgagtcacaccacagctgtgacgggcatcccctgtatacaagtcttccattacactggcctacggcaggagaggaaatccaagctacaaacttgccgccgccgacatgagacttcaggtgttactcgtcacactgggtgttctagccgtcctggcagctctgccactcagcaaaggtgatttttttttgacatgttaaactttcagaaccacttaattatgatgtatattttggctcaatcgcgtggggtgacggatgaccaatctttggtggccgcaggcgaggaggaaggaggagcagcgcgcgccaagggctcatggccgtgctgcgacaagtgcggcttctgctacaggtcgttcccgccacggtgccagtgcctagacttctcgcagcgcgggtgccatccggcgtgcaggagctgcctcaagttcaccaccggcggcatcgacgaaccacccatcttccggtgcgcggacatcctcgtcaacttctgcgatcgaagctgcacgccgcctgaagctctctgaaggccggcaagtgtcgatgctttgcttgctcatcgtttcgtaattttttcaggaataaagagctctgctatgctcaaagctctgtgatcagatatgtgctgaaataatgaacatatattttggctaggccaggagccaaggatatgacttctcggttatccaagaactacacnnnnnnnnnnnnnnnnnnnnnnnnnnnnnnnnnnnnnnnnnnnnnnnnnnnnnnnnnnnnnnnnnnnnnnnnnnnnnnnnnnnnnnnnnnnnnnnnnnnnggggggggggggggagaatgcattgctgtaaatttgttccttctgtgctttattacgggcctcttcactggatcttctgcaatgcaacaatatgctgacgtcacttagccctgccaaaaaatgcaacacatgcccgttgctactagcacttcaccagaacggcatgatgcacgtttcttttttgcccaccttcgataacaaaagtgtccctgccttttggcgtaaatt

SEQ ID NO: 3738 - DNA, 5680 bp, Sorghum bicolor
gcccgagtccttagcttcattcatcaaacgttatgctatatttggatcgacttccgggacactaaatcaaggagttgatcctaatttaccagaaataaagggaacaaagtcaaggtttgttgccttgttcctagcacaaattgataatcaattcgacctattcccaaaatcaaaatatggaaataaataccgacttgtccctgcatattctcctcacacacatactatcctgatatatatcctcctcctgcaccaacttcaaacataaaaaagcttctattgttattattaggttctatagcaactccaagagaagagttatccatgttatgtattctatatttggctattttgggagaggaaagagagtccaacagctattgtatttggtttgctaaaatagcaagtctctatcccggagttctcgcatggtaaatatagcttgcatatcccgctagccatatgatttgccatatagaaagactgttagagattttttttacatgattttctattttagaggttggctaaatcttgaatttagccattcatttttaccaactctcttagagttgctcttacagctaacatatttaaactttgaccatttttggcatgttttgagcccggtaatctatccaaaacccctgcaaattatatgtcacaatttttccgaacccaagataaaaaaacattgctcggaagaccggtgagcccactagaattacacctgttaggctaaaaccattgtgaaaatatatacttgtgtggaggcctagaaaaaaaacgagaaatatcggccccctccagcaactagcgtctctcacatatagtcacataaaatgagctcaccaccttcaaccctcgacccgggtttgtcgaccccgacccaggttcacgggttcatttttaatctaaaatgtaaaaatctcttgcaagtagcgtaccccgtacctccctcatcgacccagaaactttatgactatgctctcacacgttcgtcttgaaggtggcggcggcagccatcgaaagggccatgctagctgcgacgggagcagcaggccggtgggtgatggcgtcatcagacatggtgggggagcatcctcagctatacgggctcttggtgtaaatggtgaagtcgccggtgtcgccctcgccgtcttcgaggtggtcggcgatggtggcagcgcgcgaggtggtgggcttgtcgctggagggccaccatcgccatgttcatgggtttggatagtagctagcttgcttttttcgtgtatatgcgtcatgaaactgtctcgcctcccaaacaagaagattaccactgaaaaaagataccacccctcctccaacacatacgtcctatttttcaacattatttcagcggtagttttcaacgaagaaatactattttttttcttatagtaaatcaatataagcaacaacagcagcaattaaatttcagcgatttctaaatgttttcattgaacatttgaatttattactatagctcggactttcaaatatggaagcattaagggcctgtttggtacagctcacaacagcttcatgagctgttgtgagctgtttttttttgccaaacacttatttccaaaatagcttcatgggtgaagttgtttttccctcctctcacaaaaacataagttggatgaagctgaaaaaaaagtagcttattgtagcttctccttcatttctctccctcaactatgcatgaagtagttgggaaagctattttgccaaacactttttccaaaacagcttagcttcatctagaaagtcacttatgaagctattttctaaaaaaacagttttactcgtgaagttgagctgtgccaaacaagcctctaaatagtctatattttgggctcggactggaatccttcgcgacgaccaaatccatcctgctcaagcgaggcccaaggcccaacctccgtttccaataaagaaaccaaatagcaacctctcgcagtccctcctttcctcctctgcctccgacctccgtagcgaatcggatcggggtctagggtttcggcgcgcttctccaaccagacgcgagggctaggctgagcatggagggagcaggcgcggcccggaagaggtcccggccggagtcggcgaacgggtatgccgccggcgggaagcgctccaaaggtgaggcatcgctatcccactagtccgtctgccgttcgcctcgatttttttggttctactagatagatgtcggttgtcatcgccccttgcgcgaagtgcttccgattggatctgcgtgtgttctgcgggagcgcggagcgagggtgttctggttggtcttttcattatgcttatatatgcgtgccgtgtgcgcaatgagatagcgcatccgggttggtgtgcgggcctggctggttagagattttgttttcgttcaatcttgctttgcttgcttcaagtaatgcgtggattggtggaataatagctcgttgtctccaaaattgaactacaaatcaagggttttcccctctatctctatgcttaggcgattactctcttaacttcgactactaaattgtcccctaaagaagctttgtatttgactctccaagtaatgcgtgtgaagatggaccaaatgaatacaattaaatctgaagaaatcggacagggttggagactgattttttttttatataaatgtatcacagttagatctacttcatatgcaaatgcgaattttgcccagctactgataaaaaatgatgtcagtgctaactggtaagcactaagcagcacactaacatgttcttatctgagcaacttatcctcctttagtaactaccagtactaagaaagactttgtgttcccaaatctagttaggactatgtgtctcaccacagtagtaatacagtaaaaatagtttaggactcaatagtctgtaaaagttctttaagaattaagagttcagatagtgtaatagtatgaagcttatctagatttattttgttgaaaataggaatagttttttagagaagaaatagtaatttgaagcatatttggaaatcaaagcaccttttgcctcttgaatcttgatcaatgtaattggacaattcaccagttcaatgaacaagaagaaacatgttaattcccagatctagttaggactatgtccctcacatcaatattgacacagtaaaaatagttttagaactgaaagtctggaaatatcattttagagttcagatactgtaatggtacaagtctgttctagatgtattttgttgaaaagaggaatagtttttagagaagaaatagtaatgtgaagcatatatatgggaatgaagccaccttgtgttgaatattgatcaaatggaattggactgttcatcagttcaatgaacaagaagaaagatgcagacacatggtatttgtcagtgtataaaccctactaatctttgtttgaactgtataataactatcttctgcaggataactacaatggaatcttttaccatataaaatcttgttccttcatcacatacattggagataaattctatatacgtacttgattagaagatcaataatgcaaacttctaacacgtgagaaaatgtaattaattttatgcaacagacacggagtcatttcaaactggtcaatcaagcaaatcgaagccttgcaccaagtttttcaggttataatcttaacctatctgaaataacatcagaatggtaacctgtatctttttcactcttcttacagcaaataaattgtttgaaagattcattatatatgccaaagatgtatggaatatttgaataacactaaatttgatctattttattaatatatctcagtagatgaacttgccttttttcctctggttactttaagagtttagatgagtacgttacaagccaacgttcaatccactcttgctttatggtgcatgtagtatagacagggtgcaagtattgatttttggtgttttgattaaatggaagttcctttttagtgatggaagtgtttgtcagagtagattcaaattttattttgttattatattatgctattatgctttcttcatattgttattgttacttcaatatgcctgaatatgttgtttagatgtttgaatattttatctcttattgaaagctcattcctgcatacttaaaatcattagataaaccttcataaataatatatatgttctgctttgaatgttgcagtaccattgggtgcccatttggtgagggatgccattttctgcactttgtccccggtggttacccagcagttgcaaaaatgctcaatctaggtagccctgctgtatctgcgccatcaagaactcatgtggatcatgccgctcttactggcgcctctcatcaagcttcgatgggcaagacacgcatgtgcaccaagtacaatacgacggaaggctgcaaatttggtgataagtgccactttgctcatagcgaaagagagcttgggaagccagcctacatgtctcatgaaggacctcctatgggtggtcgatatggaggccgacctgaacctctgcaacaagcttccatgggtcctccagcaggaaactttggtgcttcggcgactgccaagatcagtgtggatgcctctcttgccggtggcataatcggtaagggtggggtcaacactaagcagataagcagagttacaggcgtcaagctctccatccgcgaccacgagtctaaccccagccagaagaacattgagcttgaaggcaattttgaccagatcaagcaagccagtgacatggtgagggacctcattgcgaccatcagcgcaagcatgccggcaaaaaacctatctgcttccgctgctccagcaggaggccgaggcggtggtcttgggggcaggagcaactacaagacgaagctgtgcgagaacttcgtgaagggtgcctgcactttcggcgaccggtgccactttgcccatggcgagaccgagcagcggagaggtgctgcttgagagttgaggtgctctaggcatgagagatgccctgtgctctctccatttgctactgtgaatttttctccttgcagcgttaggcggttcgactgttgtattgcgatttcagtcgattaaactctagatttcagcttttcttttatgatataagtttgcgaaaacgttattctgtcactcatgcccctgaatgttatgacttatgggcttatggcaacttgcattttgttggtcagtttcagttagcagctggtggcccatgacaaacctgtgtgactgtcctaacgttgtagccgtgtaaattgtcgaaaaatgcttgaggtggaaataggagtgacgccgaaatgaaaatatcaggctttgtttagttccaaaattttttagaaaatgagcattgtagtactttcgtttatatgtgacaaatatggtccaaccatagactcactaggttcaaaagattcatctcacaaattacaaacaaactgtgtaattagttttagtttttgtttatatttaatgctctatatatgtttaaagattcgatgtgacaaggaatcttgaaaaaaaatttagattttggggaggaactaaggccttgtaaattttctaaaaaacttctaaattctccgtcacattgaatcttgcggcacatacatgaagtactaaatatatatttaaaaaataac

SEQ ID NO: 3739 - DNA, 2790 bp, Sorghum bicolor
gatgaatctcaaagcattgcactaaaaatgaatatacagctattttcccagcactttaattcgtaccaccatatttggagttattttccccctcttgcgcatatatcgattgcattctttgccctgtagatgcagtctatttgtgactatccaataattttatatcattttttgtaccaactgaataatcctcaaaagtagacttcaatagaaaaaagagaaaatatagtcttgattgagctatttacttggtgtctgtttttaactctcagattatgtcacccacttgaaactataaattgaattaatatgtggaaatggttctacctgccaagatccaaagaaaatcaagacctaaaagatggtgaccgtgatgccctatttcttgaatttagctagcatggtgtccatacctgctagaatatagtaataaaactgacataatgaaaaatctttgaaggcctcgacatctcatcaattggctgatcttgatgccaggaccggttgtctccttatacattataaaactatagtttcttctcatgtaatcaaattgttcatacattctatcctgctctggtcttttaaaaggctgaatctttgcctctgtttagcaaatgttagaaaatcatttgtgaaccgtgtgtgtgtcagcaaggtatacctttgctggggactgtatttctagaattttcttgtccctccaccagagttactctcaccatgcctccacattgctatatcttatttagatgttatgagaggaattttaccttctacatgtctactccttcaaaatgtgtaaatagacagaggtgcagacgaagcaattccttacctttatattcatactattcctatgaattagtactacgagaatattatttcaaacctgtttattgtttgataagataaagcaatgtcctaggtatggtggaagtggcagatagatatacatgggtttttagcgaacattgttctgcatggttcatcttttgttgtttgataagataaagcatatattcagttttcacgtcacatcgttaagaatcatgaaaaaaaataaagtggctgctttttcttgtgtagtcagcctgccagatcattggggagagttaaattgctgcttcgtcatcattctattgtgattcttagattctcaattgaatccgtacaatgcctgcttttccatgatgctcattgggttatatatgatgcttatcggatatcgctaaggtaattttaccaaggctccttcatgtgctctctcggattgaattctactcaaatgataattctattacaacaacctcctttgtccttccactcttcacacaacccttccttttgcaaataattcatattgagtatgttttaatcatcagttctctttatttatctcatgccatcaattttcaggatagacagaaatgagcaagtgggcgttcttgatagacttgcacaccgaaaccacacactggtccaagtagagtgcattgcctacaaacaagatatacgttttacctcctcttacatgttcactgatgtcaagtgctatcttttttttttcacgtaaaatgtcaattgctatattcccatgtaatctattaataagtagacttggtttccgttgcaagttattggactccagatggaaaattcatggctaaagtttcatagggctatacttgatgttttggttgggtacagctgctgagctttttaagaattaatattcttgcaactcatttttgccatttgcttcgctaaacaggtgaggtccgactataagataactgtttactcagaattatagcatgtgatgaagatttcttgcacatcaaaaaaattatattctacatctacctgacctgaaaatgatcacctgcgctcgcgcgcagatgcgcgcggcttatactagtctttcaccatttttctgcaggagttagacatctggcccatctttcaccacttgattatgaattctgaactgccttaggtatggcaatgctagctacgttgatgaaaggcaccaccacagatacgagttgaatcctgatgtggtcccagaatttgaaaaggcagggctttctttcgttggcagggatgaaagcggtaaacgcatggaggtatgattgccaacatttttcatgaagattaatcatgtcgtggtctcataaatttgatttgtcatatgcagattatcgaactacccaactataggttttccgtcgatgtacaatttcaccctgaattcaagtcaaggcctcaagccatctccacttttcttaggtaagacatcctcaaactctacttattttgcctgcttaagtgttctttgcttttgaaagaaatttaaatgcctgagcacttaacgaaaattttggcagcattggtagcagtgtcatcaggacagcttgatcaatgtggcgttatcagtaagacaggcagacacatcagcaataccggaggagcaccgaagcttaccagaagccgaatgtccgtgtgtcccaggggatacgtatccccccaaccagaaatcgttcgttccactttgagattcgtggtacacccttgtaattatgtcacattttactcacccatacctcttactggaccatagaattgcgctcgacggtatggaaaaaagctgcaaacgctgaagctcctatgttggacagtggagccgtgttgcactctttctcgtgaaccagtagcctcccctgagcttttttttttttactttctaacttcccttcctcagtaattttcccattttcccgattgcag

SEQ ID NO: 3740 - DNA, 6878 bp, Sorghum bicolor
  misc_feature (1329)..(1969): n is a, c, g, or t
gatgtatctacgagtacatatttttgtactttacaataagagaatataatcatattttaattcgataaaacattgccgtactattgttaatattaatttagattacagatgtttttttgacccaaaagaccgtgggggagttcccatggtagattacagatgttagggtcattatatgaaataaattatagtttttaaattttatataaatgataaaacataagtagtgacattcccattattgtttgtcatcaatagctggtcactttttttttcttccgttgcaatgcatggacatgtttgattgtaatgtcttaagtaacataagcacagcttggaatcataaaacgatttgtagtaggttaaatagatatgttaacttttgtacccaaaattccttagcaacttggaagtgaaacaccaaggccttgtttagttcccagaaaattttgcaaaatttttcagattccccgtcacatcgaatctttagacgcatgtatggagtattaaatataaacgaaaataaaaactaattgcatagtttggtcggaattgatgagatgaatcttttgagcttagttagtccatgattggacaatatttgtcacaaacaaacgaaaatgatacagtacctgttttgcaaaattttttggaactaaacaaggcccaagattaggggaaaaggttatgtgcattacgagtattgatgactagaccctgcatcgctgactttatggcgacctaaaggaggcatgagtgaactgcatagtatccttttccaaatccgcacggatgcaccataaaaagaagcgaatctcacatcccacacgcatttgatgagggggcaattcattattgcgtgacaagaatcttctctgctataagaaacggcaaatcatataattaataataaaatgatcctcgttcctaatggaaggtgccgacacaatcactcggctagaaaaggcaactaatgacgcgatgctgaaatatccagccttatatattagtagtaacacccagttatcattggaagttttatggtgtacgtatatagaaaattaagttccttccacatctcaaacaaaaataatcttccttccatatcttggcacctgaggtggatcccatcgagaccaatcgtcgttcgatggccacggaatatagaagtcgtcgatgcgctcctaccataatatgcaccgttctttccccctgtgggcagagcacgtcggtgcgcggccgccgtcctttccacctgtgggctgagcgcggcggagacgctcagccgcgcaccaccgtcgtcgacgccgagtccattcccttctggcnnnnnnnnnnnnnnnnnnnnnnnnnnnnnnnnnnnnnnnnnnnnnnnnnnnnnnnnnnnnnnnnnnnnnnnnnnnnnnnnnnnnnnnnnnnnnnnnnnnnnnnnnnnnnnnnnnnnnnnnnnnnnnnnnnnnnnnnnnnnnnnnnnnnnnnnnnnnnnnnnnnnnnnnnnnnnnnnnnnnnnnnnnnnnnnnnnnnnnnnnnnnnnnnnnnnnnnnnnnnnnnnnnnnnnnnnnnnnnnnnnnnnnnnnnnnnnnnnnnnnnnnnnnnnnnnnnnnnnnnnnnnnnnnnnnnnnnnnnnnnnnnnnnnnnnnnnnnnnnnnnnnnnnnnnnnnnnnnnnnnnnnnnnnnnnnnnnnnnnnnnnnnnnnnnnnnnnnnnnnnnnnnnnnnnnnnnnnnnnnnnnnnnnnnnnnnnnnnnnnnnnnnnnnnnnnnnnnnnnnnnnnnnnnnnnnnnnnnnnnnnnnnnnnnnnnnnnnnnnnnnnnnnnnnnnnnnnnnnnnnnnnnnnnnnnnnnnnnnnnnnnnnnnnnnnnnnnnnnnnnnnnnnnnnnnnnnnnnnnnnnnnnnnnnnnnnnnnnnnnnnnnnnnnnnnnnnnnnnnnnnnnnnnnnnnnnnnnnnnnnnnnnnnnnnnnnnnnnnnnntgtttcggcactagcaacgacgggtttgttgatgggcttttgtctctcttgcagggccgacgaggaaagggagagggagagggagaggaaggagagggagaaggcgcgccgcgacagggagagggaggcgtcgggcaggggagatgaccgggttctggagatgatgcgtagtttcagcttcatgcaggcgaccgaggaggattacatggagggtatgaccgcgtacgactacaactacaacggcgttgacgccggcggcaccgcgcacgggcctgttgcccccgagccgtttgcgccgtcgccggcgtcgacggcggcgagcctcagcttcaagtttcagcaccagatgcatgaaattccaacggagccggcggctgtggtttcgagagaattcacggcagcgagagaagagacggcggctgtggtttcgagagaattcacagcagacagagaagaggatgaacgagaacgagaggaagagaaggaatcactggctccgttgcaatcggcagacaaacaagaacaccaacacgaagcagaggaaacagagttcgtggtggaagaggaggtagaagagcagagcagagaggttgtgcaggaggaggcagcgccaccgaagatcgtcgcgaccacgcacaactatcagttcttgacggagcgcgacttccgggggttcgtcagggagccggaggccatgacggtgcgcgtgcaggagtctttcgtgccgccgtcgccgcctccgtcgcaccaccagcccgaggagcgacaggttgtcgacgtcgtctcctcccgcagcggccggttcctcacggagagggacttccggccggcggatgagcccgacgtgtgcgagagcgtggcgtcgtccgggaagagggcgccgtcgctgaagccgaagcctgcgagctccatgtccgtcgcgtccatgggcggcggcggcgccgtcgccgccaggacgagcttcgcgtcggagttctccggtttcggcgactccgactccgagtccagcgccagcgacggctactcggtgaaggatctcgtcgtcgactccgacagcgactggttcctctcggagaaggacttcccgacgtctgcgcgcgactccggcaacctcaaaagttacaaggccaaggtgctcaaggccatcgaagccctggaggcggcgtccaagctggagccgtcttaccaggactcagcgacgacgactgtgtcgccgggctcggtccagcagggctcaccagacaccattcccgatggttctcccaagttccctgaggacatgtggtctcgcagcccttcgccggacgtcgagtacaaagaggacgaggagaaggtaacaagagaagctgaagcacagtatgacgaggacatcgaacggagaagcacggcggaagaggaggcgggcatcgacatgagcgacgatgacgagcactcatcgggcggcgagaaggtagaatctggaccagcctatgatctggctcctgttgctgacgactgtatggaccattcggagaaggaaatcatcactgtacatgatcactcaggaggtgaagctgcttctgatgctcaaagaagtccaaaggcagtctctgagagagaattagctgtcgtgccatcagatcaagatgctggcccagtcaagagaagtccggagccatcggagcaggaatttattggtatggttgatcattcacttgagcacagttctgacgaccggaaggaaactgccagcgaaagcgatcagtcatatgaaatagtatttgatgacaaaaggaggccggagcctccagagactggattcgttggtacgagagatcactcacatgagcttatttctgatgtttggaaagagattgtcagtagaaacgatcagccacgcctagcggctcatgctgatgaggaaggcctggatacaactgatcgttcaaacggtcttgtttcttatcagaagaaagtgactttcagtactacaaatgatcaggcatatgctgcattttctgatgagaagagcgtcccagagactccagagcaagaattcagtctaaccgaccgtcgaaatggagtagttcctgacgccaagaacatttcagagaccaaagaagatgaggaacaagacagtgcaaatgatgatttggacaatgcagctcgacaggcctacatttcagtcacggggaaggcaaaggtatatgacgaagatggggaggatccggaagcgaagtggaaggatttgacagacgaggaggaagacgagctggagtcactgtgggagcaccaagacctgatagagcagctgaagcttgagctgaaaaaggtccggtcgatcgggctgccgacgatccttgaggagtcggagacaccgaaggctccaatggaggacctcaagccttggaggatcgatgctaagttcctccgtgaagacccgatggacgagctgaacaagttctacaagagttacagggagaggatgaggaagtttgacattttgtgctaccagaagatgtatgcaataggtatgcttaatttcttcagacgtaagcttatgtacctttgtttatctctgattccagcaatgttgggcacttatttagttgggtgcaatcggaaagctttctaatttacccatttaactctgagtttttttttgaaacatttaactcagagttagaatcaagaactgcattaaaaaaaagttaaggtaaaggattgttaaggtagacttactctgaaacaatgtgcatttctttatgatagttaaattaggctggaagtctaaaatactagtcaagtttcattctgctaagaattcttgattaaccgagcaattattttcttgaattatacatgcatgcatcgagaaaagagagcttttatctagtcatctaacctgtaagccttgttaagtactccctctgtcacaaattttcaggcacataattttgtttcttggtacgcacataaaagtcatgtatatatataaaaaaacaaatgacatataattttggctgcagatttcctacagctcagaggcccccagcagtccagcaactctctaaagtccctgtcgccaacggtggcgtccatcctgtcacacaatttccggtcatctcgtcggagatctcccgaggacccatcggagcggttcctcaaggagctccgctatgatctggagacggtgtacgtcgggcagatgtgcctgtcatgggagttcctccggtggcagtacgagcaggcccgtgacctcccggagtcggactcttaccacagccaccagtacaacgtggtggccggagagttccagcagttccaggtcgtggtgcagaggttcgtcgaggacgaatcgttcaaaggccctaggctgccgaactacatcaacaaccgatgcgttcttcgcaatctcttgcaagtgcccgtgattaaaggttaggatcatttcagacttcagtcagagctgagattagtttagctagtagttcatgtttgtcctgcactttcaatgaacacacaaacattgaccctgatgcatacattttgggttatacagaggacagcttgaaggacaggatggaggatcagcgcaaggggaactacgtgataaccagtgaggagctggaggacatcatggaagaggcgatgcacatcatgtgggagttcatcaaggctgacagagtcgaggcgacgacgacgacatcggtgctcaagggcttgtcgagcacccacgtcgagctccaggaccccatggatcatgatctcatggcgcacatccattccaccttacagaaggtaaggttgcaacagagtgcagggctgcaggcaaaatatatatgatttgctacagttgctagcagtaagtgtaggagtgctagtcgtgtgacgatgtgcgtgaaatcgtttgcagaaagagaagaggctcaaggacctcctcaggacgggcaactgcatcgtgaagaagtttaagaagcccaaggaggacagatcgaaccagaacctcttcttctcgcaggtggacatgaaactggtggcgcgggtgctgaggatgccgaggatcaccagcgagcagctgcagtggtgcaaggcgaagctcgacaagatcatactggtagatcataggaagatccacagggaggcttcatttttgttgtttccctgttgagagagtacatatatatgttttcttcttttcttttgttcttctcttttgctcgataaaaaaatatatcttcaccatgtaatcattccacgggtgtaggaatttttttaaccttttggtaattcagtttcttatatacgtaggttcatagttataattcatagttataattgtaactttagaaacaggccacagtttacagtgtccatggcgcttccatgataccttcattacgtagaaattacagtcatcgcaatatacatactccatttcctctttagtagaaggaaccgtcttttaccactggtccatcccaactgtgctgcaaggctgcaagacagtttttaactgcactgccattcctggacctggatgagcagttcgtatgccctttctgttcgccacatgagtcatataatgaccacctcacattagctagctgatctaacaacccaagtacttgctgcaaacactgtacagtactgtacccgggaacaggagcacacatatcatctcataactgaaagctgacgaaactaaatcaagcctttcactcgaaccttctacaataataagcataggttgtctgactcgcacaaaatagacaaaagacttacttcaaggctcactttttagctaggtggacgtttctagcttctaatcctgctaatgagcaaatcaccttaggccttgtttggatgtagtcgtattcacatcaatccacatgtgttgagatggattggagtggaacttgaactaaat

SEQ ID NO: 3741 - DNA, 5192 bp, Sorghum bicolor
gcaccagtactgtatgtgtcattgggccaataaataacgccgggtgcttggtgcggcactagctatagatggcgtgctttccgtctccacggcgatcttatcagcttggaacgcccactttcggcaagaaaacgcccacactgcgagtacacgcagctgtaataacacgcacgtacgtttagtgttcacaccatcctcgcagtcgcatatactgtatcaaggaatgacgaaaggagccgctgtgtatgtgtaggaacatatatagatgtgcatgtgtatgtactgtaaactttgcaagaacgaattaacgatcacgtgtggtgtccctcatcatcataagcccaaaagtcgcaaccatatatgtaggatctgcagggacgggaggaaattgtgcaagcgaaaaagggcatgtgcggaaaggacggcatcattaactagcgtactgctacttgaattgcttcactaattatgatatctctccagatttctccctacctgcagctgctgcccccatataacaacgtgtgcttcacttgcaagcaaatccagctggggaaaacagaaatggagcctatgagactccgacgggcgatcgatcgaccagcaacatcgattcgatgggaagcctagttttagtttatcgcaggttaatttgtcgcagcagaagcactgttgctgttgctggatggattagacaccaactaacctggattaatcaacgcctacggcacatcctttcccgtgaaaagaacctgtgatgatggagaggagtccgtccccgtatccttcggatgggttctttaatttgcatggtgaccacgggcagtagtactctctttatccttggaattcatgacacgtttagtcttttctaatgtgctaacacgctgacgattttctctgaccgagtgaaatccgggtgacaggtccaaggaaaaagaggaacttgtcctgcatattccaggtaatggttggcttggacggcaagcaacaggggaaggaacgcgcggtggcactgggccatccatcgcccatcagccagccactggagtcgtgtgaacagacgcagatgtggagatgcctgcctgctcgggaccaccgttcggtggaagcgggccagcagcacatatcagaccatggatgctttttgcctacggacggacggagtacgtgcgcgcgggcaagctgtgtgtgtgtgtgtgggctgtgtcaggtgtcgacgagctccagcccggcgtgcgcgtggtgctgccattctcggtggttgatcccggtcggtgctatcaaggctcgccaaggccgtagcttccctccgtaccccggtccccgggatcacaccgaaccaggtttccaaagtatagaacgcgttacattacattacaatacaccgatcgtatcttctcgcgggaatggaaagccatggcgaacggacaacagcgatgctaaaactagtttgaatacactgcgccaaggggttgtgagtgcttgcctgcttggcaaatggtgagtactactgtgtacgtacccgtgcatccagacgcacgcacgaaagaatcggaaaaaggggggtctcctccgcgccgcgcgtgggcgtggcaccaggctgcctgccaggcgcctgctggcaaccacgcatgggccagagggcggcgatcccccgctctcccttcccacgacaacgccacttgactcgtcactttcccaccggatccctgaagctttttccacacggcagccgggcagcgtctccctttctcatgtgtagtagcctcctaccggtactagtagtagtggggggcaaaaacataaaaattttcgcagcaggacccgttcggtccaaccccagcagcccaaccacataccattccgtttgcccggtcctcgcccgcgaccgccgtttgactccagaccccgccccctccaccaatcggtggcaagggttgcgtgaaatcgccggtctcgcgcgcccattttagacggacgctgaccgagacaaccccggcgatccccacacacacagacacagacacaggcggagaggccacagctcggcggcaagcggcagccagcccagaccagagcgaaaacccaccgtcccggcacccaattttgaaccgccgcgacgctcccaagtcccaaccaaatccacgatccctccgaccgaaccgaaatctccgcctccctgccctgcccggcctaggaggaaagaaacgcacgcacccacgtccccgcgccaaagggaaaccgtcgccgcgtcgagagaaactgaagcggagcagaggaggagaggccgaaggccaggagaaggattcccggcggcgatggagcggtaccatccctccgaggtgtacgagctcttcgtgcgccacatgaacaccccgaggtaagggaaggtggggtggggaggggggcaatttcgtctcttttttctctgcggtttctcgttcttggacttggatggatctttccttccatggaaagagcagtcggtgatcggtcggcgatggatggcgcagggtggtggtggacaacggcgtgtgcgcgacggcgacgctggtgcaggtgcacagcgcgaggaagcacggcgtgctgctcgaggcggtggcggctctgtccgaccacggcgtctgcgtccgcaaaggctacatctcctccgacgacggccgctggttcatggacgtcttccacgtcaccgacgcctcgggacgcaaggtggccgacgccgacgccctgctggcgcgcctcgagtcctcgctcaccgcggacgcattgccgccccgcacaccgcccgccgccgccgtggggaatggggctgggcccgcgatgcccaccctgctcgagctcgtcggtgccgaccgcccgggcctcctctccgaggtcttcgccgtgctgcacgacctccgctgcgacatcgccgacgccagggcgtggacgcacggcggccgcgtcgcggccctcgtgttcgtgcgcgacgtggagacgggcgcgcccatcgacgacgcggcgcgggtcaggcgcgtcgagtccaggctaaggcacgtcctccgcggcggcgcgctcggcgccaggatggtccgggaagacgccgcggccgtcaacatggaccggaggctccaccagcttctcaacgaggacggggaggcggagtgccgcgccgaccaggcggacgcgacggcggtcgccgtgcaggattggggggagagagggtactcggtggtcaccgtcagctgccgtgaccggcccaagctgctcttcgacgtcgtctgcaccttgacggacttggattacgtggtgtaccacggcacgttcgatacggacggcgatcacgcccagcaggtgagccttctaggcgtttctttctttctcgatgggttgatccccaaagatgttttttctcctcccggagaaaataggtcggtgctaccttgatttttgtcgcgctgaactagggccgccattactgaattcccggccatcacgagttcttgcagttggaattcctgccaggaatctcgatgtttccatagtaactggctacgttaggcgcgtcggacctttctgtcaattttttctctcacttttactccacttttaccttttggttgctttgattgtgattcttgtgtgtatgcttgaagttaacccgactttttatcatgaaaatgaaaattcccttttactgaatttgctggacttgtcattttaaaactgaaggtttagttttagtttcatttgcattactagattattctgcttcgaaattgtaccgcagaataatcacgaccgcataatttatttatagtactaagcacgcatatcctacaaataccaaactcattgaattgctgctgcggtgaattcagacactacctatgcacgcctgttgttacaacggtcttattaactgagctaaagctgacatggcttgggtgcaggagttctacatcaggcggttggacgggcggccaattagctcggcggccgagaggcggcgcgtgatccaatgcttgcaagcggccatcgagaggcgcgcatccgaggtgcgtgatcgctgaatatctcccttcctttccctccatgccacgccaccgcagcaaaagcacgcgacaccagatccccccccccccccccccccccccaacacacacacacacacacacacacacaccttcttcttcttcactctcccaagtcccaagcgcgcaaccgtctctttcgttccctgcccaactttccacttcaccgccatgtgttcggccgaaatcccagccgcaccacctctctgtctactcgtattctctaacgccagactgagcgatcctctgtgcgcagggcgtgaggctggagctgcgcatcaccgaccgccgcgggctgctcgcctacgtcacgcgcgtgttccgggagaacagcctctcggtcacgcacgccgagatcaccaccaggggcgacaaggccatgaacgtgttccacgtcaccgacgtggccggccggcccgcggaccccaagaccatcgacgaggtgatccagaggatcggcacggagagcctccgggtggacgaggagcggtggccgcgcctgtgctcgacggagggcgacgcgggccgcggcggcggcggtgcggggatcttctcgctcgggagcctcgtgaagaagaacctggccagcctcggcctcataagatcctgctcgtgaggacgccatcaaggggggggcacgtgcttgctcgatgggatggatccttgtgtaaatatgggatggtgcgtgggttaggatgtaaatggagtaggatttttaatttgccgtttctaggttttagttgccacgtgtacatagtagcaagtggagatggaaggttttaaaagttgctggtcggcaacagcttggagcttaatggacctctctggtgggtcatgccacattgccatgccatttatctatcattctaacttttttacataaaaatagatggatggaagaaatataatatatccatgtcgagttctaagtatgtcgtcagtaccctatatggcggtaactgaatattgaccattcagtaaaattttccttgtggtatggtgacataggaaagctctgctccgagatctcgagttttttttaatgaagcagagccgaccagtgagagattattactataaataaacaagcctcgttataacttataccaacatcct

SEQ ID NO: 3742 - DNA, 4902 bp, Sorghum bicolor
atttatccatatgcatatatactgttatccccttcagtagggtaaagttggatttgctgagtactttgtactcacccttgctttattaaacagaggaagatccggacttcgatcccgaagtggcgttcgagtaaggtcgtgtctgcacccaactaagcctgtggcattgggactcgtcagatgttcgatggcgatatcgtttgtttctgggtcctttggacctatgttgtattttggtgtcttattattatagcgtgccttcattgtccacgcttatcgagactactgtgctgaaacttatctgatgtaataaatgtgttactagcctcctgggactagtattgtatcacatttgagttcctggtttaccaggggcgcttcactcggccaaacgcaccccaagataaaacataaaacacaattaggggtacaactctcaatatacatgcccaaatttttatattcagatgtaaatatttaacattttttcccgaaaaaaaattaacagtttaagttgccagccaaatctctcagttttaccatttctctttgtataaacatcaaagaacctgttggctatagttgccatgtatctgaatgcacatgtacacacctcttttctttgcatttctaatgaattattttttcgacaagcatataatgaaagtacacatataaaaataagtcatgtaaccacaaaccgaagataacatggacacgatcatattggacaatcaaaaggatgcggcaaggccgcacctttgtttctagtcttgatcatgaaagcattatacatccctcgttaggatcacaagatttaactctggtcatgttgtaaaggtgtgaaacaaactgttaaaggataaatttgagtgatcaaaccaatctaaaaacctgttctattccaggttttagaacttgctcggttgctaaaagttggctcgtctcggcaaggatagtagttaggtaggtttacaaactcttactttgtccaggaacctagctcgcctcagcaaggatttcattatcgatgtagaagagccaaatagtctcgcctgtgaaaaataggttaagttttttttttacgcttcataggttaagttattcatcagcttcccctttctttctccaatcaaggttatctctattttgctggatgaggctagagatagatgagacaatattagcaaaggttccaagtgtgcccctagtatcctgtctagcttgttcctctcgcctaaccaagcaagagcttatatgctcatagaaacctaggacaagtttaatctccttaactttttgttgagcttatatgctcgaacaagacacgttcaatctcttcaacttcttgcttcgtgaggtaggagaaggttcagcaaaagaagcccctaaaccgtaaacaaaacaaaacaaaacaaaacctatggcccaagctctcgaaagaacgagatgaccagagatgattaggaatggctgtacgtgtctactagtaaatgttgattgagatagtatgtgagccccagttcgcttctgctagcttcagttcgcttctattaccttatgctcgtaagcagacaggcataaaaacggatcagatacggatgaatggtattaatactgtattttttttcatatttctgattagatttaaattcaaatacataagatacgattagattttgacatcataaatatatatattttaagtatttaaatataaataaaatatttgaactcggatgaaaccctctaaacgaatttggtcttaaatataatcagaaaatatctatatcattttcatctcagtaaaaagactcataatgttttttttacaagtcctcctaccaaatcctgaaacctccgccgggcccgaagcacagccaggcacagagagaaaatcgcacctgcaccgcgttggcgcccaagtgcggccggcccagccaggatggctggggaccctgtcatctaatcagtccgtcacacgattcacgaattgaccactcgcctgtcgcctcccatgaattcgctcgctttccctggctgcccgtcaccactgacgcccgcctccaccgcccccggcctccatcccatcccatcgccgcgtataaagattcgcttccagcgactagaagatgcagctcatcaccacctccgcgctcgaagctccgcctcctcccgaacccgtaccgtcgccatggcatccggcttgcctgtaaggtgagcactgagcagaaccaagcggcagaacgggatgctatctctgtccgctctcgccgttgagattcttgatctataattcccccccatattaatatgattcttcgttgaattttctgtgacgggagattctttattgaggttttttaatggaacaatttcttcctcccgtgcatgcagctccaaggaagtgctgccgtctcccctgacctccgcctccgagccccctcccctcttcgatggcactaccaagtaggttctcgacctatcaattgcaaatattcacttgtgcagatcaggatctagaagttaacccctttgagtttcgtgaaggttgtacgttgcctattattgcccgttcgcgcagcgcgcttggattgccaggaactacaaggtgccaccagcccaccatcaccatcagcatcaccactgttctttgctatgttgaagcggttctcttttatggtctctccctgaaaaggaaaactgaaacgttttctgttcctcgtcgtttgtccagggtttgcaggataagattaagattgtcgccatcgatcttgctgacaggccagcatggtacaaggagaaggtttatccagaaaacaaggtgtgtttgattattctgctatccccctaaggacctttcatgttcagattctccaaggttcatggatactttgttttatgttttcctttcatgtatgatttaccctttgttttcgttccccgcaggtgccttctctggaacacaacaaccaggtgaaaggagagagcttggatttggttaagtacattgacagcaacttcgaaggtccatcgttgctccctgaggtacataagattgccatcaatgtagcgcttgaaaaaaaaaagtttttcaggctggttaacctctggactctggattcttcacaggatcctgcaaagaagcagttcgctgaggagctgcttgcatatactgatgcatttaacaaagcattatactcatctttactcagcaaggaagatgtgtctgaggaaactggtaacaaaactagttcgcatgtttgatttgtttgaaaaggccttatttttaataacatgctaattgtatcatgcattgtcttttacatcagttgctgctttggataaaatagaagacgccctggggaaatttaatgacggcccgttcttccttggtcagttcagtttggtatgtcactgaacactaggaatcattctccctggagcatggttcaaaatcaaatctctattagaaagagttcatatgaatgtgggcttatgtggttttgtcatgatgcgtaatttcattattacaggtggacattgcatatgtaccattcatcgagaggtttcagatattctattccaacataaaaaactatgatatcacaaagggcagacccaaccttcagaagttcattgaggtaattcagactgatggacattaaataggctaaagctttatgtttgtagtgcattcactcacattgtttgaaatgatccttttatcctaatgaccaggctgcatagccaaagcaaaccagttctcttgataatgctttgttgaggagaaattttaaatcatggattggtatatttcaggaagtgaacaagatcgatgcatatacgcagactaaactggacccagattttttacttgagcagacaaagaagcggcttggggtatgatatttcttaatttttctgccttgattgatctatttgataagctaatttcaaaacatttgaccatcattttaacctccagattgcttaaagcttgtgaccaaggatgaatctctcgccagaagtacaagcatagtagattgagactagtttagtcgtttgtgtgcttgaataatgatgaatatcacagttatggttttcagtgaggcatggtcttctatattggttgtgcttctgaaataaattagttgtcactatataaaaggatcatttggtaatgtgttgatgtcactggttgtgcttctgaaaataaactagttgtcactgtataaaaggatcatttggtaatgtgttgatgtcactgtatatgagtgggtggggagagagagagagagagagagagagagaatgatatgcagtgtgttctgtcaaatgttgctgaattcaatggatcagtattcgtctcattaccaatattctgcttgtgccgttagtcataaagaaaattatcaagtgaggccttgtttatcatattgaatgtgttggaagaagaaattttttagatatcacattgaatgtgtcggaaggatgttgggagagatttttagatgctaatagaaaaacaaattacatagctcgtttggaaactgcgagatgcattattaaacctaattaatccatcattatcacatgtagttactgtagcaattatgattaatcatggactaattaggcttaaaagattcgtctcgcaatttataaccaaactgtataattagtttttttgtctatatttaatgctctatacatatgtcgactcaataagatggtgaaatattttcggtgaaaaacatgggtccaaatatataatgatgtccacaaaggatcattagcggacttgtccgtgtttgcatttgtttctcagcttttcatactgaaaaagcagaagttgtgccacgaacgaaaatgcaattcagtagcttgtactaagcttgt

SEQ ID NO: 3743 - DNA, 8713 bp, Sorghum bicolor; identical to SEQ ID NO: 3729

SEQ ID NO: 3744 - DNA, 4072 bp, Sorghum bicolor
ctctgacctgtcacattcttggttcttcacaagttcataagccacatcctagttgtagcttggggcaccagttgccacccgagagctagcccaggtgtgcactgggtggaggtcaggctttggttatcattgcttggtagtctaaggacatggtcatggcggagccctagagcattaagtgatggcagcacaggcactctggctcgtcataactccttccagagggtgcatgcaagcgtacccaatgagtatagcccccgagcgatctgtgggatcggtcaaagggtccatcattcggcttcttcttcctggagacttaacatacccctatgtcatcacccacctatttcggcaaggggtcatgcccagggcatgatgcaaggggacaagggcagcatcagacccactcttcagcctccctaggcttagtctccattagcgagcaaggagtgccaagagtgggtgagccagtgacaggcgaagcggagtgtaccggttagcctggacctaacacaaccatctccatggctactgtgggtggtttccatagcaatgccaccaacactacaagacgaaggtgaagaatcctaggtcacttacttggagggaaagacatctagagaaatccccagttatgtatgctctttgtcctctagagatataaagacaggcaaggaacactgctagggcgacgatagaacacatagagcataccaggatacccatttgttccaaaatcgttaggatgtctccaacctcagtcaaaaccttagatttgagctagcagcacgctcctccctctccattgtaaaaactcgcttgagcattctaatacaaagaacccatcgtggatgtagagcttcaaagcctaaactaggataaacccctttatgtcttgagtgctaacaacaaccaaagtcccacacatcaactactaattgaccactagtaactagttgtggttacgatcccataacatacatcaaccacacaaatctacaatacgcgctcgttgagattaaacatgtcattaatcagttggactactacaactatatattttttattttagctctagcaataaatatttaccttattttattaataaaatccctactggccatgctagtcaccgtcaccagccatgccagccagttactcactcaacatgtaatgatgggtattcaacgctccgcgtcagcaccacctctaggttcctctccatctgtatactcaacgtcactaccttaactggtagtgatcaacccaccacactggtagttgtactatactccctccgttcatttttgtttcttgagaaaccattttaaaaaaataaaaaataaacatcattagatagatcattgaatctattttcataataaatttatttagatatataaatattttatatattttctataaattcaatcaaacttacgccatgaaaacaaaaaacaacagatacttagggactgagagagtacaaagatacatggactatgattgcatagtacatgaactgggatctaattgctaactttatacaactatgcatgcgtcactcaagctctagtgataaatatctctcacttaattcatgaatagtccaattgctaccttgcgacgaccagctatgtatgcggcgtcactcaagctccaaccataaacagtttctactcttttttcaccaaaaaatcctcagcaaacatacaaatcacccacagatccatcgagattcatactgccaccaaccatactagcctgtcaatccacatccaacatgaaacgttgaacaccccgtgttccacctcagcacaaccactaggtctccatccacctgtttgctgatgtcactgcctgcacctgcacccgtcctcatctataagaacaccactcgcctagccacccatggacgacgctcacactgttgaatagctagctagctagaagaacactccactttcgtgttcacctccgacgagctcgctcgctcgctcatgggtcacatccccttcacctggctacccatgaaccccgacgccgccgcagcaacgctcaccgccgacgccgccgtcccggccgcacctatccctatccctacccctaccaccaccactgatgccgccgccatgcaacactactacctcaactcgtggctgcacgcatctcttatgcagccggcggtcgtccaaaccgccaccgaggaagcaaggcggcgccaggaccaggaggaagaagctgcatccatccgcctggtccacctcctcatcacctgcaccggcgccatccaggccggtgactactccgtcgctcacggcaacctgactgaggcacgtgcgatcctcaagaagatcccgacttcaaccggcatcggccgtgtaggcacccacttcaccgacgcgctcgcgcagcgcctcttcccggcgtacccgcacgcggcagcgctaccgtcgtgtttgcctcctgcaacgccgccggcgacctacaaccatttctacgacgcagggccgtacctcaagttcgcctactccgcggcaaaccgagccatcctaaaggcgttcgagggttgcaaacgcgtgcacatcatcgactttgccctcatgcaggggctccagtggccggctctcatggaggagctttccaagcgtgagggcgggccgccggagctccgcatcaccggcatcggcccaaacccgacgagtggccgcgacgagctccatgaggtgggcgttcgcctcgccgagtttgcgcgctacatgaagattcccttcaccttccagggagtctgtgccgaccatctggatcatctgaccgcctggattcacctcaaactccgaccagatgaggcgttagccatgaactccatcctgcagctccaccgcctcctcgtcgacccggacgctgacgagtcgaccatgccagcgccgatagacatcctcctcaagctggtcgtgaagctgaagcccaagatcttcacggtggtggagcaggaagcggatcacaataagccacggctattggagaggttcaccaacgccctcttccactatgccaccatgttcgactccctggaggccgtgtgctcggccgtcaatgttagcgccgccgccgccagaagcagcaccaacaccagcaccaccagctcgctcgcggaggcgtacctccggggcgagatcttcgacatcatctgcggtgagggcaacgcccgccttgagcgccatgagctgtgtaccgcctggaatgagaggctcacccgtgcggggttcacccaggtggagttcaacctcagcgaggccaacatggagataactgaactgatcaacgagtcttccttctccggcgccgggttcgacatcctgcagggttccggcggcctcgcgttggcatggcaaggccgcccgctgtatgtggcgacggcttggcatgcgatgggcggaggaaacgctgccagtgctgccatagctcacaccaaagagggagacagctaccagaaaggtaagaacagtagcggcagtggcggcggcaagggcaaccgcggccgctgtggagtagccggaggaataacctttctgtaagccagtagtagtagtagcaagagggtgatgagtcgagaactcgagattcgagaataatgtaatatgaataatgttgtggtaatctggtttcagtcgcgtgaacttgcgatgaataattgttctgtctaaagatcctgatcgtgagattcatgtttgcagccaattcaattgagattttgaaatgtttgccccgatgatctttcttatgaaacatacacatatgttgctgttcaaacttcaaattagtgttggtgtcccttcaggtgtgaatttcatgctttgatctaatccttaactaatagttttacatacaaacatagatcgaaaactcgattggcttttttgagaacaactaggtatggtaaaaacatattaagcaacaaacattgctataaacatatgcattcatagcataccatatacaatatgcgcaaagtagcagaacctgatttagagtcgccacaacttatcttccatacttgttgtgaaaaaca

SEQ ID NO: 3745 - DNA, 5790 bp, Sorghum bicolor
ccacggcggcgcccactcccacaccgctttaaactaaacccccgcgcaggcgcgccattgttgttgtagttagaaaaagaaggaacagaaacagatagagcaaccgccctgctcccttccctggtctcgccgtctcgctcctcgtcccgctcccgcccgcgtcgcacgggaggaactgaaccggccggcgcgcgcggcaaccgcgagaaccccggtgagcaccagcgacttctgctctgcttaacgtttcgccttcctcctaatcccatccaccgggaatctcgttcttgtgcattgggggtgagattggagtgccgtcgtgttcgattcgagattcggaggttacatttccttttgaggtcctgggctcttgcttccttttattggcgccgcaaatttcgttgttgaagctggtgggatcctggtccgacgagctctgcgtttggtgcgcgcgcttgtagattggttgcagcaagcatcccatcagcattcgcggactgactaagacaaattggtggtttctgggcttgcgaggatttcctgttcttgtttttgctcctgtgccgtctgagcattttttccctctaatctcagttactatatcttataatttccacacggattaggctggcatttttagactgaagttttggtccattggtgggtggtagcctgtgattcccacttctttgcttttttttttaatggctgcttgataattgttgttttcccaactttcttggacttcaccgtgctgaaaattcctgctgccatttgttgcaacggtgtaaatcgaattgatggacctgcctgtattgtcgggtgattggtaactgtgcatgtggcgtaacatgaattttgaaaactttttgtttttttgggtgaactaaacaaggccatagtgattcttgtggaatttaaggactgtctcatgctcagtatcaccgcgtctgcatccatcatgaatcgtaattacctttaccatatcagtggcttgtcagatctccctgtattcaagttatggtgcagctttatgtccagggctctttcatcaccctgggacctccttctcgaatgcaatccaggggcacaccgtggtccaagaccggccggagccccacggccatgtgcctcccaactaccgtctgtccaagcgaattacttgcttgtcctgtagacaatatcatttgtaccagattctcttattaagctgttgaagaattttcaattttgcttgcaagacagaaatcttgctcagctgtccagttcatgagttgagttgctgtcctgtcacttgttttatgatgtgaacatatgcttgtcaggaccaaatattttacttaggacttactgtcatgctccgtggtgaatgctttattgtaagctgcactttttactaattaacttattaggatgcagaggattgatctgcgtgcaacttatgctttatagtggatgtctccgtagtgaacatttgcttcttagaatgactgtcagtatccaggaacatgcttttttggggatttcttactggaagctgcattttttttaacttgggggtgcagatctttctacagtcacaaagtttctgggtcgatggggtcgaggtatggggttgcggtacgtggtacgctatttgtgagaaatttttacacttcgggtcgaaaatgaacccgtgaacgtgggccagggtcgatgaacccgggtcgagggtcgaaggtggtgaacctgttttatgtgactttctacctcttcgtatcagctctgaacttgcactgcatcttttattttcagttgctacttatgtgtcattgcattttttttgtccttttaattccctttgccctttcataatcataataatcacatttgggtttgttaaaccatcttgaaaattccctattgactttcttaagctgatacgactttgctggtgtttctaattctgttggtgatttgtccaggtatcaaacttctagtgcatcacaaaggatactgaaatgggtgccaaagagaatggagaagagagagatgatcattcaagtgatgtggaaagagatggtaaacacgggaaggaaactgaaacagactatgaaccagctagaaattccctttcatcacctggtgaggctaccaataatgaagacactaaagtgaaaagagtctcaagggttccaaagaagctagcaaggaaagagtctaaggaaaacagcccacgctcagcaagaagcatttccaatcgtcaaatccacaccaagctgcagtttatatcgtcaaacagtagccagaacaaatcgccaaaatcaaacaaagcagctaatggcgctaaaactgttgaaatgaagaagccagagactccgaaagctccttcttgttcttcatctgagatgtctgaggaaacagatgacaaagctattgaggatagacccacagatgacaaagcagttgaggacagagtcaaggatgatagcgctgttgaaggcagagccaccaatgatcaagccgttgatgacagagcgaagaatgataaggacattgaggacggaatgaaggatgataaggccattgaatgtgaagtcactgatgataaacctattgagagcaaagtaactgatgatattgccattgaggtagagattgaaggtaaagccattgaagaggcaaaggagatcgatatattggatgaagctccgaaatgtgatcagagtactggcactgatgatgaaattgctgatacggaagaaaacatagctgataatggcaactcagtttcatatgaaaataatgaggaattatatacaaaaattgagaagttggagcaggagctacgtgaagttgctgcccttgagatttctctctactctgtggtgccagagcacggttgttcatcacataagttgcatacaccagctcgccgtctatctaggatgtacattcatgcatcaaaattttggtcctcagataagaaagcttcagttgcaagaaattcaatttctgggcttgtgcttgttgcaaagtcttgtggcaatgatgtttcaaggtaaattatgactaccctctactgcttgtttccccttattgttattaccatcaactccttcagatcaaaatttaagaagtgagaatctaattttgatgtaggttgacattttggctatcgaacacagttgtcctgagagaaatcattgcacaaacatttggtacttcacgacactcaagtccagttcggggtttcagcacaaatggtaatgcaaagaagcctgacaggagtttcgctccaacgcgatggaaaagtaactataatggcaagtatgcgaaacccaatatcatgcagctgccagatgattggcgggaaactagcacgctgctggatgcgttggagaagatcgaatcttggatcttttctcggattgttgagtctgtgtggtggcaggtaaaagttcaccatattactgtcttgcactttccagaaagctgagtatggcttctctaaaacagtgatggttaaaacctattgcagattaattcatgttttcagttttctgaaggatttttatttcccaggcaatgacaccccacatgcaagcccctgtagaagatttgtcaactccaaagattgggaagttattagggcattctttgggtgatcagcaacatgggaatttttctattgatctctggaaaactgcatttcatgatgcattcagcagaatctgtcctctccgtgctggtggacatgagtgtggatgtttaccagtgttggcaaaattggtatgctctcagatttttctttctttggtaatgatatcttttgtgtgaagtctactcatgatattcttctgtttctatcaggtgatggagcactgcatagcccgtttagatattgctatgtttaatgccatccttcgtgaatcagagaatgagatacctaccgatcctatatctgacccaattgtggactcaagagttctgccaattccagctggcgacttaagctttggatcaggcgcacagctgaagaactctgtatgtacttagattacgaaatgcttgcaatagcaagatgaacaaacaaacaatctagaataggactgtgcatgacctctcccttgcaattactagtgattgttaacacatgatatacttctgtaggttgggaattggtccagatggttgactgatacatttggcatggatgctgccgaatctggaaaggatggtcaagatgtggaaagtaacggtgatgacagaagagatgcagctgaatcaacttgttttaagctacttaatgagttgagtgatcttttgatgctcccgaaggacatgcttctcgagaaaaccattaggaaagaggtatgcttccattcgtagttcctgtctcattcccaggtcctaacttgtgcttcagtaagttttgatcttcttgttttgcatcaggtctgtccttccattggccttccactagtaacaagaatactctgcaacttcactcctgatgagttctgccctgatcctgttcctggcatggttctagagcagctgaattctgaggtatactttccgtttgctaaaatggcttgttttgccttcgatttggaagaatcttgtgttacctacgtacatgtgaaattgctcaactggtattgcgactaatgccttgcagagtttgctggagcgattcacagagaaagacatgatcagcacattcccagtcaccgctgctccagtggtgtacagcccccctacgctggaggacgtcgcggagaaagtggctgacacagcttgtggcaatccagagctggaccggagggggtcaatggtgcagaggagagggtacaccagcgatgacgatctggatgacctggagttccccctggcatccctgtacgacaagagcaatcccccctccccgtgcaacaatggcgtcgcacatttcagcactcggcagggagcctccattgagaatgcgagacacgagctcctgcgagaagtatggtccgaacggcgatgatcaatacggcatgtggagcctctttgatctctgcattgtagaaatggtgggacaaccttgaagaaaagctttaatcggaaagcgatgaacaaaatgctagtatattcatttgttcttgtatatccgttcctctgtgagcctagcatacaagaagtttgagaatagttctcacattattttttcctctgtatatgatatagtgcaattgtattctacagtggctgtgatgaatgtgatgtgatgatgaaagattgggagacgtagcatcatactggaacacgttgccgttcaacctccattatttctgcctgtcctcccattttccttttttttttcgaaaggaatattctgtcagcccttgtgccttgagcgtgatggatccatttctttctgttcaccgacacttgggtcagcaggccacttgtgcgtgagctgtttccactttcctcgtggtctatccatcattggtcatggtggggtgatgtgggggtgccagcgagaaccaaccattcaacgaaggcgccgacgaggtgtgacggtgagaggggacgttactgacgttctaccggctatggatcaacatcaaccagcagtagttccaatcgaagcgcgtacatgccccctgggggagtcggggctgggaggaaacgaacttgtgggccgtcgcgcggtccaaaacccacacggcacaaaaacgagagaaacgcaccaactgcacgatggcgcaaccccgacggcgaaggcccaactgactagcgcggcgaaaatggccccgctcg

SEQ ID NO: 3746 - DNA, 5905 bp, Sorghum bicolor
tatttttatttggcaaatattgtccgatcatagactaactagactcaaaagtttcatctcacgatttacagacaaattgtacaattagttcttatttttgtctatatttaatgctccatacatgtgccgcaagattcgatgtgatgagaaatcttaaaaagtttttaattttttgctaaacaatgccttatttaatgtctcaaaattcttaagcttttggtaaaactggctctatatataaaaaccggccccatgcaaatttttgatagggcaccccggcctgttcacttgataatcagctctgttttttctcttacaataaattaaataataatatttttaataaggatttttcagcagacagaacagacctatttaatatttggattaagtccacttttagcccctcaactattggccgagtttaattttagccctcaactataaaactgtctgtttttcaccctcaactatcaaaaccgatcacttttagcacccggagagaggacagggcggttttgagccactttgagcggttttttctttttctttttttatggttaaatctgtgaatttcatagtgaattgtttgagcatggtaaattcataaattttttgggtagccttgtcatgatgttctctatgtagaaaaaatgtgaaactatgaaagtaagtattttttggatgctaaaaaattagctcttttaattaataaatacatgttctatgatttttgtacgataatatatatgtcctatgatcatgaaactttttgcgtaactgttttatactaagatagaccttcaaaaaagtttaagattaatttaatgatgtttgcttgtgtccctaatttatatgtaattaataaagcatataaattagggatataagcaaacatcatcaaattaatcttaactttttatgaaggtctatcttagtataaaacagttatgcaaaaagtttcatgatcataggatattatattatccttaaaaaatcagaacatatatttattaattaaaagagctacttttttagcataaaaacactacttatttttatagtttcatatttttccttcatagaaaacatcatgacaaggctacccaaaaaatttgatgaatttaccatactcaaacaattcactatgaaattcacaggtttaaccatagaaaagaaaaaggaaaaaccgctcaaagtggctcaaaaccgctgtgtcctccctccaggtgctaaaagtgaccggttttgatagttgagggtgaaaacatacggttttgtagttgagggctaaaattaaactcagccaatagttgaggggctaaaagtggacttaatcctatatatatatcctatatatatcctatgatcatgaaactttttgcataactgttttatactaagatagaccttcataaaaagtttgagattaatttgatgatgtttgcttatattcctaatttatatgcttcattaagaaaatatcattaaattaatcttaaactttttttaaggtctatcttagtataaaacagttacacaaaaagtttcatgatcataggatatatatattatcctacaaaaatcatagaacatgtatttattaattaaaagagttaaatttttagcatccaaaaaatacttactttcatagtttcacatttttatgcatagagaacatcatgacaaggctatctaaaaaaattgatgaatttaccatgcttaaacaatttactatgaaattcacatgtttaaacatagaaaagaaaaaaggaaaaaccgcttaaagtggctcaaaaccgccctatcctccctccggatactaaaagtgaccggttttgatagttgaagatgaaaaacagacagttttatagttgaaggctaaaattaaactcgaccaatagttgagaatccttaatattttttaacgagtggtaacgaaagacgtgaatgcaaaaaaaaaaaaaaccaataaatccttcttcccctggtattccaccaacttccgtttctttcctcttgtccaccgcgttctccaaaacctctttgacgccgcacccgcacagcacgccggcgggcggcggccatggcgtacctccctccccacaagcgccactccagcaccacagcctccacgcccacccccgcgcccaacccgccacctccgtccctctcctcctccctccgctccctctccctctcctccccgcgaggccgcggccgcggcgccggcggacgccacccgcgcgcttctacttctacaaagatcatccacgccgccggatgcatctcccgttggtccccgctaccgcccttctcccctggcggcgacggcgaggagtacaccctccgcctcgagcccttcgcttgcgcccccatcgagcacaggaccggcgccaaaccccttgccctcgtcgtcgcctccaccccaggagaaggctcctccggatccactacggcggcggtcactgccatcgccgagaggttccttcccgatctccttgccgctgcggagaggaccaaggtagagggcgcgcctaaggatgagttggttaagctgagtctcgtggcaaggctgggaaaggtgctcttcgagtgccagccgtgagtcctttctcctcttcttgttttgcatcccacttacatttctgggacctatgcttcgcgcgatcttgtggtgaatgctgagttcgacgatttactgtgaatgatgtcttcagcggtggatcgcccgtctcactggacacactccgccaggcagcaaaagcaggggaagatggttccaagagccagttgcgtaaatcgttctacaccagtatgcctagtgagtgtctggatgatatggagcgatccatggtgaagagtatggggctggattttgattcgtccaaggagcactaccatgtgaaggtttggtcttctaatgctccagtgcaatgtgaactacagtttgtgtttgcctcagatgagtacatgggtttaatggcctgcaattttgtgataggtgtttgacaagaatcaaagtgattctacaatatcttgcaaatgcaccatggaggaagatggtagccttgctatccagaaggttagtgtaccattaaccagttttttctttgttttgttacagcgatttaagctaccggattccctcatccactttgaggcagcggcatgtcttgatttttgtctaatatcaaaattgctgtctaatatcaaaagtgtcgatttctgtctagtataattgttgtctccacaaagtcatgattcctcaggatattagacaaatttaatagttttagcactttatgattaggcacctctaattacataaataactggtccacaaaatcatgatgctttcccataactcagatttcagctattctaaatttgtaatgccatgttctgtaggaatacttgatagctgacacattttgagatgtaaagacatgaacatgtttacctcagacattgttatgcgcgggctgtttacttcttaccattgaaaatctctgaacttccttattgttgcttgacttgtttagctgatgtctccttgatgagttgtgtgtctgcccaagctgtatatccttgagtagaaattcccgtgcattactttatatatctggataatttgatcattcgatgtattttagctgtactttcagatttgcagaaaacagtttatgctactttccgctgttttgataatggattgccatagatcaattatcttcatatgattcctgatgttctttgttttgttaattcaaaactaggagtgacaattcgaactccactgtccgcatctattgcttagccttattttaaaaggataggaaaggatggaagcagtaggtagttgcttgtcattgcacttcatttcccccaatgagtgctaccgcatgttatattggtgttatattgtattgcagtaggtagatggaaaaaagtatgtgtgaatttctggattaacttgtgatagttagattataggatgtggtgtactccacatactatgtgctttgttgtgttcttcaaatgtaattaatttcaaccagctattcaaacaatacttcagattctaattcttcattgctgccaatgatgcaggttgaattgaatcaggtacgccacttggtggaagacatatcctgtcttttcaaaggtcttgatctaaggctgatgttgtgtaagaaaaggatcctgaaaaacttagatgtaagttcttattgggaacaccttgttcctttctgttattatcatttctttataaagaatatagacttatttgatgtcaattgcagtctgaagtggaaaatgctgtaaagagcttggtgtctgctgctattattgatcctaatgtgaaaggggggattagatggccacttggaaaggagtcaattggtgagaggttcagcatagttggggtgtggcacacaaactacaaagctttcagaaatgaaaccatgaggctcaagctaaggcatgctgacagattcgatcaccggagctcgactggggaagtttcaaatgaagttacattcaaactaactgccatttctcgcaaactggaggttagcgaaatctacttgaaagattgttgtgttctactcttctgtagccacttactatttaggctgttaggttgcatatttgtgtttttgtgctaattttgcttgtgcaatattttctctattgaaataactagaaagtgaggaaaacacaagtctgaatccggttgcagtttttctcctttttttttttggagtaactccttttgttaacataggggtactcataactgtattgtggccattgtgatttcttctaattgttagtacagtttgtgccatcacaattcagtttaacattgaagtagactgcaccctgaccaggccttttgttaatttcccaggaagatgacccggtggagaactctgtgaaggagatgctggagtctgcggtccaaatgatttgggacaatgcgctgaactaccagatcgtaccttgagcttggctatgcagacaatagttcttccttggagatgcaacacgcgagttgatttctttgagcgcctctgtatatagcgtccgttttgtcatgatctgtcacctgcgatggttagacctgagtgctaaaatatgggatttggttgtttggcaagttctacttgctccaaaaatctgaccagtggccacaataaattggagttgatttcagcacaacttgttgattgctttgcttgcggtcgtatgtttggtattgggctattgtaaacgggcagtgaactctccttggggttagtttttcagaaatgctatatcacacgtgtgttttatttgttgttggcacacaaattttatagccgctcgatgaagaaggtagcgcttgatttgctccgatatgtgctggttgcattgtcacgctgacgtgcagggcctactcaagtgttactggttgaaatagggagtcacgtctgtctatttctggttcatccatttccccgtcgtcttcctgcgagaggggaaaagcatcatcctggcgattgtctcggcgtcacgccattctaccaacagtgacctcgccgctccgcgccctccctgtctggtcgacctcgacctcgccgctccgcgccctccctgtctggtcgacctcgctcgttcttgtctgccattgctggagctctggaggtacgtgagttctccgcttgctccattgagtagatctgagggaggttgaggtcaaacccagtcccaccaccgtctgattagcccccatcgtcttcttacctgcgagaggggaaaggtgttcgttcccagcgatttcacctgtgacctcgccgctccgcgtgtccccgtctctgcgtgcggcctctacaggtactagttcaacccctgctct

SEQ ID NO: 3747 - DNA, 3693 bp, Sorghum bicolor
tgtaaaagtaaaaaaagtcactctttttgagaaggagggggtactaaagaaaatcaagaacaccactaagccactgtgctctttgccaaacatgatgtgtaaaattaaaaaacgtcactttttttagacggagggggtactaaagaaaatcaaaaacaccaccaagccactgtgttctttgctcctcatcactattgctgtctatgggtcctttccctcttcctctcttccaagtccgaaggcgacatgaagtggagtagacccatcttttgtttacacagcagttctttagatctaatttgcttaggtttagtctaaacaaatctacctaggaaatcagatattttttggccaaaatcttcttatttataatgatttcgacgattgccatgatttagtcatcgttgcagccttgcaggcattgatttcatcagcagacaactaatttgtagccattatctaaagggacgcggtgatcctggacagtcccaccaaagacattgacttcgggtccctgatggtcatagagaggaaatcaaggactgaaggtgataaatctacagtctatgttctacccaacaatgcaactgtcaacattttttcatcgattcagatgtgttttggactggtctagaacatttgatcttgtaatatgtctaatgttttagaattgatcattgtattcaaatgcactttgggtttggtgttcaaggtgtcctgttctccatcgagaaaagtcattaggaaagaagatggacgaatctggaatggagaggaacgagttaatatattatattagtactcaattaatagaggtggacacattaagacgcccatctaatatgtctacctctattaatcgagggttaatagaggcagatctttcccatatgcgtccttttccactttcatcatagatggtgtccatttgtgtccggctatattaatctagacaataatcttctaaaatcgattgtatagtaatgatgattgtcttcggggggtcttctgcggtagacttcacatgcatctctgcttggggcagtttagtctggtactctggttcttgatccttgggatgctatgttttcctttgcttcgggtttcatatcatatcatcacatgattgtacctatgtggtatgtttttcttttcatgataggtaagttgtgcattatgctgcaaaaagcttgcaaacgtgaagagatagcaaggcaagacaacttggacaccttgatataaccagttgataaatgataatttctggacaagaactagttgatatagctcaatcaacttgttgcagtagtttgaatgtaggcttgtagttatagctataaacaatattttttgtttaaaaaacacgtatttcgattcaaaaatttgcatatgataatcatggtgatgaacggtactcatcaccaaatcggacgcaaggcagaaaggtgtgcggggaccggagaaccgtcggatgccgaccggacggcacggaaggggtccatgatcctgtaccgccgatagcaacgcctgtgtccgagaacccacgccccccacccaccggccccactccggggtctcgccgaaggcgaagcagctagcggtggcgtgggctgctggaacacacaggaacgcgacaatctccacggctggctgctggaacacacgggaacgcgacaatctccacggctggcggctggcggatggatcggggggtcctttcaccaccagccaagcgcacccgcgcgacgtgtcggcctacaggcgtctcgccgcgagtcctcggcagcctcacgactcacgaggcgggctcggctttaccgggcggtgaacggcgcgcgtcgttcccgccactcgctgtccctgcctgactttcaaaaagggtggcgtgtcaccgcctggttactcacagttatagtagactcacagtcatagatccccgtggcggattccaagaacccaagtgaatcgcggctcgtcaagtccggcggtgccgtccagagagctagagcgctagagctagagcacagctatccccgccatggcggccgcggcgcgcgcgatcatctgcgagctggcgccgcagaaggtgtcgtcgtcgacggcgtcggggcccgtggcgccgaagaagcgcgacgccgggacgaaagtggtgctccagccccggctctgcacgctgcggtcgtacggcgccggcagcggcgtggtgacgcggaggattctggccggggaggaagacggaagcggagccgccgactcgggcggctccgcggcgtcaccgttcttcgcctcgctcgccgactacatcgagagctcccgcaagagccaggacttcgagaccatctccggccgcctcgccatggtgagtgactgatgaggcccctctggtctggcctctgctctgctctgctctgctgctctccgtacacagagagtacacgtcgcatccatggttaaattaaacgtcgcgttgctggtgctgctcatttgcagctggcgttcgcggcggcggtggccgtggagacgacgacgggcagctcgctgttcaagaagctggacacgatggagatcgaggaggcggcgggggtgtgcgtggcggtggtcgcctgcgccgcggcgttcgcgtgggcctccagcgcgcgcaacaggatcggtcagatgttcacgctgggctgcaacgccttcgtcgactccctcatcgacaacatcgtcgaggcgctcttctccgagggcgagctgcaggactggtccgacgacatataaacaagcacatatgcacacatatagagattagcagatagccagatactgtaatagacagtacgtatatacatatagtcaagtatttatagtaattaagtaggtgaagctgttaagtgagatccacgcatttctcgcaagcttcgttgatcgttgcaaaacggcaaggaagttgttctgaatctttcagagatggatcctgctcctgcaagggtgttctgtgatgagagagttctgcagtctgcgtaggaacacaggcaggatatctcgcagtagtcagggggttcttcatggttgtgaaatatgcaggtctcttgggagaaatagtgtgctggggaggattagccccttgaattaactgtacctactactagtactagacatataccaagtgtaattagagaatgaagcatgtaatcaaaactatgtactatgcataaagagtgtagttaggagtcaattaaatctggagtgttgactcttgacattatgccacatggagtggagatgaaaccctatacaccgtgcttctttttgtgtcccttgctccatttctatgtgtctgacagtattcatgtgtctgaagaaatactttatgacttaaaaattctagagaaaaatgcagtacacaatatgcatagtaacactttgtaaatatgaagtctatctagcatcttgcagtatgcacttgcaactttgtgcgattggaaccggactatatatgaaaacaaagacaacaaaattaaatccatcattcagtattcatcagttacaacttgaagcgaggtgggtggtccggtcctcatcagttacaactaggacttctcgcggacctcaaagatcagtactctctccattgcacactcatctaataggattccaattttttaatctttaactatcacttattcaaaaaatctgtacattccaccgtac

SEQ ID NO: 3748 - DNA, 4582 bp, Sorghum bicolor
ggatcgtcatcatagaaataaacctcaaagatgtcttatctccttaccaccttctctcccaaataatcatatattgttcgtgtgcatgaaatgtggatctaccactatttttcatgcttgcagcaacgctatcgagacagtagtataaaaaagtgaaaaagaaaatgaccaccggaaaatctgatcttgttacaaaagtacctagcatccgcgtcggcacctgatcaaaggtttatcctatcttctaggtgtatctagtgcattaagatcgacctttccaccaccacaacaaaacccacgtggtttatactgaaacttcttcgcaccacagtgaagacaatctgagtgtgttcaactttccagttatgtattgaacttcaaagttttcttttctcaaagatgcaaaaggtttgtgcatcattttaagatggaaggagttttaagttacaccgacatgctcatctaagcatcctagggggttgggatcgatcgagccgccctagtgtactctatctaaacttaaaacatttgttagtttgtggaaatttggctgatgttgctgatgttgcaagaggaacacattgatctctgctaaagtagtaatgctgtaaaacaggactctccgaaaagcatttgaatatgggttacgtgccgatatgcccagcctttaatatgtacacagatcagatcgaccctctaattagtggacgttgggttggattagctagtagtactttatagtaacgaagtaatactccactagagtagtatgcatggatctcacctgtgccttttgcgtatgagatgaaggaaatccctgatctaagcggttgccgccacgcccgattcgtcccggacaacaagagatgcaacacgcagccaacaatacttcccagatctatgacctactgttgccaagcaggtcgagctcgaccacctggcaccggcacctgctttgctcggttgctccgggtggatggttgggctggcacctacgccagcacacgttttaatctcggcaaagctggcgctactgaaacgacagttcggctcgggctgaccagaaacgcccaacgtcctacgcaagatattttgttcgatcctttactagaggaatgcaagttcgtaaaaaattaggtgctgtcttcttgtttttttagcgtgctttcatagttattattaagcacgttgccaataaggtactcaatctatcctaaattataagacgtttaacttttttgacaccaagtttgataactcgttttattcaaaaatttgtgtaaaatatcacttcttttgtcatggcttggtttatttataaaatttctttcgcaaataacttaaatttgactatgtttgcataaatttttaaataagacgaacggttaaacttagaataaaaaagtcaaacgtcttataatttggaatggagagagtacttacattttttagttaaccaactaaggtcttgtttagttcaccccaaaaaacaaaaagaaaattcaaaattcttcgtcacatcgaatcttgcggcacaagcatagagcattaaatatagtcgaaaacaaaaactaattgtacaatttgcctgtagatcgcgaaatgtatcttttaagcatagttaagccttaattggatgatgattaccaaataaaaataaaaatactgtaatattaaaaaccaaaattttttcgaaactaaacaatatctaattgtaattattactagtcctagtggaagaaaactccacccacccaatggaaattttttttcgaaactaaacaatatctaattgtaattattactagtcctagtggaagaaaactccacccacccaatggactactagagtgaatagtccgttggcgctggactgtcaggcgggggttctaccacagcgagccccgtgttggattggatttgctttcagagttggagccctatatataaagcagccaaaccccgtccagcttcgtcccgcggctgcttgcccggatcccctctcttttccctggcactttgtcacgggacacccgggaggatggacaagagcggggcggcagccgacgacgtcgagcggggcgactacgagcaggagcacgacaggagaggtgccttcctgccctgcgtactggggttatgttatccccatgtttcgggagatcctatcaagggcctctgcgattagttctcgcggattcgttgaacccctcatctctctctctctctctcggctccttgttcgttccagggacggtatggacggcgacggcgcacattgtgacggcggtgatcggctccggcgttctggcgctggcctggagtgtggcgcagctgggctgggtcgcggggcccctcgcgctcgccggcttcgcgtgcgtcacctactacacctccaccctgctcgccaacgcctaccgcgcgccacaccccgtcaccggcgacaggaaccgcacctacatggacgccgtcagatcctacctcagtacgcgtcccgcgcaccaccaccacctcccgtcatctcgtctcgtttaactggaacgcatcgcctaaacatgcatcgcatcgcatcgcaggtcccagagaggtgctcatgtgcgggatcgcgcagtacgtgaacctgtggggcaccatggtcggctacaccatcactgcaaccataagcatggcgtgagtaaccaaatcctattttcctccgaatctccgtacaggcagggaaaaagaaacacgatgtgctgatttttgtttcccttttctgccgatctgtttatgtgctgcaaaacagcgcgatcaggcagtccgactgcttccaccggaacggcgccggcgcgcgctgcgacgcgtcagggaccgtgctcatgctggcgttcagcgtggtccaggtggtgctgtcccagttccctggcctggagcacatcacctggctgtccgtcgtcgcggcggtcatgtcgttcgcctactccttcatcggcctcggcctctcggtggggcagtgggtgtctcacggtggcggcctcgggggcaggatcgcaggtgctaccgcggcgtcctccaccaagaagctctggaatgtgctccttgccctggggaacattgccttcgcttacacctttgcggaagtgctaattgagatccaggtatgcatgattttgcagtaacttcaagtggaaaatatgttcagatattaggccaggtaataacaacgtacgtccctgtcagtaaagtgccgttctgatctgttctgatttcccctaggatacactcaagtcaccaccaccggagaacaagacgatgaagaaggcagcaatgtatgggattggagccaccaccatcttctacatctctgttggctgcgctgggtatgctgcatttggttcaaatgctccaggcaacatcctgacggcaggcgggttgggtcccttctggctggttgacattgccaacatgtgcctcattctccacctgatcggtgcataccaggtcagcacatctcacttgatgtacacctcactagaagaatttcagttgccacattcagtcagagctgaactctgtagcttataagctaaagctaatatctcaacgacgcaggtatatgctcagcctatctttgcttcagttgagaggtgggcagcctcccggtggccggaagccaagttcatcaacagcgcctacaccgtcagcatccccctcatgcagagaggatcggtgaccgttgcaccatacaagcttgtcctaaggactgttatagtcaccgcgacgactctagtggcactgatgataccattcttcaacgctgtgctggggctcctcggcgcattcagcttctggccgctgacggtttacttccccataagcatgcacattgcccagggcaagatcaccaaggggacgaagtggtaccttctgcaggctttgagcatgatttgtttgatgatttcagtggcggtgggaataggctctgtaactgacattgtcagtagcctgaaggtctcttccaaccctttcaaactgtaagctaaaggttattgtagtcgtgtacaatatgtaaaaatcttctctaagtcgaagaagaatgtaggcatgctctgagctgattgtgtgtgctctgttttctcacacatatcagtagtgcaaatcggctgtaataacctcttaggttgttcatactctgaataaattgaaaaggatggctaagatgaagcacaaaaaagactggaagtcagaatttcagagagtattgaataatcagtactccctccgtcaggctgtcacaatgtcctgttctgctctgataaaaatcgaccctatggtctatggatgtcttgccatcattctgtcacaaacaattgctagcaatctctagtcatacttatgcacatgacatatctacagaaactttcggagtacaatactagtatgtacataatctatagacaggtattgcagaggctatacctccacattattttaccagcctggtagtcgctgttcacaagtcaggcattttgacgacctaataagcttcccccatgatttcctacagggtgcttagaggccctgatattgtgattattactag

SEQ ID NO: 3749 - DNA, 4040 bp, Sorghum bicolor
atagcccgtagagagaaaaaaaacaacatattttgtatatagttggctgctcgaatcggtgtttaggaaagagcatctgttccttaggggcgcatgtgctcccacaccggtgttcagtgcgtgggactggaggagtacgtagaagcttgcaccagccaccagagcgcttcgagtgggaagaaggcgtccctctgttaaacgatcttgcgctggcgcgtggtcgatcgtgcgggcacgtgccgttgccggccgagtcgtgtggcgggtgcaggggatgcgtgagctagcgatgggcggccttgttcgtcgtctgccgttcagcagaacaatgcctccgtccacggccgccattccacccccgcgcgccattgctgcgccaccgctggcctccccctctcggtcctcagaacctacacagccggcctgcgccacctgccgcgggaggcatccccacgcctcgccgccaccgccgccgcgcgcccgatcctgtagtattttcgtttgtttgtggcaaatattgtctaatcagaaactaactaggctcaaaagattcgtctcgtaaattacagataaactatacaattagtttttgttttggtctcgtttagttcgcaaaattttttgtttttgggtactgtagtatttcgtttctatttgacaaacattgtcaaatcacgaagtaactaggctcaaaagattcatctcacaaattacaggtaaagtgtgcagttagtttttattttcgtctatatttaatgctctatgtatacgatcaaagattcgatgtgacggggaatcttgaaaatttttgcgaactaaacaagaccttagtgctttatacatgtgctacaagatttgatgtgacggagaatcttgaaaagtttttgaattttgggtcaactaaacaaggcccacgctcagtcacacagttttccatgcacgatgatgagaccaacctgacaacatcgttcggatgatcatgatccatacaccaacatatatatatactccagtaatcaatcattttttttattttttttaaaatactagtctctagtatatatctctgacataggtttgcgtgtctagttgtacaattcggagggagtagtccaaccgtaactatgacgagtttatttctttcatatttttttctattcaccctttgtcggaggagggagtagtccaacctactatatatgatgagtttatttatttattttagttttttctattcaccctaagtcatactagatgccaagtcgccagcacatatatactctctccatcccaaattgtaagtcattccaagaatcttggagagtcaatgcaatttcacgtttgaccaaaattatagagaaaaatactaagatttgtaacgtaaagtgagtatactatgaaaatataattaagaaagaatctaatgatacttagttggtaccataataattattattttataatataaatttggtcaaatttagaaaagtttgactctccaagattcttggaatgacttacaatttgggatggagggagtacaatacagtacgcctgctaatgggtgagatcccaacccatttccaacccgccgttccaaatcaaatgaatcatattttacgatcctccgggccttgtttagatgcaaaaactttttagattttgacactgtagcattttcgtttttatttgacaaacattgtctaattatagagtaactaggcttaaaagattcgtatcatgatttacaggtaaactgtgcaattagttatcttttttatctatatttaatgttccatgcaagtgacgcaaaattcgatgcgatgaagaatcttgtaaagttttaggtttttggatgcatctaaacaaatatcccatcccaaaccaacttaattagaccgatcagttgtcctagatcattcttctggctcattttattaatactctttctctgttgtacaaatcgtggtgctcaatacagtacacaaccatgcaggttgatgcacgctgccggccaggcccccgctaccaccggcctgagtgtgagcccttttctgccggcagcgcccgtgcagctagtccggctgaggaagctgttgtacctgcaggcgtcaggtacggtgcttgccgccgccggcgaggtctccgacggcctgttgacaagcttcgtattactcatggcactactttgctgtgctggcgttgtcggcatctgtgtcctggggtggctgctgttctggcgccgcaaggccgtgacctccctcgagttcgatgaccaggaagtacttgacaacctttccgacaacaatataattggtcgcagtgagacaggagaccaactgtaccgggtccgtcttcaggacagcaatggcagcgggcgcttcaggttggtaaccgtgaagaagttggagaacgagataggaacggtggatgacaatcttaagaaccgatgccagtccgaggtaaacaagctgggcgtcatccgtcacgacaacatcatcagccttgtccactgtatcgagagggacgacatgatcctgctcttatacgagcacatggagaatggcaggcttgacgaatggctgctgcactaccagcccctggacctggaagccagcgagcggcggcggcatcgtccgccgctgcgctggcgtgaacggcgagccattgccgtcggcgtggccaaaggactctttcacttgcaccatggatgcaacaaacctatcatccaccgcaacatcaagccgagcaacatcttgctcgacggcgacctcaatgccaagatcgctggtttcgacctggcccagatcaaccttgctggactgagccagccgttgagaaactcggaacttccggctgattcctttgggtacacggctccaggtgaggccctactgcttctagtgtgcttccaattttcttttatgggaacaatccacaatgcctaaccgcgtctctctctctctctctctctctttttggtgacaacctaataaccgcgtcactttttttgttgtagaatatgcgacggtcgaggtgagtgagaaggtggacgtgtacagctttggtgtgctgctgctggtcctcgttacggggagaccagccaacacaccaggagcgcgcggccacttggccacttgggcacgtggacaccacgacgaactgatcgctgctggggaatcctaccatgaagccttggggagatcagtcgacatggatatcccggatcgggccaggcagtacttgaaggagatggctgccgtgttcaggctcggtgtggattgcaccgtcgcggatccacagcagaggccgtccatgcagacggttctgagccgcctccagaggtcttggtggctgtggggacgactgggacaacaatgcgtcagcctatcgtgatcaactactaccatgcatatatctaccaacaggtcgggccaggcaccgaggatatgtctccaaaaagaaaagtcccggccggggagtagttcactagtatagtagtaaacttattattatctccccggcccaacgtccaaaatctaaaaaaaagaaaaacattacttaggtatatatgccttgacgcaaaaaaaaggtaatagtccgtgtggtctgtgatttcgtgtacatgcatgtacatatgtgcttgctcaaaaaaaaaaaactttatgtattgctataatctatctatatatattaaccctgctaactttgtatatacaattgttgtcgtatacatcatgcatgatctttatgtgtcgtttacttgtgcttgtttctgcgtgatggaatagggagcaagcaccagtatttctcggatctcgatactttgtttggtgggtcatgggtgcacgccttggacttgatagatcttgacttcaattggacatacacaatttctttcgcgccaacacatatattagcttatgttttggctcttattagtttaaaattttcatttcctttgattcataaaaatatttttttttcattagagcaactacaacaaagcctctgcttgaactctcaaactcaattttgag

SEQ ID NO: 3750 - DNA, 26893 bp, Sorghum bicolor
agcttcatctagatgaagactagtgcacatcatttccaacgtgaaactaggtgaactctactacgagcattatgtttcatccccacatgttggaactgagtgaatcttcactatgagcatttcattttataacactatgaaatatatattattaaatttaaatgcatagatctataaaatgtgtgaaatgaaactatgcatcagagttgatggatcatcaatcacggccaagttagtcaatgaattccccgccttcaacatatccagctaagcaaaattctagtgttgtgaaatacaagatagtttggtgtcgatattgttaagggagacatcatgagttaacttgcgaaaaaagaatggcatttgtgacaattgtgttgggctcagtcatttcactagggagtgtcccaagccaaattcaaaaatcttgcttgaccgaaccaaacagatgacatagggagtagtgtggtggtggtacacaacatcggagaggtcatggaggtcccatctcatacaggatgtgagatttggaggtagaggaggcacgtgaatcttctccctctggtcggtgctcacggaaaagcaaattctaaatgatctctctgtttggtgcaaaagctgatctgtaaacataaagggctaatacccgattcaaacgttaaggcgtgacagccgatttgaccttacaatcgacaaagatggtaactcgaacactttggtcccgacaacagcgatgcgcccggatgtcacggccaagaggtgctcacgcggaacttgagaacacgccgagtttgactcgacgaattcctaagtactcgtagtaaaaagaaaatatgacgaagtcgtcgaaaaagtagatgctggaatataagtaaaaacttgtgtttgattgattgatagatttttacatggccctagggtctacatttataccctatccaaagagctacaaccagacacgactaggactcgaattccaaactaaacggaactcgtacacaaaacgaattctaataactaaggaaaacataaaacgaccctcttgtgccgaccggggcaccgccacagatcaatcggcaacctccacgcttttcttcagagccatcggcagacctcttgttgtggccattgacaaacattgatactggtcatcggcacgaacacgtcaccacctctggacttaatcacattcagttgtttccccatcggcaaccaccttcattggcaacttccctgtagactagttaccgttgcttcatctgccgatctatactttactaaccccaggtacgcgtcaaaagatacgtgtccaaaaacggtgtcaacactctctctatgaagtttgatttcacttagggtgttgaaaggtcctaatatggctagagggtggtgaatagcctatttaaaaattaaccggacgcgtaggctcagcgttcggtgcctgcggtcagagcgtccagtgagtgtttttcagtgagaaacactccgacgacttctccaaactttccatcggcgcaatagaaaatatgcatttcattttctcaaaagcgtcgaatcccgccgaaatggccttagttaagatgcggaccacaagtccaactacatttgaagttactaatctctgtgacgagcagacaggtggtaccaaaaaagttgaaaagtattccctccatctcgcaaagcgtctcattctcacttccaagaagttaaacatttttaactttaaccaaatatatacaagatattattaataactgaggtatataataagtaacattaggttaatcattcaatatatttatgtaacaaacttatttggagatacaaatgttgctaatattttttatagatctaatgaaacttaataaagtttgatcagcaccaaacctcatgtgactttccttttgggacgcaagggagtaagagtatatcgcccaaaatttcatgtgtggaatggaactttcgcagtatctcttgtttttcaggtaatttacttgtccttttgctgtcaggctttcttccaaaggtggtgggcccagaaaagcctgacaatcaaggccatagtccacaaactggttgattccggtcagctagagttcatgtatggaatgtggttgtccttcttccctttgatcttggcttcagattttttttctcatctcaaaaatttctcatgaatgttatgttcagaaatggtgggtggtgtatgcatgatgaagctgttgtgcattacatagacatgattgatcagaccacacttggtcatcggatgatcaagaaacagttcaaaaagattccaagagctggctggcaaattgatccttttggtcattctgcagttcaagcttacttgcttggagcagaggtaactgtaaaaatcacatttgggatgacgtaaaagttcgtgaaggaactaaagtaaaaaaaaaaacttggatgaatctagaagatagaaatctacaaaagcattgtaactgttcttgccttcttattcaataaaacaaaaggtgaaccattttacatttaacaatgtttgctttaatgcaattttagcttggtttcgattctgtacatttcgcaagaattgattaccaagatagggcaacgcgaaaagcaaataagggcctagaggttatatggcgtggctcaagaacttttggttcatcttcacaggttgtttaatctacatatatttttgtacatcactatatagtattcaatagcatgaatgactaatttgaatttcataaaaatccatttaactatacaattaaattgcagatcttcacgaatgtatttcctgaccattataatgcaccagatggcttcagcttcgaagttttggctgaaaatgtcatacccgttcaggtaaatatttatacatagcaagtttcatggtcatgaagtttactgatgttacttatgaaaccttacatttatttcaatcaataaaccatttctaggatgacatgtcactctttgactataacgtccaagaacgtgtaaatgattttgttgctacagccatagcacaggtaaacctccaacttccgacgactcttggtcggctagagcgatttgaatttatgtttccaactaaaaactgcaactcacttatgatgagatgttttgataatcaggcaaatgttacacgtacaaaccatataatgtggaccatgggggatgattttaactaccagtatgctgaatcttggtttcggaatatggacaaacttattcaatatgtgaacaaggtattgctagtcttatccaaccatgacaagtttgaatgcatagttttcatgtactagactcgtgtttgttatttttgcaactttattgctaaaatgatatattttaattttctaaaagatatgatttaattctgctgattacagacatgcagcatctcattcggacaacacacacatatatacaaactttcaacagccagcatattgaatagttattcaacgcgctagtggagtgcctctaagctccggtgaaacaacccaagaatcctacaccaataactatttcaaagtgacaccttaattatttaccgtgtttagcatcctacgaaagcaaatcgatatatgtgatgaagctttaacatctgcctaaacacattgataaatgtgaatttaaacatagttccaacatgcctgctatcgtaaactatatattatctcaacagcatttgaacagtaagataacaatgtcatgaatactgcaggatggccgagtgcatgcattatattctactccgtccatctacacagatgctaaacatgcatcaaatgaatcttggccagtaaaatatgatgattatttcccgtgagttctcaaacctagtagtacaacatgaaaattcttatgctaaataaatcttatgctaattaaataaaataaatttgatgctattgttatactgcaaattgcagctacgctgattcaacaaatgcatactggactgggtattttacaagccgtccaacattcaagcgatacattcgagtgtacagtggatattacctggtataataattattcaaaaactactacatgaattgtgctcctatgtatatgatgtatcaagaaatttttgaataaccttggaaaatggctcttggcaggctgcacgtcaaatagaatttttaatcggtaggagttccttaggattgttcacttccagcttggaagatgcaatgggtattgcccagcatcatgatgcaatctcaggtactgcaaaacagcacacaactgatgactactcgaaacggattgctattggcgcatcaaaggttcacaatttcccttgcagacacttttttgttaaaatgtcattatgtttttcaaagaaacgttgatatattagctactcttctcattcaggtcgaaaaaggtgtaaacattgctctgacttgtcttaccaactccaacaaaacatgtgcatcctctacagtaaaatttagtcaggtgagaaaatgtgtgatctatattttgtggcccattatttcagaattttttatgcttcttccatatttttgccgtgggcagtaaattttcttaccaaaaggaacctgatagcctctagttactttaactgtttggtattatatcatacactattttatactatattagctctttataaattgttacaagtttttcatctgtaattcttaaagagcttgattacctaatgaagctgtctcccttggtaattgaacatatagtgtccacttctaaatataagctactgcccttcgactgaggaagcaatttcagcaacaaagcatttagtgagtactacatgttttgtcatttttatagcaattaatattttagatatttacatggtcagttattgcaggttgtagttgcttacaatcctcttggatgggaacgtagtgacttcataaggcttcccgtaagtgactaaaaacatcactcaacacttcttcagaaatcactgaccaaaataacatttggatcaaggatcaaggtcatttatagaggaaatatataccctaaatttgtaaaaataccaggataaatttgctgtgcaactccttttattccttgctttttgagcatctctacttgtgcagttacatgtcctttaaacattttcaggtcaatgatgaaaaccttgttgtcaaaagctttgatggaaatattgttgtgtcacaaatagttgaggttgataatgtgacaggcaatttaagaaagttatatgtgaaggcttttcttggagtcgcaacagacaaggcccctaagtattggctaacatttcaagcttctgtgccaccaatgggatggaattcttacttcattctgaaatcaactggagctggtgaatgacttcattttaatattttattttcatcaaactgcaagtccatgtgaaaatattatttttttatgccagcaaataatataattctttttgacgcatgaaactgcttaatcaatagtggagttatgatataacagagtaaggcatggtgtatcacatattcacatgtctcataactagcttaagttgttacatcaaataattacttaccacaagggcttccaaactttattttggctatttacaccaacttcaacacttatcactatgtaaaattgaaaaaaataagtccttacccagcaggattggttatagtaatatttgattaagatgatagattttaaattcgatcattttttaagttaagatacataatttttttcctaccacctgtctaggatacaacaatactgagtatgtcccagccgtggtttctccaagtaaccgcacaattgaagttggaccagggcatctaaagatgtccttttcttcagcatctggacaactagagaggataatcaattcggcctcaggagtgagtctcaaaataaatctcttattttaaattagtcctacatatctatcaatacaaataaactttcaactgccatttatcaatagatgtatcttatccacattccgaacttatgaaggctagctcataaatgatccatatattgttatttgcaatggatttgacctttaacttttgatgcatttgtactagttggaaacttgtcatattagttttatttaaactgtaatataatgaagaatagaataattattatactacttagtaattatactctttcttatggtttatatctacctatgttatccaaggatgattgacatgcatcaaagttctctttttccatgatattcattcagttgcacattgttagtcttgtgcgcattaggaagtgcaaattgtatataatatagtaaaactagattattgttgatgccactattagatataatcatatataggcactatttttctatcaaactagtgcaagtatgacatggttctcctaaatattacttaatttttcggtttgctatgtctgcaggaccagtatttttaaacaaaaaaaaattgtctaccactattctcctaaacaatgcataccatttgtctattgggaaacatcaatacatttattctttgacaaattgtttcaggtggacttaccggttcaacaaagcttcctttggtatagatcgagtaaaggagattccttggacccacaggttttactaacgcatggacttttctcagttaagacatatattttgacagcactaatgtgtttttatgctaggcatctggagcttatatatttagaccagatggtaatacaccaactattgtttcatcatcggtaagaccttacaggctacctatgttactatttcaattgatctatcttcccattgtcctatttttaaaatgtataagaataaattttctgttaatggtaactcaatttgttggttcttgatgtattttacacagtaatattgcacaaaaaagtggcttaaaaaaacatggacactattgttattaacggtagtataggttttgttgcattttagcgtcaaggacataaaaaaatatagattggaactagagttttttcccacaatagggtacccgattttcattactaaagcaatgaatttgcatagttcatatgtttgcatgaaagaacaaaacaaaggaccaactttgccttaatcataggctaagggcaaccacaaaccaacaaagttcaaagaaatactctaggtttccaccttgaccaaaactagaatacctctgaatctcattgagagatgtgccaaacagtaggggttgcaaaagttggggtaaaagagataatagatctattttttgatcaattaaatgttggatctctcaatcggctatggtcctcgatatatatagaggggttggtcttatcctggcaggaaacatatccaagatgtaatttgcaagtctgtcacatcaaaacacgagccagaaccaagttgaactcaaaccagacttggactaggaaaactggtctacacacgctcgcactaagacaactcctacaagggggagagacgtcagattgaagagattcaccaagattcagaaagatgataaggagttaagtgtaacacactatagattctattggtgactctgccttggggttgctaactcaggttatcagctaactaggctagctactgggtggttgctagttgggtatcgtttttgtgtggttgttagatactccatactgactgacacatgttcctctatatcggctaatagggtgggtggtctctagatgacttggttcggctctggtggatgtaccgtgggttcatggatactctagtaggatccttacatttgagttactagtttactctagtgttttgactcatcagatgtaccaaagtgcatagtggatgatttggtaggaactacgcgctctctggtttactagatgtgagggtttataattcagtgacactccaatcttaggttggacactatgttgctcttgcttttagggtttgggtgcctctagcacgggatttattaggttcacgggaacctatcggacgttccgtctcattgatgggttctccaccaactaggcaacaaaaatctatgctccatgttctaggactggttgattgcttattcgaggtgaaaaacattcgtgcatgtgtactagttttctagggcattcttagggattctctaggatatggctagtcgactctttagctaataggtgcacctattggtttacctaaatctcatcccatgaactaatagtgaccaattcatgagattgggtaagaaggcttacaacaacatcaagatccacaagatgttaatctctatgataatggattgagctcatcttgccttttgtggtgagtgagatataactacactccatgatccattcatgcaagagagattgggataagggttcgatagaaatccacaaccaaagagacgagaggtcttgagctaaccatgatcactaggcaaggatgacttggccaatgagatgatgatcttggattgcattcctccacttcatctccaccttcaccttcatcttcaactccaactccatattctctctagttcatcctcactcttgttcttctagagagagagggagagggtgacaaatgggagagtgagtgagttggagctacattcagttggtgctagatatttccacttcgtgcatgtgacatatgggtccatggctaagctgatgacaactcatcgtccattcactacatgtagttttgtcaccagtggatgatctgattactgtaatactcgattttaaggacaaaactagatatacaacatatgtgagtcttaaaagctaaatctcgcctatagctacaaataaggggtaatatcaaaagacaatgcataaattatataacatacttaataaatccgagataaccttaggcaagaaacaacaaaagatactccaaactttgggtattaactccactctatatgatccaaactaactggttgatcacaagcccaaaacttttcatgaacggtgtggggaaaatagcaagagtgagtccatgtctaactccacaaatatagcaagaaggtcttagatccctattgggcattcttaacgtcattaccaaaagtagacttagttttctatttctgataacggcgccaaaaatgccaaacctatccctcatgccacttaatccaagttgtcatccccagcatgacatgagagacgtagtattgaaatatgcaattgcgcttctgaataaataataaatgagatctgtaagcgcacagattaataccgatgtagcattttaactgggaagtattccaggtatcgttatttatatttttaccactgggaagggattactaacatcagtgttgattatggaatgaaatatggaactgagtatctatcattgcatgtgtaatagagagcattcatctatctcttgcatacagggataaatgtcacataaaatatagataaagtatgaatggtgataactgatcagcataactagccacatataataatgataagcacctcaacagatattctagcaagtcattagcatgggattaggatgaactacaagaatatttcctaagttattcttaactataaagtctagcatatcatagttagtgcaatcatacttggcaatcattgcgagaaaggactacgctcatgcatagtgatattatcaaggaagatgagaaacatagcaatgactcccctgtaataatattgttttgactgccctgtacacgggagggggactatataagaatcaatggagctatcaccaccacgaactaccccgcgatccggcatatagggtacaatcgcagataaatacgttatagacaccatgcctacacaatatctatcatttacccatggatccgatggataaacgctatacgatcctaaacatgtatataattccaatcaaactaagccaagcatataactatgataaactaagaacgatataattgcaaatgtaaacaagtagagcaaagtcataataaatatatagaaatagaacaaagttgtattcataatattgaagaacaatgatgaacaaatgaaaaactatggagaaattaccaagaatcctcttgacatatccgaaaaccaatcgaagattgactccttctagttctaatcctatgtagctatgctaaactagagatctagttgatgtggtggctctagggcttgatcagagactctcctcttgatgaatgaattagggtttgaggaatgagaatgagtgcctcctccaggggccagagggcctgcttatatagcccctccaaatgaatataggccgtcggatcaaaccgaccttaatcgcacggttttccataatcctttaggtcggtggagcattatccgtgagacggagcctgattggctgagaaccttgggcgggcgcccaaggggggagggtgggcgcccagcccccgggcccgctcggcctcccactcgttcacgtggcttctggactcttctagatgttggataattacggtgcacgttaatatctctatgtaaacccgacgtgtggacctttcctctatattctctgataaccccctacagaaatagacaaacaccaaaactcatggaattctgtcagataaaaccctaagtctgggtgttggtcgcatttggatccttttctttatttatttgatgattatatttgatacttaaaggaccgtcaacaatcccacaaacttatgatcaatgtgacataaataatatagagcataaacaataaaaaattagtatcttaagataacaagaaccatcacccttgatgtaagagtccccaaggcttctcgtgtccgcgagcttggctagtacactagtttattaaacactctatataggtcgtacatctttgagtcatgatttaccctttcgcccgaggtagctaatctcttaacccccttcctagggaggtcggcagggttcactatgaagcctttcaaaagttcgcctaacaaattagggccacaaagtttccaattagcgagcagatatagagcccccttccgaatagcacaatgatgtgcaacatatacacataaggacacaggccacactatacccaaatcggcaagcccctctagcacgcttatgggtaacatctaacaatctagaaaaggtattcatactgagctaaagctagagccatttatagccgtcatcgttgcactatcaatcccggtgaccacttacagataaattatcgtttgttacttaaacattagtcaagtcataagattatggtcacaaaaagaaaacccaaatgctatacttgcctagatctaagtttctctgctgctcttgctgattctattggtcatcaaggtactgatcttgatcaccaaagtactgctcaccgtctatactcgatcaccaatcatcaacacacaaacaattagagccaaacatacatgaagcaagataaagctatagttagaatagtacaacaatagcaaaacaatatgaaaagtttataaaaacattctacgcatcactacgaacacacaaacgtaaagatcacgaaaatcggagctaaaacagagaagatatgaattttcctaagatttcctataggaaagaaattatttaaatagggtcgaaattgaaaagttgcaaactggtgaacctaggttactaacatgtagttctcatgaatacgaatctaatgcaattcaaatgggtcaaatcggagttaaaatgaatatttttatgagcaaaagaatcccaccggcaattttgtaaatactgaaaagcgtattttgaatcaaaccatggtgttttacgttttcaaaaatggaaagcgtaaatcaagatgtcaccttggaccatgggtttgattatgaaaaagtgcagggtctttttaacaaaaacgtcaaccgaacaagtatcttatgattttggccgtcggatctagattggacggcacagattaatagctggggagggagagggcagatggaggcgcatcgccaaaacaggaaagacctcaccggagttcattgttttggtgatttagtccatgattcgatgaaccaaaagcagggaagcgaggggctcaaggcgatctcacctagggctgacatcaatctatgctcggcgtcaatctatcaatctcacgctatgaagcccgacatcaatcttaaggaggcgaaggtgcgatggaacaacgacctgtgctcggcgtcaatctaggatggcagcggcgtttgcgagcttgatttggaaaggcaaaacaacatgctaagactcgggaaaagggtagcaacgcatgcggttccatcttatataggggtcttgcatgcggaaaacgccaatcatgaagaaattgggcagatttttttaccctggacggagtccggtctctagacggtgatgggatgaaggaggaggcgttgacgaacaggtccctctggtcagcaacacgagaagtggggtcgggtggcagagagagaagggagatggggcgcctcgcgatggcttgggtcgggacgggccatggcagcctgctgcgctaaatagccgagtgggctagatagctggagagggagaggaaattgggcccctgaggccaaaaaggagaggaagaaagttttcttctttttttttatttcaaaccatttgaaaatcattaccaaagcaatttggatcattttgaaaagcatttaaaatcagtttgaagtttggtcaaaaccactcacccaagtaaaccaaatgcaaagacatgtatgctcaaccatgtttctaactcctatggtaaatttttatttaatggaaaatattgttttcctaggtctttatgaggaccaaaaatacaaaattaaatcattttaactctatttcaaaagaggcaaattttagggtgttacaattacaccaacggatgatctagtgtcctctgagtctgtgatcttaatccagtttgcatggttgatccacgggaatgacttgcttgttctaagggttgacagcctgatctcgacaacttatgcttcggttgaatgccattctcattgatgcgccgactactgttggcttcatactcttttggcttgtgcaaaggtgtcgctgattgtctaaagctaagggtctattggttgttgggaatttcgggtcattacaatccaaatccatgccacaactaggacacaatatatagttaaagttctgtttctcattttagtgaagctatggttttgcattggggaaccttcatttgaaacatgttattacttatccttttggtaaactacgtccaggttgagattattggtctagctagctttcactttgaattcattttccaactgtctagcaaaagcctctctagaagtaatagtgatcagagttatattagtgatatacttaactctttggtcagctgcagtactctcaatgacatgaaatccttggccataagtaaacaagccacaaaaggggagaaactcctagagcattttttcaagtatgtacatcagtcgctataaaccctatcggtcgctatagacttatagcgacgccacttgccgcaacttttacatctgtcgctataacgacttatagtaaccaatatggagtcgctacaaatcgattggttgtggtgtagtgtgttctaaggtttaaaatgaattagttatgaacttttaaagatttcaccatattattttttggaaattgatatttctacgaagttgttcgattttaatagtttgatgccctaatgatatccagttttagagttttatggctaaaatcagacacagtttttttttgaccaaaaataactgcaggggaggtccccacagtattcaaattttcattaattaaaagagagcagaagtcttacatgtaaattaactaaaaaaatcagacacagttaatagtttaatggccaaacatagtcttcttcattttacaaatatcattacgcaataaaaagggataactaaactaagcaaaactttaaaagtcatgtttgaatgacaatgaactgattaaattttattccttttaggtgactctcaaagttatccgtggacctctatttgatgaagtgcatcaacaattcagctcttggatttatcaggtcagatcaaatatttactgcagctcagaaccaaattataattaaaatgtaatatatcttacataattcatggagcattacataagaatattttgttgatatactaacatacatagaagtggggtcactaaaaattatttatttatagtagtacaagacatctcttttataggaatcataggaggaaatcatgggattcttgaattttatttaaagcattaaattgtagtactctgttgcaagatttgcacatcctacaatttcaataattcattacttttttctcaaaaaaaaaaccaaagagagctacacttcattatattaagaagaaagatgggttaagaaccctttacaatacacaccacacaccacactgtttgactgattacaatcacgcccatgtactagttgtcgagacgaccaataccaaacatactatcgatcagagagtgggaaggacaacccctgagcacctgccatgcaccataactagcgctcctcccctatagcaaccaaggccctagcgatgctaggcattatcccttagaaacacactagtttccataattccacaatgtccaggcctcaaggattattagtgaatttagccctttctttgtctcaccattcacagcagaacttgtcttctacccccacacatcaaaggaactgtctcaaggttgtggagctagaacatggagcctgacttgccaaaggtgaaagtaccagaattgtcttgcgaaaacgcatgatactaggatatggttgatggccatcatgctgatcacatagaggacattgttcagcatgaggcaatcctggtcgcgcaagacgatttacagtccagcacttattatgtgcaaccagtcacaaaaagaaacagcacttgggttgtccccatgttttccagatccgttcataggggccaaaaagtgtggagtcaaaaaaaaaaccctcatatgcagattttgccatgtattgctcactggaggagagttgccaaatatgtgagtcctcaacctcaggatgtagctcaaaaccagataggagggcccaaagttgtagaaaatcactatatccctaactgtaagggcaccttgtacatctttaacccaagtccaaccagtgagagcttcctgaacagtgcgctttttaattcttctcttgtgcaaggtctgcaatgcattgtctatggagccaccggtctgaccaaaagagggtatgcgagccattaccaacttcagatacgatggccaccaagaaaaaagagggcacatggtcagggacttgaattggtaatttcgcctagagacaattgggttctgttttttggagccaaatcaacctcatgcgcagaggccatccaagggtcctgaggtctgaaattaccagtccacccaactcgggggggcggcaaactttctcctatgcaactagacagtgcctgccctgtacatcttttcgaccatgccaaagaaagccccgccatgttttgtccacaactttgatagcccatggccggaagtcaatggccattaagagataaacaagcatagctgttagcatgaactgaacttgcacttttcgaccagcacatgtcattaggtctgccttccacctaggtagctggtctgcaattctgtcaataattggttggacttgtgcttttgtgagctttcttagcgaaaggggcaaacccaaatatttgcaaaggaattcagcaagcgcacatggaagtacattctgccggacagtaagttcctgttaaccacacctgatgggcagaacattactcttttgaagattggttctaagaccagaagcatctccaaaaagatttatcaaatccattatgatggcaatatcactggtttcaggtcaaagaaatagaaccatatggtttgcatacagtgaaatcctgtgttgtaatggttgtgtcaaaagtggctgcagcaagccttcattgatagctttagaaatcatttgtcccagaacatccatcaccaagatgaatagctttggggatagtggatccaattgctttaactcatgccgatgggggatatgctccccgggaaccgcattcagaagcacttgagtagaagaagtatatagtaacccactaattatgtccctccggatctgcccgaaatccaaggattacaacacctcaagaacaaagggttaagaaatcaagtcaaaagctttagaaatatccagcttgaggaggacacgcggttgcttctgttgatgaaggaatcttgttgcctgttgtaccatcataaaattatcttgaatgaaacggccttttacgaacacactttggtttgctgacaccatttggtgcagatagcctgcaagacgattcgctagtaatttagtaattccttcgcaaaactgtggactaaacttattgtctgtaagtccttgggttcatcagtagctctctttttggggaggagagtgggccatattgagaatcccaaaattcatgaattttctgctccaaatcgctgaaacagcagccatgatatcagacttgattattgacctgcagaatttgtaaaaataacccgtaaacccttctggccaaggagctttgtctaaagggagttgcctaattgtttagtttccaatcaccctcatgatttggttcttttattctataccttagtactaggataatgttgtattttctatcatcagactttcaactaaattataaatttggaatatgtatggtctaatgatatcatttcttggcaagtggttgtcaatgcgtcatttgaatatatgctccattccaaagtaataattttctagaaacttttggacagactaaggatgctggcaaaaaagtatgtaccctcatttcctttcctttctcggagaatatctcctagatttggcagttaccatttgcatgcaccttgtagaatgttattttgtctgggacaaactttaaaccttagaaacctatttattttgggacagagctgagagagtagttttctactacactctgcacttaaaaagatacaggaagacttatatcagcagtgaagctgtgattaacatttctctatatagattacacgactctacaagaacaaggagcatgctgaagttgaatacacggttagtaactacttcggctttggacaatataatattacagtgatgtttttgggacatctactattcaaagtcaaacttactattttgttgctctggtttgtcacaaagattggtccaatccctgttgatgatgacgtaggaaaggaggttatcacacagttgactgcaaatatgagtacaaacagtacattttatacagattccaatggaagggatttcctcaaaagggtaatggtatataatatattctttggatatttgctattattacttgtttaagaatcacatcattggtatactgttgaatagatcattcccagcttttaggcaaatgtgggagcccatctgaaatatttgtctagttttcttttacctgcacattcactaagattttcattgcaggtgagaaactacaggaaggattggaatcttcaagtgactcaaccagttgcaggaaattactacccggtaagtgaaagttcacataaacagactaacagagtgctgtcattaattggcagattgccagtaacatcacaacaacttgttctccttgttaaatatttttgcaatggacagaatcactggtgaacaacacagagggcagtgttgattttagccatggctctctggtactgtagctgaaaaataactgaaccaattatatagcatttccattgcttttcatggaagccgagcattgtttgggcacagggccaggccaggctgaatgaaaggctgattagttttgcaccatgcttgcgcttgggttgattttatttaatgtttcaggatttttctttttcctcgaacatgcagggcagctgtgtgtcaatatattaagaagaaagaagggtgtagcacccagtcaaaaatacaaagggggttttataccccccacacatacacacacacactagatcacctgttaccaaattaaacaacccaagaccagagagacctatcagtctaactggacggctgcagggcaagaagatgagaaatttcttgagccccagccaactcccacataaacatctcatccctactggaggagagaagctcattcagatcgggctgccttccatcaaagacgcagcgattcctgtgattccagaaagaccaagccaccaggattataacagaattcagcccatgctttgcatgatcagccacccttgtggtcacctgatcccaccaatcttcgaaggaataatcatccgactatggggctaagccttgcaaactgagatgccagcaagtggttaatcgtcttctcctgttgctcacacagaacacagtgctcaggatgcggcagcctatcagccgtccaacacttattgtgtgcgaccagccacatgaaaaattggcacttgctagatgcccaacttctccatattattttgcaaggataaaatttgatggcaccaataaacattgcgtcataagctgacttagctgaatattttcctatacataagaattccagatgtgagagtcatccacatcaggctgcaacaacacctcagtcaatagctgccacagattgaggtattcagtcaaaaatgccacggtatgaactcctctattgtcagccacccatctcccatcagtaagtgcctcatagattgttctttcctttgcccgactagaaattaaaccaaaaagatgtggcacaagcttatcaaggctctgtccatgcagccatctgtccgtccaaaagagggtgttcctaccattgccgacttcagaaactatggctaatgagaaaaaggctttgaccgaatgatgcacctggatggggaaaaaagcccatggctcttttggctcagttttctgtaaccagagccatctcattctgagggcccatcctaattgttgccactgtgaaataccaagccccccaactttggtggtcgagtaaccttgggccaagccaccaagcaatgtccaactttcacatctcttctacctttccagtggaaacctcatctgatcttatcaatggccttgatggcccatggtgggagatccatagccatagataggtagtacttttcttcatgcccttgttagcaaatcagccttccatccaggtagttggtcagctactttgtctattgttggttggatttgggccctagttagctttttgagagataaaggcactccgagatacttacaggggaattcaagcaactgacagggaaggtgagcttgtaataattgtctgtcctcctcctgacactggatggacatcacactactcttctccatgttggtttttaacccactagccctttcgaacaagtgcaacatgtccaaaataatgtcgatgtcataaacagaaggccttaggaaggttaccacatcatctgcataaatagaaatcaggtgctgcaatgcccttctagcgagcagctgcaaagatcctcttccattgccattttatcatgaagccaaatacatccatgactaaaataattaaataacatcagcgataatggatcaccttgcctcaaaccccttttgtattttttttttccactagggagccattgagcatcgcctgttggaagaagaagcgaggagaccactaataaaatcacaccaaatctgtccaaaacccaagtttctcggaacttccagcaggaacagccatgagacgaaatcaaaggcctttgtgatatctaacttcagcagaatcctggcttgcttttgctgatggaggtagcgagctgcttgctgtaccatcatgatgttatcctgaatgaaacttgataaatgcactttgaattggagagaccaattcattaagtcgtctagccaaacgattagctagaatttttatgataagcttagcaaaggagtgaaccaagctgataggcctgaaatcttaatattcaaggcctcagctttctttgggagaagtgtgatataagccgagttcaattgctcaaaattgcaaaattttctgcaccaaatagctgccatcacctccactttgattacaggccaacacgccttgtaactttgccagtaaatccatccggccctggggatttgtcaggagggagcgagcaaattgtctgccaaacttccacctcagaaaacggagcctctagctctgacaaatcatgctgtggaatggccaatgcctccaggttgaaggtttcatcatgatccggggcttccccaaggagactattatagaaataaaaaatattctcctcctcctcatggctagtgagtacttatccgtcatctgaggtgagcttgcatatgaaattcttccgtttgcggtgtctagcaaaagagtggaacaaggaagtattgacgtctccttcgtctagccaagagatgcaggaacgactacgtgctattgtgcgctgcacggaggacaaggccagtgagtgtcttttaagctgattccgcagccatatttcctgattggacaaacttcaattatcgtgggcaatttctagctgatgaaggacttctctagcaagtccaagctgagagtttacttgaccaaccttcctgtggctccaactctaaagacccctaactgtcgttctgaatttttgggccagagtgtcgaaaggacatatagatgctggaaccaaagaccaggcttgttccactgcctctgcaaacccatcaagttttgtctagaaggctttgaaagaaaatctggccttttcaggtttgactgcatttagactgagaaggagaggtcagtcatcaacgccatttgtagaggcactttgcaacaaattatttcggtaaatttgatcctagtttgtggaacacaaggctctgtccaatctaaccaatgtaggtgagtcctactggttcgatcaagtgaacttacgtccacacatgggcatatccagtagaccaagatcattgattaggcgacaaaacctttgtagttctccattacaaaccaaggaccctgacatgcagctggaacatccctcagttcttgcaagaacatcagcttgttatcatcaccaccttgaggtccacacatgccagtaaaccaccaggcttgaccattagccagacagaactgaaccgagatgcaatgattatctgtccgaaccacagtggcaagaccaaggttatgattccagataatgaaaatccctccactcgtgccatttgacggcaattcaacagagtaagaaaaattggagccaaacatagccagaattacaccacgagaaatcctagccatcttggtttcctgaaaacagactatatccacccttgatgaaaaaatcagagtgcgcacagagtcctgtggtaccttagaattgagcccccacacattccaacacaatatattagacagattcattgatgcaggaatatcaaaacgacccaagtcacaatcaaacagcaaagctaggaaatcaactcatgctccaccatttcctcattcggaatcctccagcttaacaaagcagcaagtgcttgtgtctgagagttggtcaacaaagaggactgcgtaaatagctgtatgtaatgatcaagtgcctcctggctgatgccttcagactcttcaagaatttccagcgcgcatcactctcttcttgctgtgggttgtggtcgtggcacccacctcctcaggttgaactccagagatgcggccactttgtcgaggaggggctcctgggatgcagccacgctgacgaattctgttggtgcgcaaggtgggaaggatcttggatgtcttcttcgagatcttcgccatgaaatttgagcgcttgctgggaagcgcggcagtgtgctcgcagatacaatacaaggtgtgctggcctactgtcgccttcaatagatctatcagggccatcaccatcaatagacggcccatcttcaccatcaagctgaagctcccccattactgtagtagcatcgggcacacagcaagaagcatcaaacacgaagttggcccccttgaagaacgggccagtacgcacaaggactccttgcaagccgggcacgtgcccaagccagccaatgtagaagccatattggtagatggctggggcagccgctaggttgttaatgtcgctgcataggggaggtgtaacatgtggggtgggctccaaggaagggacaacaaaatcccgcttttccatggcggcagagtcccacggctctacggtggcagagtgccatggctcctcggcggcagagtcccacgactccaggctggcagagccccgcggctccatgtggccatcccccataggtcgtggccctagccactcatgcggtggggacgagaataactagcatccatggcatctccaccatccccactggacaacccatggttggggcaatgatcagcatcttcacgtaagttctgatgatcatctttcgacagtctctgaggaccagagtgacctttcttctgtgtcctatgctgcagcttctggccttacgagccttccggcaccttaccgtgggcagccgagattaacggaggaaaaccccatgcccggccgccacagactttgggcgttagactagacgttagagtcgaggcacttcagggcgagagccactagttgtcgtggacagccagatgaacgacgcccaagtccccggcggctcaccgcacggtgaccaggagagaagcagttgaagcatttcccctggaggtccgccgagatcagagttttttttagataatggataaaatatctagcttcatctaccaaaagtagaatcagatcaattattacaaagtccaaatttgagcacacaaccgttcacatgactatggaaacaaaagaaacgttcttgactaagcaaaaccgacaaatctatgtgacagccaacagccgccgagatcagatgatgaggggggtgctgcacaagacgcatgcactccttacatgcactacgggcgcgtttgcgaccatggccaatcggcccagctgtgccctccgcgtgcaactgccggtgtttgtcttcttggacccaccatcaagcatggctatcggcacacaaatcaccttctctctcttggctcccagaaaacgaggtggaggttcgtttcttgacggcctggctcgcttgagcgatggagcagcacgctggagtgttggaggcatggtcgagtaacctccggtcaaccccgcagctgtgaacgccgtttgtgctcgtcgccgctgctacaaccaagccatgctgtcaggacgaggaagacaaccacaagcgagcatggacgtcaccggtgtcagcttgtctgccggcgctgttgtcggcaacggtgacgactcgcaggaggccttcgcacgccaccacgacgtccaacagcactgcaacgatgccggcgccatgcccgctgagcagcagggcctcctgcttggaggccgagatcgagcgccgcaaccacgaggccgagctcctcgcgctcatgcgcctccacccggtctgcacgctcgtcccctccttcctcctctcctcccctgcagcgccaccaccgccacgtccttaggcgccctccaccgccgcaccatcctcactcctgcagatgtggcacgagctcaaggtcgagcttggtggcagccatggccatggtgaaatacaccacttgggtgtttgatgaaatgccaataaggaatgaaagggtggtaatgttaccacatcctgaatctagggtcaccgtatttatatgtacaggcaacacaaacacgatctaaatagagctcgattctattgggccacgttgtcaaacatgagcagttgcaccatttgaaccatactctagtcagccatgccatggccagccggccaggctgggcagatgcaccctcacaaacacgccctacgactccccacatttgaccagccatctgcatcaggatcccatggcgctctctgttggccgcgtgtatcctgccacagtacgatgcggggcggcacttgaggagtgtggcaggcagcagttgaggccatccgatggacaacaccagactcctgcaaggccgtcactagttgagcgtccgatatgaggacctccatgagtgatggaggggcaccgccgccagacttcctggagggaggagagtcgttgccccagcgctgggctttggaatggcccgcagtggtgtgggaaggggttggggaaggatctcttggcgccgaggaagaagagaccaccgcccgggaggctgcgcgtggccttggaggtagccgccgggtcctgggtggaggccgatgtggggctggtggaggcggaggtgccgggaggaaccatgtctttaatgtttcaggatgagggcaattttattatgcatgtataaaaagttttgtggccctacttttttgggctttttttagcaggtttccttcttttaggacaattgattccgtctcttttgtataatgactccaacttcttgattataatacgcaatattatagcctcccaggtttctgacatgttgactctctaggtcaatctcggagtgtatatagcagataacaaatatgagttatctgtacttgtggaccgtgctatcggagcatcaagcattcaggatggtcagctagagattatgctacacaggtaaagtggcttgtgctcgttccaagaccttggttatcttaacaaaaagctccattccatcactgccacacactatggtagttccagtttgttttctgtgtctaaatctgataagggaggctcatttactcagtgatagaaactgtgccttgtcagattccaatctagaagtgcaattctgtaactgtggctccctttagcggctagccacgcatactattaaaatcagtggtttatcaaattcttgcacactttccaagcatttccagtttaatttgtagcctctttttccttttgagagaacattaatttgaagcaaccctcttgatgttcaccacaaatctgcataccgtgttctatgaattccttgcacactgaaactctctctaaccgcaaatgttatcaatttcaggcgtttacttaatgatgatggcagaggtgttgcagagccacttgatgaagtggtttgcgtggatcaacattgcgaagggcttacggtacaccgtacacatttagttacaatattcaagcggtctctatattctccggtattatttggctatccagctactaatagctactgtaattcttcctcaaaaaatcacaggccagaggcacttactatatcaatgtcgaaaagctagggcatggagctcactggcgtcgtacatatggccagcaagtctattctccttttctccttgcttttactcatgaggtacattagcttaccctctgaacctttctgttgtgcgttttcatgctgtcaaatttaacaattattcttgttacaggacgcgacaagcgcgaaatcttacaatgtggccaaagctactatgatggatgtgaattacagtcttcctgataatgttgcaattatcactttgcaggtgtcactgtatttctcattccacccattacccatgcatctgattacctatatattttccgtaatggagcatgtcttaacatttcagaatcttgatgatggtaccacactactccgcttggcccatctttttcaagtatgtttgtagtttacttaaaatttctccttcataattaatcattgatactgatcaatatttgtggatctgcaggctggtgaggacccgaaatattcagtggtagcaaaggttgatctgaaaaaggtcttcggaaggagaactgtaagtagaaattttgctgcagctcttctagtattttttatcagaacttagatgtcccaattccattaaatgttaatgcttattcaatgcatgtgcagatcaaggaattgaccgagactaacctttccgcaaatcaaaagaagtcagagatgaagaagctcaagtggagggttattggggatatggaaaatggtactacctcagtaaaaggtggcccggttgattgtcgagctctagttgttgcgctgggacccatggagatacgcaccttcttgctgagattttaattgcatttaccatgtttgtaaagaaaaaagaacaataaatggagaagttgctacaattatttccacatgtaaaaaaatagataaagtacacaaaatctgagttcaaatagaagttaaacttgcgtgatggaaatacacacccacaccaaactagttcaagtactttttatttggttccttacattagattgcatctgggcttatgagatgcaggataaccatgctacgttggatgccatgtgagtttgcacagtcctcaaagcacacacttggctgcattgagcaatactgatacctactgcaagcttgccttgtgcagtagttggaattccctcacctccgccacacctccatgacaatgacaccgcctccaccataccatctatgatgtgtggttgtctaccagcatcgtcgtgacggccccactgcctcttagaatcccgcagcatcattcatctttgtgagacccaaacaatgtcgtttccaatatcccctggtcgctggtgtaatgtgcacctctaggcagacaagcatgggccctagttcaccctaaagtcctaaactctgatgaaacaacctgttgcatctttgctgccatgagaaa

SEQ ID NO: 3751 - DNA, 11153 bp, Sorghum bicolor
aataagttcctgatcatgttttgtgaacaagaatgtttgatatttccggtcagttcctcgatatggccacacactatactcgatacatgaataccattttttgaatcactagatttcattattcgatgcacatatagttcaaaatttgcatttttttgaaagaattcaatgaaataaaataaaatttaaaaatatagcaaaaagccataaaaagtgcaccagatttgaacatatagttgcaagtaatgtcggagggctacaaaaaatttttgggttcaaaaaagaaaaaaaactttggcgagtgtctggaccaaggcactcgacaaataaattacttaaaaaacaaaaaagatatttggcctgttttaccgaatgctgttctttgccgagtgcggcactcgacaaatagaagaccacagtcagcaaagagaagctttgcagagtgctcgatatttgacgctcggcaaaccaaattgcattcggcaaaggtgctgtgtccgatagtgagagggaattgcaggggctaagcaagaaactagtaggtagagcaaaatcattcatacataagtaatagatatccatgcttgtgtatgtgagccgtaagatgctatgggcgtgctctgagtatatatagtgatatatttcaatagaaggatgatataatttatactaggtacatagtaatggtagttcgtcaaatcgtgccaattataatgacatatagacctaataaattagaatgaaagagattctttttatatcatttcgaacttataggaatataggtttggtgaaaaaactcgaataacaacttattatgtattttagattttttgcggatacaaaagcatcgatttttttccacttaaatggttctctaaacaataatttagatctttaactttacctttagggcctgtttggttagctcctcctaaagtttggtcagctaaatctagtctcatttagtcacttttcacctaaacatatgactaagtctaaatgagttttagccatctaatcaccaaaatgttgctaaataggactaaacttcatcttttggttagggtgcctcactttttagtcactttagagccaaacactctgactaaaaggactaaaaagaggctaaaaggcctcttttagtctctttaagtcacccaaaccaaacattcagtgactaaagtttagtccgagtttaggtgactaaagtttaggaggggaaaactaaacagggcaactttataaagactcacatagggtttagcctatccccgcaagctaatccctagttgttttggttggctatattttctagacctagctagcaaatgatgtgtttggttgcctagtttgttttagatagaatcacttcttttttgtgttggtaagtttcaagtccgcttcagtacccttctaggtctgctttagtacatttctagacccgtttcagtatccttcatcgctcggccttcaccggcagaggggacagagtgcatgcaggagaagacgaggtgtagccgcactagagccgtcgccattgagagtaggagctttgtcggtgaagaaggacaggagagagtgacgttggcgaggccggttcagcggtgggagctgcgtgaggaggtgacaagaatctctatgagagctgattcaaacttggtctcacacactcttccactgcatttttgtggagcctagaggagaccaatttgacttattgaggcctggctagaaaacatgttcacacaaccaaacatgtcgaattagctttgtagctaaggcaaggacatagatgctctaagctaatgacatgtctggcatttgtgaaagtcaacttttataagcaatttctttttacttatttttcattttttttattttctcaaaaatcaacgctttgtctcgtcctaataacccgaaagggttttctttcctttttccccctgatgccaatgccatatggatttctctatcgacacaggaaagaagagtcccgcaaaaataatcagctcgtttctctctctctctctctctctctctctctgcgcctccgactccgaagctccgttctcctctcccgcatccaccgccgtctcatccccccaaatccgaccaccgcctcccctcgcctccaaaaccctacccctcgcgtcaccggcgggggcatgagccggtgaccgctctcacgcggcctcctcgtctgtctgcgcacgcacgcgcgcggggtccgcgagtgagcattgcggcggtccgcgatcgccatggcgtcggcggcggggtcgggcggcggggccggcgcgggggccggcgggctgaagacctacttcaagacccctgaggggcggcacaagctgcagtacgagaagacgcactcccccgccgtcgtgcactacaaccacagcggcaagaccgtctcccaggtagcaacggcgccgtcgttcggggttagggtagcgaggggggttcgatgcgccgtattatggggttatagatgggtcgctctgtgctggatggatggggaattggatggccgggttgggttgggttgggataggatgtgggtttgacttgacccgatcaggtgcggtttctcgatgagtcgttgtagatgcgctgggaattcgattgctgatgcagaaggtatttggaagtttctaggcgcagcatagattggatcaggcgcagcatagattagtgtctgatgtttcatgtttggatagtcgttgcatatatttcgagttaccattctacagaaaaaaaattgacacaggtttgtcaaatagatcaaatatttgcttaagtgttttcagggctttgtgatttcttgttctgttgtgttgtgtacattgcaaatcctttatacagctatcaattatttgttgtgatggtgccagatgacggtggcatatttgaaggagaagccagcaggccagggttccacgccttcaacaccaagtgctggtagtgggatgcggtctgcagctgcaaggctgctcggcactgggaatgggagccgggcacttagctttgggaacaatggtaccagcagggctgtctcaggaaacagccgcatgggtggaggcatcggtgtgtcgactagtgcgagtgcatcgcaagccatggcgaactatgatggaaagggcacgtacatcatattcaatactgcggatacacttttcatcagtgatctcaactcacacgacaaagtatttccttttctcttgttgcacgcatgcatgttaagttacttgtagctttggtatcctgtgggtctctgatcacgtgctaaatgcatcaggatccaataaagtccatccacttcagcagctcaaacccgctttgccatgcatttgacccagaggccaaggatgggcacgatctgctcgttggggtgttctcaggagatggtatgtcaaatgcttcataattaggaagctttatgcttatattagttaaaaaatcgtgcataagttcttttattcgttctgcagtctattcaatgtcactgaggcagcagttgcaagatcctggaaagaagcccgtttcatatcagcattttgttaataaagacaaagacaaagacaaagatccaagtcaaggtggcgctgccagcaggcatgttttcattttactgtttaatttaaaagtgacgtgtcaatttccttcttaataagctgggcaaatttgtctaaccgttaccatacaagtattaaatatttatttcttgatatggtagtggtcctgcgagttatcgataaaaactgaagctgggtagcatcattataatgcatgatgcaagtatgtccgacatgcagtacactgtgatctgttacaatttgctgagatactggcaaaagtaatgatgacccatatgcatggaagatactaagttttcaacttataacttgtagtgcatgcatcagcgaagataaacataacacactagatgtgaagtgacaacttcattatattttgggttaattttttttgtggaaactgtcatttatgaagttgatcaaaatttaaacctagacgatcactgtggtaaccttcatttatgaagttgatcaaaatttgaaccttcacaatcactgcgtagaaacatatctacaacataattcagaaatgtgttcttgaaatcagtgctggtcaaatacttggaagctgtttggtcctcttgtacttgtacatgtcctaacaagttatcattcattttaaatatttggaatttgtatttttcctttaagatttagacagtttcaagaaggtcccaaatttattattaaaccgcccattatctttagatgttagaacgtgatcacctaaaagtgggaggagcatgtacgatttatggggtagtctcagtactggttacgattggtggataatggaaataatattggtggataatgaaaagtaaaggtactgcgaataatattggtggataatgaaaagtatttacatgtctatttagttagctacttttgatgaaacatcaatcaacgtcagcaaaacatttatcctccatcatctgtgtaaataaaaatcgtaatgcatgatctttctccatgctgcctgctttatatattggataatatggaaaagctgcgacccaggatatcctgattcctctttatcttgtcagtgttttaaaaaccgctaggtctctggccacttaagcacttgttcctcaactgacgagacaggatgggtggtgttgagcaccagtgtgccacctaggcaggctaggcttctgctattttagagtggtttagaatgtcctctaatgatgtgatgtggaattgtggtttctgcggctaccttttttttttgaaaaaaaccctggaatgtccttttatgacacactggggaactggtgtttccaacagtttcaggaccctcaatcctggaattgttgaggggggttttagctcggaaggttaccacattatggttgtatcttgatgcagttccttggatagcttgcaaattagcttgtttttcttactgcatgaaatgctgaagtcaaaaggtgttgtaacttcctttcctagttactccattctcttttataaggcacacaacgtctgattaatcgcgactaatcgtcctggacggttggaggtactcgaccaggcctccgacttggccagaacgaccaggaaactggtcgtccgattagtcgtcgaccagtcgcgattaatcgtccgtccaggttgtctggcgtccagtcaggagatggttcagtcagtagatgggctgcatcttagagttgggcctagcttgttgccttatattttgacccaagcccattagggtttatgttatctacccctcactcatttcagcacaacacattcactcctctcctctcctcccgtccagcagcagcagccacctccattgctgccctcctctcctctcctcccttctgtctcccagctgctgctcctctcctctcctctcctcccttccgtctcccagcttctcctccctcccttcctcccttccagctgccctccctctcttccttgcggctgctgctgcaagcgtgcagctgtgcaagggaggaggactgcacgacgaagatgctcccttcaagcgtgcagtgtgcagcagccagcaagacaagaaagggctctgcagactgcagcagccaggtaagtggccagctgacctatctagactctagagcctagaacatgtatatatatatatggtataatgtgtattgtatatagctacataatatatatggtatatatcagtccccatatgtaggggacgaccaggacgaccagggggctcatccagggtcgattaatcgtcctagacgacgactaatcgtcctggacgacctggacggtcccccagcgtccagacacgaccagccgtcttgaaaacattggcacacacacatatcagaattcaaacttttaaaactttgaccaataatttgattaataattgtaattattataatacaaacttgataccgttagatttgctatacaattaaatgtactatccaattatcataagtttataagtataaataaaataaaataaataagtggccaaagtgtaatttgagagaccgtgtcatattaaatcgggccttataaaagagaatgaagggagtaataagatctaaagggaagcattttggtttgcatgcatgtatacttgtatagggatctgctagattgaaatcgctgtggtgattgaactactggaggatgatgatctcgaattcttgattatgtactgggcctgctgctgtctaggatatttgaatggattttttccctatcatttttttgggaaagtttacttgaacttattttcttagttcaaaggcaacaagctgcagttaaaacagaagatactatttctattgtgtagatagattcttctctttacacagttattaaactgtaagtatatatattgatctttggacaccaatctattgcagtcggtgcacttgtgtggcatgggttccagagcgtgaaggaatttttgttgttagtcatgctgatgggaatctgtacgtgtatgacaaagtgagccctttctcatggaactttgtatgaagtaatcaaactttgttaagtttactttgctaataagtttacttttgtacattcagtccaaggatggaaatactgattggacatttccaactgtaaaggatcaaagccaggtgctgatttcacatgcaaagtcgagtaaggtatctcaagtcacaatgatctcttttactaaaaattgcattcagatggctatgtatgttccataatttacttcagggtattagtaaaatgttttttctggaaatttattattgagacgagtgcctggacttcctgcaacactctattgccctttcttcgtagctgacatgtaccaaaatatctatcataagtacctgacgcaattacaagtgtgtgctggtgttggctgcattcttgcctcttggtagttgacattaaagcataaacttgtgtatccttggtctggtctttctatcagcggtctttacttctgtgatatcagttaataccaactaccaaatagtactgaaaccattcctgcaggtcatactggaaatatagaaatgtggaaacgattatcattgctgtcattatgtcaaaatttgcaaaatacctatgagagttagggtatgtttggttgtattgcacaaacttgcccactttccttgcttggcaaggttaggcaaaggcacagcttgctaggcgaggcaatctggctctctctcaaaagcaagggaatccccacctttcccaaattcaaaccaaacaaagcttcatgtgtttttctcatctaccttgctaggcaaggctaggcaggggtgggcaagagaattaaacatgcccttaattggaaattctttaacatcattgagtcctaatgttgcgactgctatgattcattctgcggtttaaaattacactgcagggtaatccaattgcaaggtggcacatctgtcaaggtgcaatcaatggcatttccttttcaccagatggtgcttacttggcaactgttgggcgagatggtaaatttctctgcccaagaatgagaatcgacagttttgtgcagaacaggtttagctgttggaaaagttgtatattgcactaaaacaatctgatcttatgcaggttatttaagagtatttgactttgcgaaagaacaactaatatttggtgggaaaagttactatggtgcactgttgtgttgttcttggaggtaagctgccaatggcatgttttactgcttagatatggtctgttgcctattttgccgtatgtttcgcagaactgaagtatttttgcatgtccaagtccgacatatgaaaacaggacagttgtattattgtcggattattaggttgtatatacgtttttaacttgtgtagtcctgatgactgatgagtaatatgtgaattatataacaaacctgttccaatcttttggtcatcgagtcattttaccttatgaaacttcttagttctgagagttcgtcaaaactcaaaattagtattgttggccaatttttgcatataaaattacatgagcataatgtatggagttttagaatggaaattgtatagcaggctaggggcaagatagttggtgcacctgctcggcttttcctattcctaataataataaaggaaacaatattacagtatagaatcccatacaatatgtcagatgcaagtttctgttatttgaagaacatggaaagtctgaaattcttgtagaaaagatagaaatggcaagatgggaacaaacagagtaattataagttgaagatgaaggaatataaaaggatgaaggcgcatctagtacaatgtataaatttgaagtgttgtacatggtggaaatgtacttgtataggctattggcttgtagcagctggtacaatgacacgggaccatggcttctatctcagctgacaacagacattgcttagtatgatatactgcattaacaaacaatattctcagctcagtgtaaaggtgggggacagtcagttttttttttttttaaaaatcatcctgcacatggggtgggggacagtgcttaatacagtttcagttgtgcccttgaagttgaaggttttggggtgggatggaatgaatgggaaagaagggcttgcaatgaggtggggtcgagtgggatttgtgataggatggtagcaggtggggtgaagctttgctagccatgaagtcactgaaacccagtttctcagggaggtactcacaagttggcgatcctctggttgagtccagtggccgtcatctcaactggagtaccaacaaaccaagctactacttggttctcaatatttgataaatgcctatttgttcaacgagttcatacccaaacctttcctgctaacatcttagcttttgaatggatagagattgactaatgtatgcatacaaccattgcatgtttgaatcttgttttattctctctgcacttctgtgaattggagtctagaaggtgctaattagtttgctgtgatgtgctgttacagtgcggatggcaaatatttgttatcaggtggtgaagatgatcttgtgcaagtatggagcatggatgaaagaaagatagttgcatggggcgaagggcataattcatgggtgatattatcattacaattgtatttgtttattatcacataggcatttttaattgaaacttgcattttgagtcaaattaatttgcaattatacaggttagtgcagtttcttttgatccatattggtccccaccaaattcagatgaaacggaagaaaatgtcatgtatcgctttgggtcagttggacaggtacctagaagttgatatacgatttttttatctggagtttttcttgtgggtttttattataatatctctgaatcatgactacaagtactagttacaatttgtccttttactttctgagcttctgaatactgagaagaactgaaaatgctactggtatgagtatctagaattttctgctcttgctagttgttggactcttagcagtttgtgttgcacttggtgctcctgctgtcctttttggtctcttagtgcctattccttctctgtatttgttgtaaaattgggtttcaaactatttttccttaatttaattaattaatttttggtataatttgatattttgtgattgtttcttgaacataggatgtgctatagcctttacctggtattgattgttggacaaaattaatactggcaatgataccttttcactttgcttgcacttaggatacccaactgcttctctgggatctggcattggaggagattgctgtccctctacgccatccttcaggtggctcaccgacattcagtagtggaagcccttctgcacactgggacaatgcatgccctccaaccggtgttctccagccttctccacggatgcgagatgtgccaaagctctcacctcttgttgcacaccgggtacatgtagatcccctatctggcgtggaattcactagtgaatcaatcctcactatatgccgtgaggggctaatcaaaatttgggcccgacccattcatagtgaaaacaaccagcagccagattcttctgaacaggttgtaggcaatgctactgctaaggataagatgttaacatcatcaaataaagcaggtgcttccagctccagcttcaagcaaccgccatctgttcttttcacatgattgaagaggctaagctagcatttttatcatgctagcttggccatggccattcatccatcttttgtcactaacctgaggttaaatggagcggagtagcttggggaggctggcaggaaaggattgaagaggctctgctagcatttttgctagctattttcttttcctgcttcatcggcgacgtctctagttacagaagtgtcattgttgccatctatgttggcgaaagaaaataacggaacttactcctgtacatatacagacattgccgtaagatgaaatattacaagcttactggtttgatatcacttgtttttttttctcttttattataactttgttgtagttgtagactagtgtacccatttttggtgtaagtcatgttacccctgagcgtgggcaaccaattgattcctgcatcatgacggtaattttttcctcactcagaagcaatatttggttttcgttggggtacatagtacctgctgtaaacgcttactttatacagcaattcagaatcaatttcttatatttatccaatttcctaaacatttcatcacaagtttgtgtcctcacgtttccgttatctgataggcaatgctgggtttgggttcatgcttccgtgtggttcgcaggagatgtggaacctttgtcaaatttggtcctgaaacgcattaatgtttggatgcacttgtgacttgtgagaaacaaaatgttttgcgtttttttactttccaaatatccttgtgttacaagggaagtgttataatagcatagggaagccaaagttaagttttctcacatgtccgtgaaaacgtggcaaaggaaatctgatgaaaactgtatggatatttttcggattatagataggaatgaaaacggtagcaaaggaaatctgatgaaaa

SEQ ID NO: 3752 - DNA, 3094 bp, Sorghum bicolor
gctcctgtgcgtcgccttggattggcttaaccgtgggcacgcctgtacgtcgtggcagtagtcacgtccggagtggttgaggtgctatctttcaccgcccgactcttctctgggaaggaacgtattcgctcgaggatccggtaccgcgcatggccttgctgatcgatgcgctgactttggatgcctcgaggggggcgtgatgtgacgtcacgactgtctcactgtgcttggccgtactctggctcatctgaggggataaggctacgaaaaagggggattggatgggtgctcgctccctatcacgtttcccgtgactgtcgggttaggtgagaacacggcagacgcattaaaggccctggttcccgtacccgcgttaggcggcggacggtgtccttgcgctcgaggcctgtcgattcgtacgagccacttccgtattcgacggtcgctgtccagtcgagcctctgttgattcgcacgaccccttttccgtgtttgaggctatggttggcatcgtgctttggtagtcgcgcgtgcgagcgggggcgtcgagtcaggggcctcgatttgtgtacgggtcctctcgttatgagcattggttggagtaccccttattgacaccttcgacacaaacgttaatcatttgagtaccaaccctgatccatccacgtaaccgtacactaattaaagaaggaagaagctcatcatgcacacactctttgcacaactttggagctgcatgaattaggtagggctgtggcgaatcaagtgccctttcctcacgccaataaagttccattatagcacatcggtaaacttgaactatctgtcagaaatggtacaaaaagtaataattgccaaaagacccagagaattggtaaattaaagcctagtaatgcttttgtgtagtatggtgtgtagacaacttaaacactaaaccctccaacttaaattataaatcattttaaaaatcttaaagaatcaaatcatctcaagtttaactaaatttatataataagataataatatttatgatgacaactaagtactgtttgattctttatattttatagtatatccatttcatatcataatttattataaatttctctataattttagttaaacttgagataatttgactctcttagatccttagaatcacatataatttgagatgaaaagagtaaataaaagtaacataataattatttaattttaattgcagtggcggagccaggggggacacagggtggcatatcctggaggtccagtagacgagattcgctgctgcctggttgctagttgtgtgcgtgcgaccacgccaagatcccgactgccggtcacccagctgagcttcaatctccgatccttcctcttcctttttttctggtagaaaatcctatctaatttaaaattccattgctaacatcattgagccattcaacgtgcagcgagatcagggattcgtctaagaatcaaagacgatcgagattgcaacaactcaattcaattaatatatatatcatgtgagcatttgtgcaatataacacgtgacgactgatgatttaatccgtgcaagtgcaatttttttttgtgtgttggcattgtgttttgtaggtactccctccgtccctgaaagaatcaatttctaggatccgtgtcagtcaaactttttaaagtttgactaattttatagaaaagagtaacaatatctataatataatagtaataaagagaagcacagccattgcgtatctttttgagaagcatacagcttcccattgtacctatactttgacttaatttgttactttttaagaaacaaattaattgtgtttgtctactactgtacggcggtagtagattgctataaagtgcggcagccgctagccccctctcctcacccccgttggtcgttgcacatgtgagtgacccccctcccctcccctccccaccatttccgcagcacatccacaactcgcgcggtcggccaccagagcagcacgccaccaggccagtccaacctctccaccaaggaaccaagaaccaccctgcgaccgaccggccatcatgccaagagtcgtcgtcggcggtggcaaggtcgccacctacaagggcggcatcaagggctactggaagcggcgcggctacgaccggctcgacgcggccgcggcgcagccccgcccgcgcctcccgaccgcggagctcggtggcggcggcgagggcgagggcgaggcgcagcctcagccgcagcggcaccgtcgccgcgggtggcgcgttcgccgccggcgcgcgggcgtcctgggccggcgcctcctgcgcgcgctctcgccgctccggctgctggcgcggctccgcgacgcctacgtgaacgccatgctccgcctcgcgtcctccgccgccgtggtcggctacggcgcctccacggggccgtactgcaccgcggccgccgacccgttcaaccggccgcgcccgctcaccagggactacgacgagaaggcgctcgtcgagatctacaggtccatcctcgcgcgcggcggcgaggccgggccggtgccggtgctcgccgccgcgcggctgcccgcggcggtctgaagtctcaactgatgacgacggggccgggccggccgccggtgatcgatgccggtcggtacgcgcgcgggaggggagcttgccacgctctgcctgcctactcttcttgcctcatgcaagactcgtgtacgctagaatttcgctttcatatactgtatgttgcacagagaacttgcatgtcaaatgaaagtttcatttcatgtcattattattgcagtaccaaatgtactttgaacctgcgaattgttcccaagaatttggaacgaacttgtgtaggtgaatgcggaattcacatgatcctgtgagaatcgttctcagttattaggttatattcgaaaatatatatatacgccaacactggtattttcagtgcaccacatccgcatgattacctacaatgcaagctgcttgctaatactttagtaccacatcatgtgattcgttagcgcagcccttcgtgagtccacatgtggtcacagcgtctaaaaagaatgggactcgtt

SEQ ID NO: 3753 - DNA, 4902 bp, Sorghum bicolor; identical to SEQ ID NO: 3742

SEQ ID NO: 3754 - DNA, 4315 bp, Sorghum bicolor
tcggtccctccagtttcatcaaaaaaaggtctagactttgtcttcatgctaatcacttagcgcaaaatcgttacaattttgagaaaatagtgccagtacacagaccttttgtaagtacagagaaaaaatataaagagaaggatgttcatgtgcaaagttagaaccattcgcgttgagtagcttccagaaccaaaccacattcatcaatgcctattagaagagtcctaatcctaaggtgaaggtggacttcacctctgatatcctttgtggaggatggctcacgatattaacacatctaaatgtgctggatttagatagatagctattaggccttgtttagttcccacaaaaaaccaaaaacttttcaagattcccgtcacatcaaattttacggaacatgcatggagcattaaatatagatgaaaacaaaaactaattgcacagtttgcctgtaaatcacgagacgaatcttttaagcctagttacttcataattggacaatgtttgtcaaataaaaacaaaaatgctacagtagcgagattcaaaaaaatttgacaactaaacaaggcctaattttgtttgggctttagaggtggcatcctatttttattctttgtataaacagtttataaggtacaaatgttgcaaacaataatacatactttgggagaaagctgtctacaatactgaaaaaagaagcatcagtaaagtgatgctaacatggccctggctgactgaaaaaatagctgtcactgatattgatttgttgtgagagaaaaataatatttcatgctgaaaagtagtgaacgatcgagttatctattcatccgtcattcatgtaagttgtggtatcgagttattgactgctggtgcagaggctcttcacaaggggaattctatgattctgccggttgctgtgataatattgttatagtgaaatgagtcagtctagccagacttgagggaactgcctctgcctgtacaactgcactggcacaacaaaccggagttgacactgattcgcgtgaggtcttgttaagttctcaaaattcaaaatttttcaagatactctgtcacatcgaatctttaaaaatcttatgagtctatttagtttatagtcggataataattaccaaatacaaatgaaaatactataacgttaaaatccaaaaaatcgtctatttagtttatagttggataataattacgaaatacaaataaaaatgctataatgttaaaattcaaaaaatttaccaactaaccaaggagtattccggtccgtgccatcagttccaaagttgaagtcggtggacaggacgaccagcattgcactgacgaacatgtgcatcagactgcgttccaccatcttttcctttctttattatggttaatactactatttattgttaacaacatgtgcgaatcatgacacgatctctctagtagtagtatctgtctatcaaggtatcaaaaggcttcgaacagcgtagtagatgccagtctttagtttcttttcgaaggacgaacttgctgatattttgagagcatcatcaggattgtaggacatgctgctagtagttcagaacggcgttttttttttgctcaaaaaaaaaaaagttcagaacggcgttccacactgattgaaacccagttacccgtggtcccgtttgacgaggcgagtagaggggagtgaccgagagccctgcccccgtcagttcggatgcgctgcgcccccgcacggtgcgccacctttccgggggtgactccatggatagctgggaaacagctcgcgactcggagccgctggcggtgacgccattgccgcgcgacgcgacgaagtttcccacgccagcccggcaccgcatcggcaccgagacccacgtgccgcctacgactcagacgcgtcgaccaggccccccctctccatccccaccaccaactccggcgctccctccccttccaggcctatatatacgcgcggtccggctgcagtgttcgccgtgtcctcatcatttcccaaaatcccaactactagcgtttatactagtttattacggggagacacgagcggcgcgcgtcgaccggcggcctccctccgcagccgcccgagatcgatctcagtcttccggcaccggcagggtacgtacagagtagtagaggcagcagcggaagatgagccacccggagaacggaggagccagcaacgggcacgccgccgaggagcatcaggacgtgatgatggaggtggagccgaagcagcgccgggcgccgcggctcaacgagcggatcctctcgtcgctgtcgcggaggtccgtcgccgcgcacccctggcacgacctcgagatcggtacgttacgtcgtctcctctcgccggccggccaaaacgcatctgttcgttcgtcagatatgtctcatttgttcgtgcgtgctttcaaaatctgcaggtcctgaagctccggccgtcttcaacgtcgtaagtagctgaatcccattgttttttttccccagcaagcaaccagagtttgcagcttgcacatcgatctggagcgtctgatcccggtgaacgtacgtgtggagcaggtcgtggagatcaccaaggggagcaaggtgaagtacgagctggacaagaagacggggctcatcaaggtggaccgcgtcctctactcctccgtcgtctaccctcacaactacggcttcatcccccggacgctctgcgaggacaacgaccccatggacgtcctcgtcctcatgcaggtttgcctcactgatcggatcgctgtcaatgtcatcatctcagcctttattaattactctcgccactcggggtttgattattcacccatctggccatttcctttctaacactaacaacatctgcaatgccatttgcatccaggaaccagtccttcccggcgccttcctccgcgccagggccatcggcctcatgcctatgatagatcaggtacgcagatgatggatggattatctccatgcaacataattcgatttcgatttgcaacaattctcaccgatcttatcttaccaaaatgttggaacggcagggggagaaggacgacaagatcatcgccgtctgcgccgacgatcccgagtaccgccactacaacgacatcagcgagctctctccgcaccgcctccaggagatccgccgcttcttcgaagactgtacgctttgctgcctcactcactgctccatactcgctaaatttccgtgcttcttgttggatggctcccttcaatcgcgtggtttcttgcccaaatctgttcttgcagacaagaagaacgagaacaaggaggtggccgtcaacgacttcctgcccgccgcagctgcccgtgaagccatccagtactccatgtaagtcctgctcatttatcttgaggatgacatgaaaaaacgacgtgtaccattacccagatcgacttggattctgtaactctggatttttattgacatgatcttggtgctttgtgcagggacctgtacggtcagtacattatgcagaccctgcggcggtagagcgagcgtgccccatcttttctctccctactaccagatcccatctcatgcgagctgaagcaaaagcccagatcatcagaacatctgggatcaagacacatgagttgtcaagcttgtcgaccatctctttccagcgatattttagcctgtatcttcccttattagtcttttggaatatgtccacagtgtggtttgatctatgtactcctcttctacgtttttgtagcatgaatcaataaaaaattaatactagtatgctattttgttgttttgtcgatctactcctggcctgcacatctgcatattgctgatggactggtgtcagatctttgagatggcaacacaagggcaaggctagctacactgacatgtacttcgagctatgtcacccccctaggtgattttataaaaatgtattcctaatcctaaacatcataagaggctgtttggggggggggggggggggcaaaaaggggggaaacccccccccgttgaccggaaaaaaaaaagtttgtctgtgttcttgttgaatgtcttggtcgtgcaatttgggctctagttgttatttacactacctcgaatatgaacccttgctccatatttaattgtttcagttttttctgctcgggtgtacactggcaactactacaacttcatcagatgtcagggaagcaactactactaccaacttcttcaggccttgtttagtttccaaaatttttcaagattctccgtcacatcgaattttgcggcacatgcatgaagcattaaatataaacg

SEQ ID NO: 3755 - DNA, 3637 bp, Sorghum bicolor
ccgcctcctctctgcacgtccttcatgaaaatgctctgtgatctcggttgaccgcgagaggcacgttccagcgttgatccatacaatctggtaacatcgccacttgttccaatcaggcattttaatttaggactaagggccttaatgtgtttcttttcgtagatcgcccacaatgagatgggcaagcagttaaacatgttggcacatgtgaatttcactctgtttagagcaactccaagagaagagctatccatgttatgtattctatatttggctattttgggagagaaaagagagtccaacagctattgtatttggtttgctaaaatagcaagtcatctatcccggagttctcgcatggtaaatatagcttgcatgtcccgctagccatatgatttgccatatagaaagactgttggagatttttgtttttttacatgattttctattttagaggttggctaaatcttgaatttagccatctatttttatcaactctcttggagttgctcgaggtgcttccattttgtagttgtaatattgtataagattgatatctgaaggtgtgatggtgaactactctgatagaacatctgatgtggtgaaagagtgtgcacagagttgcatcttccataggtgcacacaacaaggagggtgtggttattgcaatggactatatgatattcaattggaacaaggctaaaagccctatgcttagttttggtaacgaagagaactagtgaagaactaaccttttgctaggtgttgtttaaagctaggtgaagtctataccaagaccatgagcaatggatgaagggtgtcaatccaattagagcaaggtcgtacttggagcaaggctaggtgtgtaattatgctagttattgattttcatagctagcgactattcgaatgcttgcgtttgactctaaattggtcaagaaaaaggtgaagaagaatctcttggtttgacgagctcgtaatttttggctgatattcgtgattttcagccgatttttcatagaaatagaaatccttatttttttccgtcgcgcatctagagtttttcagcccatctaataagcagaaagaaagacatagttctaggtaagaaaaatgcaagagagaaagatttgatggaagggtttaaacgcgtacagaaacaaaataagggttcctgatacaaaatataagaccgggtcataggaaaaaaaataccaagaaaaaaatttaggatagaaatatagaaaactcttggagatgacttcttttttttcttctaatactaatttaagaattggcaaatatcatattttgatgaataaaatatgagaatcttttggaaacagttgaaaaacataaccttaaaatatcatgtatacattacatatgtgacaaagtctaagaaaaaattggtttcacgcaaaaacagtttggaaaatataaaagctcttatcaaacaaaaagtcttcaattagaattcctattcaaattactcaaatcaaagaaatctatttagattaggattagggttcctagctatattttatatatataaaccaggatttaaattaggattcttattcttattcagtctatttgtcctaactatacatcgagtcatataattttagatgaaatatagatatagaaatatgcatatgcaccgtcaatcataacttgtcctataatttatatatttctcccttaaggcattgtttggcgtagcttagctttactagtgaagttttttttggaaagagtacttgaaaaaagcacaatagaaactgttgtgagatgtgttaaacagaccgtaaatatgttcaatgtaacttatatatgatttctcacttactgtaactatcattttattgagcaaatagaaaattaggactaactcaagttaaagttctcggtcaactcccagcactaacaacatgccatttctaacggcgcaaaggtctctcctttcctttctcccctcgctgttcctcccccaacccaatccgatcactgtctccggaacaccctagcaatggagcccaaatccaccacccctcccccgcctccggtcatgggcgcgcccgtcgcgtaccctccgccccccggcgccgcgtaccccgccgggccgtacgcgcacgcgccggcagccgcgctgtaccctcctcccccgccgccgccggctcccccaacctcgcagcagggcgccgcggcggcgcagcagctgcagctcttctgggcggagcagtaccgcgagatcgaggccaccaccgacttcaagaaccacaacctgccgctggcccgcatcaagaagatcatgaaggccgacgaggacgtgcgcatgatcgccgccgaggcgcccgtcgtcttcgcccgcgcctgcgagatgttcatcctcgagctcacccaccgcggctgggcgcacgccgaggagaacaagcgccgcaccctgcagaagtccgacatcgccgccgccgtcgcgcgcaccgaggtcttcgacttcctcgtcgacatcgtgccgcgggacgaggccaaggaagccgactccgccgccgccatgggaccagccgggatcccgcaccccgccgccggcctgcccgccaccgaccccatgggctactactacgtccagccgcagtaacgaatttggcttcgcttccatggagcctctgcggtttttatttagtaaattaatttaattactactgagactgccctgttgttacccatgttctcctgttgccacccaataactctaagatggcgtgatgatgatcatctgatgtgcccccctttgagtaacaagtgattccatttcacatttcatttctgatgatctgagagagatgactgctcgtaattaagagggaggctgtgtgatgctgatggttcatgccatgcttaacagataaggttgcctgtcgtaattattaatcattgtgctagtactgttaccttgtccaaactcccaactgccgtgaaattactcatgttcttgttactttgtcttgaacctatatttgtgtagtgtcatgctttttctttagatttttgtagtaggatagaaaagcaattattttccaattgtaatgcagtgggggctttatgtaatctcaagcttgttagtagcacacatatttgattagtttccaatttctctgtattattcagtcatttgtttttttcccccatgtcgtataatcatgttcctccttggaataatttcagggaccttatgtttgctaaatttccagaatatgaatgtgtttcctgattcatcttggaatagattcaggccagcgtattttgccgaatttccagattatggatgtatatcctgtttctcgttggaatagtttgaggccactgctgtgatagctacgcaatggaaagtttttactactccctccgttctaaattataagtcattctaaaaatcttgaagagttaaagtatttttaagtttgacaaaaaatatagagagaaatataaagatttatgttataaaataagtacactaaaaatataactaacaaagaatttaatgatacttggttggtactaaaaatattattattttgctatataaatttggtcaaatttgaaaaaatttgactctccacgattcttgaaataactt

SEQ ID NO: 3756 - DNA, 6182 bp, Sorghum bicolor
tgaagtgaattaattggacaccaaccttgctactagactagggggcttgcttgaactaaactagagctagagcttttagttgctattaggatcacctattgttctaataccttgctatagtgaaattatgtatggtagaaattttttataggctattcacccttcctccatctagatctggtcaaatttggtgtttggtgaccatcaactgtcgaagatatcgactccaacaatatagatcaacaaacttacaaaccacacataggtaggggcgaaaatggtcacaaacagtcaaaaatggtactacaatataaaaaatggaaatatatggtaagatattctttatattttatgaattaatgagtataaaattagttaaaaatggttgtgaaatcaattaaaaatgacaaatttttatgtgtggctaaattcagaaagggtcatgaggaattagataagtagcacgcaggacacaaagattgccctacaaccagtggacaatatatctcttatcttgtatgctcgatgtttacaagaacactaatgactagttgcctagagttgcaatgatcaatgataataagtaccaattatgggctcacctccccaccttagatagtcgaggttactgatagagttcattataaggaaatctgtctagagtatattttgatctccaccctacataaagtttttctagttcattatcaggaaatctatctagagtatatcttgatctccgaactccctttgactggttgcttattgaccaagtctgatgatgtactctgtctcaatttggccttgtatttgatgtcttcacccatgacatgattgtagcaggctcttctatgtgcggtgaggtacctttggtccatattgtggataaggtgtgtggacatgttcagtctacgaagagaaggctatgcaagttaggttcagatgaaatagaagataaaattgtcattatatataaaggaaagttttgaaataaaactaaagctggcaaaagtgactacaaaaagatatcaatactcttcgttctaaattataaattatgcaaagaatgtttctagctttccttatatataagtagggaaatatatggtggaaaccacatccttcgtgaaaatccgtgcaaatcatagcaaaaaaagttatctaaattcacagaaaaatcacacatgtagatgatatgatgatacacaaccttgtaaatatttttgtccaaactcgattttgtttgtgacatataaaaataacagatagctttagtcacttttccaccaggttctcagaaggctgtggtgttaaagtttaatatgtactggagttctttcgttttatttggtaatcagtgtccaatcatggactaattaggatcaacagattcatgtcgtaaattactctctaactgtatttttagtttcataaatagtttatacttagtactccatacatgtgtcaaaacatttgatgtgacgagagttaaactttaccaacccaaagcaaatgaggcctaactatttgagaaacataattaattaattaattaatttcagagcgctagaagcataatttattatatacttcctctgtcatgtaacacagtgcattctagcattcaaaatgtatgctctaaatataatgcattctagagaaaaaaaatcaattttacattatatactttttatttatcaactaatcactattaaccatattgatgatagcatctgattagaaaataaaatggcgttacatgtgtcttttatattatttcttaatttgtctattttattcattcacaaagtaaagagaacggataaactgaagtagttcatttttttaataataaaggaaaaaaagaacctttttttgcgattaagaaaaaaaaaagcataagtgtgcgccaacgtgcagatccgttcacttcgtagcttgtcccactggactacccagcaaagtgggcccagctgtccatctctatcgacccgcaaggtccactcccacggagcaaggagtcccaactcgcaagtcgcagcccgcctccgcaccaccagtcccaccaccggaatactcccacctccccgccgtccccccacaaacccaccggaaggacccaggcgccgccgtcggcaccatgccccggctcctcgtcgtcctcctcctcctcgccctctcgctcgtcgcgtgcgtgagcgccgtgcccgctgtcatccgcatggtcccggccgaccccaccgcggcctcctctggcgcggtagacgacgcggacgcgctcttctgcgacagctggaggctgtctgtggagacggccaacgcggggccctggctcgccgtgcccgcgcgctgcggggatttcgtgcgggactacatggaggggcctcgctacgcctctgactccgccatcgccgccgccgacgccctagccttcgcctctgatgccctggccgccgccgccgagtggggcggctcggcgagcgcgaggccggcgtgggtgttcgacgtcgacgagacgctgctctccaacgcgccctactacgcggtcaacggatgggggtaagatgactccctgccttttcgaatcagttgtggcaaaaactgaactcgatgcgaatttgttcgattcagcaacttgaagacttttaagcactgctctgggttgtgataattctccaccactgtggttttgcattggtttgccaaccaatgcgccaatgctgaggtgttttctgtcaactgccatgtgtacaatgtgggattgtttgtctgtaaacacattgctgttttagaaaacatatttccactgttccaggtgtttgtgctctgaaattagttctgtttcgagggtattacttcagtttatcagttctctttattttgtgataactatttgagagaaaaaaaattaactgcaatgtgggtttcagaactttcaagtagaatatgctttggtaggattctgggacgatagattaactaagaaaggaagtggaaacagctaactgtatcatgtataaagctgttctggagtccaaattagttggcatcctctgtataccttacgggcttatggtaagtttgtgtcttgtgttgaatttttgcttgtactacaatgtttattcagcaaaagaaaagaaaggtgctagatcttttgtctccaggacatctctggtatcgttgaactttttttaagttgaggtaaaccataaatttttctgggttgctcttaaaaataaaaaagaatgcataaactggctctatttgactgcataatcatgtgaccagttttgttgtaaagtattttgctattgttttgacatttcccctgattttctagattacaggaattcaatgagacctcatttgatgaatgggtagatgctgcaaaggcaccagcattaccatcaagcttgaatttgtacaatcaacttcagggacttggtttccatgttatccttttgactggccggagtgaattccaacgtaatgccacagagtcgaatcttttgttttctggctacaactcatgggaaaaactcatattgaggtatttcctacaattcttgttatgaaaatgatatattgtcgatgtttattgaattaattaaaaaaacaaggaagaagtcttttttgaactattgcctgaattcgattttggccttcaaactccaaaatcagacaacttcattttgaactatcaactatcaatatcttgcactttagtcctaatctcattctacaacattttgaaccacatcaccatgcttttgcccatatctagagatgaaagttttgttttctatggacaattgatttgactcaaaacacaccaaaatgaactaatcttgactttaaagcatgaaaagggtaaggaaatacccattgggtacccacatatatccctatggcatatcactagccacgttgagtccatgatagtgtcttcttccccatctctctttttccaccctcttcggtgagcgacactgctctcccactcccaggcacccaatggtggtatgctgctgtcatcatcattgcagaagtgtacacatgaagggctatggacactaatgccatgcccatgctgctgacagtggtctggcagaggactagaccgagacatgaggattctgtcctggcatccaggcagcacatatccacagcaagcacttacaaaactgaaaatcagatgtgaatcaattccatctacagtaagcatgaagcaagcaataattcagggagcaaatatttcttgaccagatctgtccagaatcttgagcattgagctctgctcctcctaaaatcttccttcacttcattcccatatccaactctaccatcaatccttttgcaaaatcagtggtcaaatcatgttcttattgtattcactgtaccataagtgcccttcacatttctgaactcctgctttagctgccggaatcatcagctgcatcagcgattttttgtctaccatgcactcagtgcacctgctcgatctcttcctctgatgtgcctcttaactttttcaccacatcagaatctctgccttgctgccttgtacctccctagcctgcccttgagctattccagtcaccagtatgtcgtcgagtcactcaccacattgcactgccctaccgctgctgtccaccttctgtgttacccagtaacgattaatgaggaagccctcaagctagttccccatgacattagtagtccatctcacaccttggtcgcctcctattggggttagattcccatcgatggcactatgtgtcgaatccaaggtgtgtgactcagtgaggaagaggggggaaatggaaaattgaaagagggggaaagcagaatggaaaaggtcgaaaagtttactgtatggactgcatgtgccacttacaggtataaagatgtctagtttgaatagtttgagaccagaagctgtctctggtatttgagttcaagggtcgaaatcagattgtcgtgaatcatgatatttctatggctaaaagtagatttattcccaaaggatattggtatgttgctcagatacaagggcaaccattaagaatctctgcttcaccaccaattactatgtttccttttcgcattttcttgttttgttactgcagattttcctcaggacatctgcacttagaattgttgttgttacttaatcactagctcaatgtatatcaatcgccagctcagttattaatctaagaatatctgcaggcaatcttctgatattggcaagactgctgtacagtacaagtcagagagaagagcagcaatggaagcagaaggtttcaagatacttgggaactcaggggatcagtggagtgatttgataggatcaccaatggcaacgagatccttcaagctaccaaacccaatgtacttcatcagctgattttattgtgaacagtggaggaaggagcaggttttcgtagggcgttcatagcattgttatggtctcgctctgaaactgcttttgttagacatcactctaatcttcaagcatgttgaaattcaactcgggcttggggccattgaatctgccctttgatgatttgtaattacacatctttccccacactattggaagcatttcttgtgatgcaaattgtaaagaatcttggttcaaatctgaaacagatgaaatttcagttatgtttcaaaatttgtgtacattcagatataaaaatggttgttcttttggctatttttgtatcgtttttctgtaggattcacagtggaaccaaatgatagatatcgtattgctgctggcccagattatgcctttagttcagccatatatcagttcacctttagaccagtcaaccggagacacaggatttatcactattaacatgagaagtaaacagaattcctggaaattccaatcgcagaaaagctctactgacgaaggaagataggtggccaccaatcgatggtaactaatgcataaagtacttgattattacatttgcgtgagcgtgacctagcatctgtatagctttccctggcattcagatgcagctggtttcctccccctgggtggctctttccttgctactgtctttgacaacctgttcttcacacccagcgctgcagcgtgacgtctggacgcctttggcctcctgatgtacagggtggtcttctttgcaaggtcctccacgcag

SEQ ID NO: 3757 - DNA, 4016 bp, Sorghum bicolor
gacctcaggccgcgtgtaagcatgtacaagggcgtgcctgtaaaatccgaaaagcgatagctattcctttttgggggtaaaatcatgcatctgtctagtccccgtgcagaatagcagttgttcattttttgaacggtagtattatttgtaaacatgatgagctttgtagtagcattggaaaggtccctgaaaaagggcggatgtaatacgattgtcttgatggagcgaaaattggagtattcgttgtaggaaccaatggatcgtctgctgtgagatggatggaggttaactactggagactggagagggtctggactctggagagagagttttttttttcttttttctaagggagggagggagctcaacgctggtgacagagagatttccgactatggtcttacagaaaggctaggatggtgggcagtggttttcacgaccttttcatttcaattcaattatgattttcatatttcgaaaattatttttttaaaaaaattgttcgaagctagatcttgatgagatagattatatacaaatggcatgatcaataggtcttacgtgtaaaggatcatatatccatggttccaaatttccttgtcaagctaccaaaatcatatttctagacgtccataaaaagattattgctagctgcccaaagtaagaagcaaaaatgttataataaagacgttccttagtaatatcatcatgacttttgaaattatatggtagttttttttagaaaaaaattggtatcaaagattaatttacgatgattttgaaacttcctttcatgataaaaatctaatagtgtacataaatatttaatacaatataaatattaataaatgagtgaatttaatatataaaatttttcataaataccgagaaaactaaagtatttgattaagtccattttggcccttaaattcttgcctttgtctgactttagctccttatcaactatcaaaaccattcaattttgaccccaagacggttttgattagttttgacatggcttagaggtcaaaatcaaacggttatagctgctttagagcaactctaagagcttagctattcttgttatagagactattttagaatttgcatagcaaaaggtaagcttcaacagatgtgctatctgtttttgtaaaatagaaagttagttatcccttgattttcggtggccatatatagctaaccattgacactagctatctgattgtaaggttgttgtggacttcttcttttttaagaagttttttctattttacaaaatagctaaataatagaatttgactactaaatttaggcaagctcttggagttgaaattagccaaagttaagtgctgcagtgccaaaaatatttttatcctaattttacacattcgtccatattacctcaccgaacattctttttttttaatgaaagtacgattccaccagtctgcaccctctcacgatgcaatctctgtctaaacgagttaggcactgggattagaaatggatatgggtttggacgaaaacagatcagatgttattgatatcattttttttattttttgttaaatttggatttaaatatgaataatgtcagccacgtcagataagatacgattgaatatcgacatcgtaaatatacgatttgagtattcaaagacggatagagtatcggatattaaatatgcagacctagatatcgataaatttgtatttttaaactaattcgatctcaaatacaatcggaaatatctgtactatttctgctgtacaatacaaaaccgttatccacccagtaccagtttggtgttgtttttctctcaaaactcttgtccgttgtctgtttgttgacactatccgtaagcggattcccgtctccacaacgtgtggtgcgcgcgccgcccaaaatccaccaccccggcgctccaccacatcgcagcccgccgtggcgctcgcgcctcccccaccgtggcgctgtcccctccctcccctcacaaagcatcggcctctccgagtccgagcggacgcgagccgcccacccacgcgagacgcgacctcagggtgcctctctctctgcctactgctcccgctgtacctttccttccccatggccaccgcctgccgcctcgccgcgccgctcggcctcgccccgttgccccgcggccgcgcctctgccggcgtcgtggccgtcgcccagtgcggtggtgagatcgagcaccttcgccgcatcccgctcttctcctccttctcctagtgtacttacgccagctactgaccatcattagcgactttgcttgttatctcggtcgccaggctccaagatcccgagaggcgttgctgtcagggcgacgtccggcggcgagggcgccacggaggacgtgccggagatcgtcaaggctgcgcaggacgcggtcggcatccccacatttcctttgttatattacctcatctttaattaattttccttgcgagttgagtttgctgccaccgtgatttgctgcgcaatgtgcattaccgtgagcgttgtttctaggcagtgggacaaagttgaggacaagtacgccgtggccaccatcggcgtcgccgccatcgtcgcgctctggacggtagtaggtgccatcaaggtacatgaccaagacaaagcacacaccacatgtttgtttacctcttgttcttcgtttgagttcaaatacgtaaagttacaagaatcctcttttctgcgcgctcaggccattgacaagattcctcttctgcctggtgtttttgagatagttggcatcggctatacaggggtaagttctcaagcatttctccttgcagagactctgttctatgttgctgatgaacctctcttatcatttatcaacgtgtggaatgtgttgatgatgcagtggttcacataccgtaacctcgtcttccagccagacaggtgaggcacactgttcttgacgatcccttttaagtatcatactatgttacaatttggtcctgtaatccttatctttcttcttcaaccaaagatcatatcgttcctttctttttcctgaaacgtaaaaataatcacaagtaccaatttaactgtggcattattgagtttcttttcatgaactggtaccaaatagcttatatattctgaatcagtacacttttcagttatgcaagatatagctttacgttatgtcatggcacaaaaagatgtaatgatttatgcttcattctactgaaaataacctcttcatcgtttccttgtaccgatttctttgttataaacttctacttctacctaaccaaattatatcttctcgacgtagacacagacagctcttcccctgtgtatctagaaaaaaaaaatgaactgtcgatcctatgcttgcataaaagaggaactagccatagtttgatatattttcatattcttatcaagttctctgcaatgatggattacatatttacagggaagctctgatcggcaaaatcaagagcacttacaaagaaatcactgggagcagcagctgatcaaacatcatttacaagatgggttcttaagcagattgtagaattgcatccgtaagcactgagctgctatgcaagtgaaagtgctaacatcggagactggagcctcaactgcttctggtcccctgacctaagtcagagaaaaactctgcagttgagcaaagccgttttacttgtttcgatgtaatatttatgacatatttccagttctttttccagagtttttctctttagagagcatgcgattggctctttgctttttgaactatctcagacctatgataatttggttgaatgttcttgtaccaacgtgcattgctatttcttctctcaagaaagggcattgttttttttgcccctttcctgggcaacaagtatgactagaaattgaactcgagaagaagcctagtatgataatatgctgacttgttaaaggcaatccccaacaaattcaaaagaaaatacaaacaaactacagaccatgaaggtttccaaataagccc

SEQ ID NO: 3758 - DNA, 3808 bp, Sorghum bicolor
accaacaaatgcttcacaagaagctaccaaatcgagcaagcaagaataactaggaagttcaaatcgtgtctcaccaaattcagatgaacaaaactgagtcttcgacaaattctaaccgcagcaaatgtttgagcatgtgctactgccttctaacccaagtctgaacaaattgctcgatcacgaaagggtatgcgaagaaatcacctaaggcattaattgaacagatagtgaagaatgcaaatccatactttctaaatgtgctccacctcaaacacataattcaggaaccacaatcactaaatgagcaactagcacatgtgaacaccactatgcgcaccaaactgccgactaatgaaagcaatggcatttacaactgctcatccaagaaacctaagtgaaaggaaccatcaaatgtgtagccaacaaagtatcaacaaattctacactagatctcatacaaacaagggcaaccacaatgtactatgatctgtagtacaaacattgacctcaacttagatttaacgatccatgcagagatcaaactccacgttgcaccgaaatcctccaactcggactcgattgggagcttaatcttctcttcgccatacataattaagagtggtagaaatgagctacagttaagacatcattgaatagcagctgcaaggaattgaatcaaaccatccgaaacaccgcctcatacatctagaggaaagataaatgggagcccctctccgtcgggaccggatcagttcgagagtatatttgagttttagcccctttatataaaaaggtagaggttcatttagaagtttggttgaagttgctctatacgcatcaaccaatcttttcatacaagatctcatctctaaacattacacacgaatctatctgttactttctagaatataatcccaagttctttttagaacggatcgaggtagagcagtatttttctttgatggtcaaaagttgtttgtttttgaatctaaaattttaaaaaatttgtttgttttgaacaaaaattgagagatttgtttttgagggtcggacacatacgagttttgggaaaccgtcggtggtacctgcctgtgcacacagaggtagctagctaggttggggacgggatgcatgtatgtaatacgtggcggagcttccgatcgagacagcgacatgtgggctcccatacttgctggacaacttaatcgctaccactgctgcaacttcaatttgtgaatgtgcatgtaacctcctgcactgtactgatatctctgtttctggttgcggccgggaggaattaacgaagactactggaaggattcatggatgatggacgatccatatataattgacgtcttaatgcaggaagagtatgtgtttattgtgcgataagcactcggatccaactgcaaactacctcacactgacacactagtgagagagagtgaatacgcctccaacttcatcagatgagagccacgtacgtccgtccctgccgactgccgccatcaccctgcctgctaagtcgtgttaggcggctgctatttaagggcgtgtttaaatgtctttaaaattctaaatgtttataagatttctcgtcgcatcgaatctttagacgcatgtacgaaacataaaatatatataaataaaaaaaaaataattaactacatagtttgtatatgtaaatcgcgagataaagtacttgttgagtctagttagtctataattaaatatttattgctaaatataaacgaaagtgttatagtataacataccctaataagttgctattgctgctgcaaatgaattcactctgcctcgatcatgccctcatcaactaaccgctgtagtattatctgtatctatctgcctcctgctcccaacacccaaccacctcctgcccagcaattaacttcgacggatggcgacgataccgtccgtcgtccatggaagatgatgttggaacatccaccatattcattcattcatatgcatgcatccaccattccaccgactgcctgcctgaaactgcatgcaatgcaacaacaccgtgcatgcatgcacatctgtcatcagcaatgacaagctactgtagctagctcccagatcagatcagatcagatcgatcgcaagcctgcctatttaaggagccacactccatctcactctcctcaccagcggctagcacttgctcacttgcattccaaagctagtacaagcaagtctcagacacccccagaacatcgacgacatggctcggcttgctgtggcgatcgccgtggtggcggcggcggcggtggtggtgctggcggcgacgacctcggaggcggccatctcctgcgggcaggtgagctcggccatcgcgccctgcctgtcctacgcccggggccagggctccgcaccctcagcaggctgctgcagcggcgtcaggagcctcaactccgccgcccgcaccaccgccgacaggcgcgccgcctgcaactgcctcaagaacgccgcccgtggcatcagcggcctcaacgccggcaacgccgccagcatcccctccaagtgcggcgtcagcgtcccctacaccatcagcacctccaccgactgctccaggtaattaagtgatgatctgaatgaatgatccaatcactacaagttgtttgcaactttgcatgcatgcatggtctgattcaacttgaatatcaagtcgtttaattaacttgtgcttcgtcttccatgcatgcatgatcatgcagggtgaactaaacctaaacgatgatcgatcgatcgatgatccattccgccgccgccgccgtcgtcgtcgatcggcgccggagcatcgaccatggatgagtatctatctacgcctgatatgatgagatgatgagttgtctactactgctacgtcgtactactgaataaaaatctctccgtatgtacgtacgtgtcgtcgtgtacgctgtgatacgcttgcatcttagcgtatgtacgtacgtgcgtgtgtacatgtgtgtgtgagagatgtacttttgcttgttgggtttatttttgagtgcatgcactatgtgcggtgtttattatttatgtccgtgtacgtttcctctcgctcctgtggtttgtactagttcgatcactgctacatgcacacacacatctctttgtttccaaattgttgttacgcatgcatgcgccatgtgactgtgttccatgactcccaaacgcttggtcaagagagttactgctctattctcccccaaacacttgtcagcatatatgcaactatatatatacctcttctgttctaaattataagttatttttaatttttttagtatgtagcaaaatgaatataccaaaaagtttaaaaaacataatttagaatggacggagtatagcacgtaacgaaaaactggctgactcagaggatttgcagacaacgtattgtgatttgaaaaattgaatggttttatttaattaatgaactctcgccacttgaaaaaaaaaaatactcacacggtggaaattaaaacaagtacctagctagcacgttttcatgacatgaccacacacgcgctactcttcaaatacataattcatctgatgaacgatcaaggcaactagaaaacagagctgtgtgctgtaattaagggacttggtagcagaagatgtataattattaccaccctctatcctaaattataggttattttagtttttctagatattcagttttttaggcatatagatatacgatatatctatatcataataaacgttatctagatacataaaaaaatttttgtatctacaaaagccaaaa

SEQ ID NO: 3759 - DNA, 2988 bp, Sorghum bicolor
taaaaacgaaagtactatagtagcaaaaaactatacttttttgaactgaacaaggccttagtttgttctttttttccatggcagtttgcgtcgctccggcctgtaccgttttgaaaaaccctattctctgaaacattgctaataaagttacttacttaatataaagagaagcagtagcgaagctagagcaaatttaaggaggtgcggctatgcatagatttgaatcacaaccatggtgaaatttcaattctattcactgatattcaaaaaattgtgggtgcatcaacatcgacagccttattacacgtagcttcaccactgaggaaagaaagatatatattgtatgtttaacagacaataatttagtcatgtttacatatggctatgtacctatgtatgaatataaatatagcatatgactttcgccgtcatatacataaggatggggatggtgctccaaatgaatacccacgattcttctatagtctaacttaatagtttattaagttagactagagaaaaactgtatgtatccatttagagcaccatctttatccttacgtataccgtacaaacaactggatgtatgagtgacaggtccctctaatgatgttaggtcaaaccataatagtttttacccagaaataagacttaggcactagtggaagaaggctataagatagccccagcccttccatcacgggacctttttgtgttcgtgaaatggaatcttttttgtgttgtggtgacaattggcctataattgtagtggtgcatggatggtagcgagttcacgtgcagctaactaccaacgtcggttgggtcatacgtacgtgtacgttggtcgacggaagcgtccctaacgttgtcatgtacgtatatccttgtggtcgagtatgtctgtgattgaattgttggtatcttcctttgtaaaatgttcgtctatttctgttttctcacaacttactttctccgtataggatttagaagttgtttaagacagcaatacggcctccaaaacataattttaaccttttattttataaaaatatttataaaaattgatatatgtatactttgatgaaagtatttttaagataaatttatttaaaaaaatttcacatttgcaaactcaacaatttaaaaattattgatgatttatatttctaatatttgatctaaatcttatccaaaacgacttctaaatcttatgagaagtaattatagttttatcatcccatccgtaacaggatatccacgcacgtgcaatgcatgaatcggaaaaccttgagatctctataattggtgaccaaacataacaaaatatgaaggtgtgcctcgttgtaagcatctatactcgctcctaggtggttattgtttttggtgataactgcaatcacataactatgacttattatatgtgttgtgatgacatattggtttatgtgcaattctatcagaatatgaaattttaaagttgatgggaaattttgaacttttgaaattgattttagaggtggcccgaaaaaagagctaatctcaggaaatatgttttcgaaggcttttaaaaatatcaaccgctgggacaagacgagacgactgaggtttcatgctacaaatagacgtgaaccagagaaagatacaaatctttcctgtagtagtgtaataactaataaatctaatttgttttgaaggtcaaaaaatttagttcatattgtcgatgacattgcacaatcttggtccccaccatgtgccctagaaactagctagaaagtgacagtaaatggatcattcatgccgcatcagcaacacatttgtttgtctcaaaaactatgattgaaagtactatttactaacttattatgagaaaaaaaaactactaaatgattcgatagataaactcaaacaaacaggcagatatatatctccaccttgtcccaacccctcaccctcttatatacgcctcacttagcctgcacggctgtaccaaaccaacccaagccacccaataataaccaacctaaccaagctgcggactgagcttagctgttgatgagcaggtgagctagctagctagtagctaggtacagtcacggagctagtctgccatatgggcaactgcgtccagagcagcggcggtggcgttagcagctgcgccgtcgccgtagaagcagggcggcagcagcagcagctgctgctgcagcggaggaaaagcgctgccggtgatgaggaggaggaggtaataattgatcaaggggcggcggcgccgtcgtcggtcatgaaggtgaagatggtgctgacaaagggcgagctggggtggctggtggcgcagctcaaggccggcgaccgccgcctcgaggacgtgctccaggagatggcgcgcaagcgtgatggccgccgcagcgccgaagccgacgggtggcggcccagccttgagagcatcgtcgagtgcccagccgagacggcggccgccacctccgatgattagctagttagcagctgtcttgtcatatgcgtacgtacttgtgtgtgtgtgtgtgtgtgtgtttttttttttttttgcgttgttgatagtctccaagactgcaagcatgtcctggttgacaccgtatcctatatgtgtgtgtgtggggtggaaattaaaacttgtagcatttccaacttaattagggataatctagtcattagcgtacgtaagctgcgcgcctagttgatgacttagtttgttatatgcagcatttttccaacttttttccttattattttgttatgtatatatatagagatcggatatgattagccaggaagacgcagccgcctgtacatgacgatgatgatcgaagagagtgtttatttcaagtgcttgtcatttcaatcttttctcccttgttgcttaaatttgtttctacttttatatatcttgctctggtcccagatgttaaacaatggtttctgactctctgcattctgccatcctactttaatttt

SEQ ID NO: 3760 - DNA, 4162 bp, Sorghum bicolor
taatatcgtactttgaataattatgtttgaactatgagttttatttgtgggtgagatacttttggttaaattatagaggagaaatgaagatcatagagggacaatatgtatttgtgagaaaataaaacatatagtttgttttaggtagtgcggctgaagacaggagaaaaaaaaacaactactctgagaataggtgactagctgaacatagaaatcgatagtcttttagatagtactgctcaaaatgctcttatgtcgctgtcgtcctttctaaagttcaaatggccaagtgggacggaaggtggggatggccgtcacaagttgctctggatggtcggaactcggcaggctctggtctgaagagtgacgaggagggctgaaccggcagctgaagggacactcaccaggatagttgcagaacaagtggcactaactgacaaacgagcacaagatgcccctccaattgcaggagcctgagcagtaggacgattctccattactgctaaaacagctaaagtaatcagcaacggtacgtaattcatgcttagcctaagcatcggccagagctctaaaacaagctaaggttgatctgaaatcgaaggagcattgaggaacgaacttgtagtaggaaggatgtagcattctatgaaagaatcaccattagttcaagcatgtttagtggtgcttcttttagattatctcccacattgattttaggagtagctataccaaacaatatattacagagatgttattctatcatgtaaaggtattctttgaaatgaagaactaacgggctaggatctaaaaaaaacttgctttgcttaattcattttgcacgcataatcacttcctccatagagttatctcgagagaatcactttcatttacaaagtcactcactcgatctctctccctaaagaaagttattttgttctgtgctaagtcaaaacatttcaaataccaagtttcatatataaaaaatactaatatttatgataccaaataagtatcattaaattcatcataaaatattttcgtagtatatctgttttatgtgatacatgtaaattgacttataccaaaactacaatcactttccttcctagaaacaaatgcaattacgattgtgcaagtgatgaggtctgaagattttgaccgttgttctgctggaagccttctgtgggggcttaaagtcatgcttcgaagtaattttgcttcttatgctgtagttcatacctcccgttcatgtaattcggctgccggtagccttgctgccctagaggcgagtttgagtctgggtgctagtccaattgtggatagtattccaaattgtactcgagttctgatcgccaatgatttggcgttgttttatgagtaatggagaacccttccatgtttaaaaaaaaactacaatcactttcctttaaggaggaggtactatatcagagaatcacttctactgagaattataaggcgaaggatctttatggcctatttgctaatctccttgtgcttttgattcgttcaagaaaagtgattctatgatagtaacgattttaagagtgaaagtgattctctaagataaactttatataggaagtgattatgtgtaagaagtaactaaggagaagctaggtcttattagttcctagcttcctagctaatgttagagaatcactcaacaataagcatagaatcactcaacaataagcacaaaatcactaggagctccttctaaattcagtcataaaaagttaacttgctctatgaactctggaaaaccaaactttccaatcccaaatttagaatttttttccaaaaaaacattaagaaagagaatgcaacgtgtgacgcttaccacgtggcatcaaaatgcaccgtgccatccagtcaagctgctaggcgcgtgccatgttggcatactatcttgcttagtcatcatgccaagtcatccgccaacggtcctagctggtttataaatctcctctcttcgtcgcccgtcggcaaccttcgcacgacctgcacacgtaaacagacccaagaaaaactctctcggaacaatgtgcggaggcgccatcctcgcggaactgatcccgccgacgcggcgcgtggcgccgaagccggtgaccgagggccacctctggccggcgagctccaagaaagccggcagcggcagcaacaagaggcaccaccacgaatacgccgacgacgacgattttgaggccgccttcgaggagttcgacgacgactttgacgtgcacgaagacgacgaggaccaccctgaccacttcgtgttctcgtccaaatccgctttctccccaggtaattaaccaacttcgatcgttactcattcgagggtgcaagtgcaataataatgctcacgcgcgtccttaattgggtttatttgggcatgacgttggcaagaactgcatgctagcgtgtaatctcaagggaaaaactctttgtgtatagcgcacgacggcaggcgcgatgcgcgagccgcggcgagccagaggacgaagcgcggccgccgccacttccacggcatccggcagcgtccctggggcaagtgggcggcggagatccgcgacccgcacaagggcacccgcgtctggctcggcaccttcaacaccgccgaggacgccgcccgggcctacgacgtcgaggcgcgccgcctccgcggcagcaaggccaaggtcaacttccccgcagccagcgcgcgcccacgcgcacgccgcggcaagggcaacccaagaaccgcgccgaaacctgcagcacaggcacagcccgctctgctccttcgaggggagaagggtctggaaggagttgccgtgaagcctgaaactactatggacatgttcgacgtgggcagcttcttcgacatgaccttccccaccttcccagccgcgccggcggcggccatggagagctccttcgctggcagcagcgccacgtcggagacccggagccccgggaagaagctgagatacgacgacggcgactcgtccgaggggagcggctgtggctccgcgctggagctcgctgacgagctggcgttcgatccgtttatgctactgcagatgccctactctggcgggtacgattccctggacggccttttcgccgcagaggccgtgcagcaggacgtgaacaacgacatgaacggcgtcagcctgtggagcttcgacgagttccccgtcgacggctatgttttctgacgtaccctagctatcagctgctgtactcctactcagttgtaagcatctgaattcatcaacaactcaccacgctttctgttccttactgcgttcgtctactccatgtccctttgtcagattctgtttttttggttcaggaacgatgttggtgttcaaccgatcaaccggacgatcgatgcggctgatggccactttggagaatgcttactgctagtactatttgctgccttgtgtaatcatttgtgatggtactgtttgtgtgtttgatcgttgtagattctgtatctgtaacgctgcaggcccccctgatcatcagattgtactccactctgaatatttgtactgtatactcgtttggtatttcctactgttggtcaatagtcctatgaatttgaccatgtcggcgatgttcctttatactgtacggttgtgattgttatgcaaaataagcttgtgaacctggttctatatatggtatcttgtttatgagtcacctagccttcactgccatgtttgagttggaggggatcataagtttctgaatcctgtaacgtgaacaattttgcttcgttgggatacactgtcaataggttgcggcgattgcattgcaaatttcactattcgtaaacatggaaaaaagaaaggcttcataaaagcattatctgacatgccaattagcacttctgattcccgaaggagtttagagaagagaacacaaacagtcttttttttttcattttcaaacgaacaaagatacagtattccaatgcgctggcaactgttctttgccatttcgtttaattccatgacacataatgttgacttcctgcaaatgaacgcctcattttcctagatatttttcaagaaatagtcttgcaacgtatgcgaaaaccgcctcgcaatccggtgggcacctaatcgacacagctggttttggactc

SEQ ID NO: 3761 - DNA, 5282 bp, Sorghum bicolor
ctcgcgtaggtgatattagggcctatttggttacgacacatcgaatatttggacacatgtatgaaatgctaaatgtatactatttacgaaactaaaaacatggctagagagtaatttgcgagatgaatcttttgagcctaattagtccatgattagatactaattaccaaataaaataaaatgctacagtatctattaaactttaacaactccaaccaaacacccctttagaacaactccaagagagttgataaaaatggatggctaaattcaagatttagccaacctctaaaatagaaaatcatgtaaaaaaacaaaaaactccaacagtctaatcgtatggctagcgggacatgcaaactatatttaccatgcgagaactccggaatagatgacttgctattttagcaaaccaaatacaatagttgttggactctcttttctctccccaaatagccaaatatagaatacataacatggataacttttctcttggagttgctcttagtcttttatatgggtcaacgcaggtagatactttgccaaataagtcagactggaatcggtcaatgctggccatcaaggtgattctagatgaaaaggaatgagcatcttgtgctgaaattgtggtggcaaatggcacgagttgcggtgatgctcgttagatcgagcacttccttttggatccgtatagaaggatgtgaaaagatatgggtggtgctgtggaacctgttctgtcaacacgtacattctggcgactggtcagtgcatttttggagacgttaaagatgtgaaaagatttgtagagttcgaaggtatggtgctactgttgtgttcacttaaggtcttgtttagatccaaatttcagacgtcggtgttcacgcttcacggtgaagccgtacatgggattcaagggatctacgataatgcaagcaaaatgtgaatactttctccttatattgaaaataaaccttatttgaattaataaaatctaaaatttagatagaccacctgtataaagtttagaatacttccataatatataattcctctatttgaataatacatttctaaaaatgttaatagtcaaagtgatatcttcatagattttgtgtaaacttactctctttcttcttttttcaaaatgaagtaatgttcacatgcatgcacacgtactcacatctacttccatgatacccatgcatcaaattcaggactcaatgctagcactcagaacaaaggattatactaatttaggacaaagctctaagtgccgcagacctctaagtatgtgttcctcaatgccaaagtgctccaaaaggcttacaacaaagtgtatgcaagctacagtcatataggtaggaagtgttcaaagaagggaaagttaattgttgggaagttgatttgaagtcaatcatctaaccttgtgagaaagaaggcttggctccccttataagtcgtgtgggctaggttacatatacatgcagagagtacacgaaggagaggggttctccccttattttggttttatcaataatttaatttttaaaattttacaagttcatacaccatcatttacaacatgaaatttgtttagtaagttatgttacctatgaaatacatattgaaagtgcatttaactgaactctagatgtttctaccatattttaaaaaaacttaatcaatgttagaaaagtttaacttattacaaagtcaagctaaactatagtttggaacaaatgcagtagttgcggtttagatgagcttttccacgattctttgacctttgggttgcaatttgttggggatggtatttgtcaaaagattttttttgcagttatgatgttcggaattttgttatcaataatttgtcactctgcaaagtctgaaggcggatgaaagcgaaatacaattttctccacgcagcccccttaagatctcggaaatagcgaaaccggggcgctccgtcgaggcctttaaatgccggcacagatgttggccggagcaggacgccacgaggcgaacaaccaactgcttccttcccttccgcgccgccgcctacaacgaccatcttcacgtgacctatctctctccgcctgaagtgttcacggctccatcctctcgagagtctaggcccatctcccgaagccgctagcgcagacaacgaccctacctatggatacgaagaagaagtcggcccccgccgccgccggagccgcggcgccgccgccggctagcgggtacttcagcaccgtcttctccgcgtcgcctgcggtatgtacgggccgtctcttcacgccatcgttctggtggattcttggagtcctaggattttttttttcataattagtgaattggtgcgatttgctgatgggtccgttactatgttgcgatttgtggagagagctcaacggtttctcaatttattttaactatatatatgatgaggggtaattttgataatagaggagctataggattctgcataatctattttggatatgacgttgacattgtgactttgttttgcattcaaggggagcgcaaatgacgcaaagcagtcggacttgtacacgatgctgaacaagcagagctccagaggacagaatggcagtagcattacaggtaggtagttcttggtaaccctgtgagtttgatattttctcttcgaatttaggttccgttcataaccaaagcgatacttaagacctttttttttaccatcttagtttagagttaatctggagcattattgatgtaataactatggaagtttaaattcgtgctcagatggcaaatcccatggccgccctacttacaaggatggaaaacagtcttatccaaatgagtcatcagaatccccttactttggctcatccgtgcattacggtggtcgggagttctacagcagcactttacagaagcaaccagccaacgagccacatacaaacgtacgtagaacttttttatatataagtatacagatcatttggagcagttaagtctaatgtttattttgaattttaaatccagtacaaggaggacaacccggatggctctgctactagaggtgattggtggcaaggtatatcattgcattaatttgtgtattaccttgaatatacatggatgcgcacgtacactgacatgctagactgcactttcaggttcgctgtattactgaacaatctgctgagaactctcctttctgtgatcaaggtataccatatataggacacctcacagtttctattttttgcttttcattagttgtggtgtttgttatgcttgcatcaccggtgctactcactttgttggtgcccccattttgagtcatgtcttgctgtcaacaacgttgtacagttgtatttaggtggttagcagcagcacttaactcgatcttacatcttaatgagcctagactatatacttggacttcagcagttgttcgaattttttttatagcaaatggtagtttgattgtcttcatacaaggaacctaattgtgagatgtgatgtataagctaaagccttatcaatttttctgtctccaggggtactgcccttgatcatctatgcagcttaggtatcctattccaatcttaggaagttcaaaacatatattcctttttttcgtttcaagaaaacatatctttcttttatattttgtgtcattatcccagctccattctgaaaaaataatcacaaaagtctgtacaagacttacttgctagttgaatctgaaacggattgcatggtagtggaggttgacaacgatggctgtaaactatcaactttttatgaagtgtaagctttaattaactagtagaaagtttatcttagcagcttagaacaggttacgtcaccatcagtctttacctcctagcctaatatgtaccatctcgtacagcccactagctttttggaagcaaacatatttttttgtactttgtgatgattgaagtgaacggcagagcttggtggattagttgttctaaatctcaattcatggcaaggggtattgcatccgttgcaagtgttagcttataattaagttgttggtaagtgttacttgttaagaaaaaaacagtagcagagtatagtttcaatctttcttcaaccactttagtggtgttgatcctagaaggattattgtagtgtatgtaaagagtgcatacattacctagaaggtatatatggcactaagggtaacggtgacacatagaagtagaacttaccatgacagcttgcactttcttgaatcctagcatcccgcaacccctgttacagcaatgctttctcaatggccacatcattttattcacatcctattctccttttgcttttcaggaataaaaggagtagagctgagcttgctttgttgtagtgttgggactgttgatgcgagccgtcaggcatggatcgaaagtaatagttgtaattgttgaaagttggcgtcgggactacatccatccggtcggtggaggcagtatttagatgcatcatcacacctggacagatgtggacgtaggctgtgtccttttgtattcatgtttccccctgtgttctcgtggtttagttgcagttctgaacttactaatgggctagtaggtcagcctgtggtagttttataaaaccagttgccaaagagtcgcagactcgtaggatcacctgcaggctacatgtaccatgtgcatcctttgccgctatcgttcggaaagatttggagtgtgcatactatgtttctactattcttatttgtacccgtgcactcacaaagctaagcaatctacaggtggtgtatttgccttgtgggttacaaagctaagcaaaaaaagaactaacgtgaaaacaggatggaaatacaaaagacgcttgaaattccaagctgctgacattgcgctggtcctccaccttctggggggaggcttgagtctcctccccttgttctaccgaggagggcggcacacctagaagaccttcggtgttaaggacgcctgcgtttcataccatattgtcgcgtcctataaatctaatcaaatcagttgaaattggtagagttaatatctgctaggcatgataatagattacacaatgagactagaaatgttaaccttaattagactctagtgaagtactcctccatgcccataaagaaaatcgttatgcacaaggtttggatcaaacattgagaatataaatcatgaataacttttaagttgttaagtttgaaaatgtaaaaccatatgaatatatttgttttgaaaaacactttcataaaa

SEQ ID NO: 3762 - DNA, 2847 bp, Sorghum bicolor
gaagaattagacatccaaatttgtttcgaagaggacttgaaataggatggtctggacatacgaccacacccagtcacccacacacgactaactgagttgggaccagctgtttcagttcaaaaaaacctcattaacagttggatttgaattctttgtggaaattcctacacaaatcttgtgttgtttttgaaagagtaatcttgtgtttgaaacacggtgaaatcatgttgtggacgctagacaatttgctatgaaatacttttggagggattagtagtgctagttcaactcagacaaaaagtaatataaacagacgaacccgggagcaacattcattctccataagaccagaagtgggatatgctgatgcgatagatatcctctgaacccttaccgtctaatgcctgaaaagtaagtcatgttatgcaaccacacacggcagccatctgattcgtgcgatatatttggctctgttgctacaaggacacttcacacccctaatattaggccacatcatttcatatttgctggtgctcgatattattgatgcttacattacaggtagtcagtggagactggggcacagacgatgaatcactgaaagtaacatctgaaaacaatactgcgtgtctccaactgcgtacaaaaatgaaatttagagtataaagaagtgattattggttcattttgctttgatggtatatatttttccctacagtaattttaataaaggagagacaagagtgacaagaggttttacaatttgatggtatatttcaaggagctatcactcatttggtggcatgtcaccacgatatatcttaaccttcgattgagcttgatccttgatgaatgatttaatcaggagcctacctagtaccctaagaactacaagtggtgcaaaatcctgcagcatggtgcagacatatgatacctatcaacctctctatatgtcatttattttatttatttgtcactagaaatgccaaagttgtactattttagttctgtacaatgatgttccacgcgcttctgaaaaaaaagcaaaaaaattcatactagttgttgtcctgtgatttgactgtctttggtacaataaaattgccaccacaaagtaactaaccatacaacaagtcaacatcgtgacagttcggaattcagatcacgcaaattcataaatcgatcacgcaaattagctgatgttgcagatcatttccgcacattgaaccccaatcacagtccttcacctgttttcgctgttgatagctagctagctatgtcaatttggtgccgagtcccttccttgcccccctttaattaataagcaaaaaggacagcttcttttgaagcctaataaacgatctcatcaaaagtctaaagccaatgatgtggtgtcttaagggacactgccttttcatttccatttgttgcaacttgcaagagcttccttttaggaataattgaaaacttgttccagcctttgcatatatagtttgcacacaacctgaccacttgcaagagccaaatgcactgtcaaaggcctacttatctacacagacacgcatccctatctcacagtgacattttgagggcatcttccaaggtatctcctagcgagcaatctgcgtgaccatcggttgaaattggtggggagcaccatgattgcgatatgatcgagcttatcgctacaatgagggagagagaaaagaaaatatgaaatgaaacaatgatgcacgatcaatctccaactgaaataaaatagtgcactgtcagtggatgctgaaagcctgaaacaatctcacgaggagcaagaggttaggtagtagcgccgtagcggtaagccacatgctctaagccaccttcttatataccacacactagaacgggtgtaagaacaagctatacgcctcccttaccttagctacctgccatctttttcccttccttttcaaatttcagttagtgttcatttctgtggggaagaagaggcggcagcgacaatggatgagccttcacagagcgaggacaggaagctgtcggccatggagcatgtcaagaagcgccatgaggagaagggcttcctctatgcctggtcagtaagatcacagcaatataatctagatgtactcgataagcgttgttctgcatctgcagaatctgcacaatcttatgttttccgcaagcatcaaaacaaatttacacattcatttgtaggatgcatcatgctgaacacagattttttttccttgcttgcagcgccttcatgttttgctgctgcttctgctgctacgaggcctgcgagcactgcctggagtgcttctgctgctgcggcaagaaggacgagtaaggtcggttcaaccaacaattccgccgccgcttcatcatcatatggatttgttgtggaatgtggatttgtttcggttgtgaagaactgcgatcaatctatcgtcaaaataaaaacatgctgtaaataaatgtgattggttgaagcgttaactctacgttaaccatagtgagctagctagctatctagctaccccagtatctggagtgagtccagtgaaacgctgtacttgcgactgtaaaatgtaaatctgtgattgccactggtactatatgtacgttacagtccttgtgtatatataagggtttcttgtgttattgctctctttctctctctcttatactttcatgaacttactgtccagtaggtgcttctgcatctgcaagattaggcatgcagaatcacagaacttcatcattcagtagatgcatatttggttctttggtgtgttgtctgctgtggtatgttgcttttgcttatgaagttatatggtgcactctcgg

SEQ ID NO: 3763 - DNA, 6146 bp, Sorghum bicolor
gtggaccaatgttagcccttgtcaaggatcgcaccggtgtatccatatagctcacaaatatatctatttattacactaacaaattagttggaccagattgaaccaagtaataataagataagttttgttcctaatcaaattgtatcaatatttgttggtggaatcactcttcctcaagaaatagagatttttaccaccaatttatcctaatcaagatatgttttgtgttcttaatcagaattgcattaataaattggtggtaaaaatctctatttcttgaggaaggggtcaaggattcaaagggcaattattggctttgaaattatgaaaaagaatagaagaaattagaacgaggaggtggtggatgcatatacagtaggaagaaacaaaatgggtggaagtgaacctatgtgtcaaggatggtcgatcattacgataagagacgtctcttgatttttcatatgatatttctcgttgaggattatagcatgcatataatttgtaaaaacatttatttagactatactagatcataatttactcaagatttcatttcccggtttgattacttgggcctagatgaatcaggttataataagataaggtcggttcctaatcaaaatgtgcccatgcaattcaatggaacccaatatatcttgatatcgaactctgtatcattgttggatgcgagttgttctgatgttatgagtctggattacatatggtcatatggaacatagagggtggaggggcacttaggaaaataaaaaaagacaattacaagaataccttcaccatataatgttgtatagatatatttatggatagatatataggttttgttcctaatcaaaagtgaacaacttggtggtagaaatatccgattctttaggattaggattaggataggaaggagtcaagggttcaaacgcccataccattatatttattaatttgatttttatacatgttatacactgatacatatagactatattgaattacaaattaactgcttaaagttttagtttatgttttgcttatttggaatttgttgaacaagggtacaacaagataagttttacttttactaatcaaataagagaagtattgtactaattaaaattgtgtcaatcacttggtgatagaaataatctctttctcaaagaagatttcaagtcaaatgctctaaatattatatattattatttgtttttgacatctttgtataaaaaaataaaaaaccttctgcgcgaacaaaattggacgaggagggcaatattaactaaaaaaagaaccaaagcacgagaggcaaatataaacgtgtgaacaaaatcaagaccaagaccaaagagtattaacaactcctgtttaataccaccttctatcctaaattataggccattgttgggttctctaggtacatagttttttttgtcatgtacctaaatatatgatatgtctaaatataaatatataattaaagttgtatatatatatctagaaaagccaaaacaacctataaattagtacacagtgagtgagtatttacttactccttaaaaggaaagaaacacctatttcctctgtctcaaaataagttttcatctcgcattttaaagagtcaactaatctcaactttaactaggtttatagaaaacaatatcaacatttgtatctctaaatagatttactataaaaatatataacacgattagttcaatgatatttatctcgtatcgcaagtattagtattttcagtatacgcttagttaaagttaagactttattttccttcgggcgctagatgcagatttgtcttcggacagatcagcgctcctagcaggcgcaccgcgctgtgtacgcaccacgtggacgcgaagccgttcccgaaagtttcttcctatacgcatacgccggttcgcaagagttcgcaaccatcacggcctccacttccccgtgacgatcccatataagccgtctccgccacccacagagccacgcgtcggacggaacgcacagggatagaggaggccaggcgaggcgatctctgcgggtttgctcgctccatcggtagccctaggccgccgccgggcgcccgcgcggtgctcacgcgccccaccccgctccgctcaggtgcgatgcgttcgatgccttcgtgtactagtcctcctcgtcgtcgtaattttgttgcttgatcggtggttctccctacatcgaactatcgatcgcggtttggtgcctgtaattttccttttattattatctgttttcctgatgatgccgcgcgggattgggaagccccggccgctcggtctcagttctccggcgccgcaaagcagttaggcgcgcgaggacgcgcgggcgccagtccgccggatcttgtgcagattgttgtgcctgactagtcctcacaagatttctggacctgcatgggttgttttgtcttgatctaaccttttgttctgaaatacgcatgcggttgctctcgatgacgattgatgaagaaacatgtgtaatactgtatcgtgatgcagagtgctctgctcttttcaggtttcctttataatatctgcgtatctagtttacatggcttggttagtgaagtagattcagagtctacatgtgtatctagtttatatggcttggttagtgaagtagatagattcataacttctctgtgtttgtttacgtggctggcttagtgaaacagaaaaaccgtggaaatggtctagttcgttaggatggatgtttaagtgctctccaaaaaaaaaaaaaaagatggatgtttaagtaaagatatgcactttggatgttggaattaatgaagtgtccttctagatatctcctggttgcttatttttctttatgtgatgccatcatgttctccaatttgaaaagtgtgcttagtacttttgtatacatttaaagctctttggtttcacattatgatatttctttctaataaaagcgataatatgcagtgcacttatgttgcaatctgcaactggctctaagattttactctatgcttggtgtagaatttcatttcacagattatgattatttcctatattcaaataaagtttcctttctgttttcacatagaacaaacccaaggaaatgaattaaaacaaatgtgttaagcatatagtatgtaatcgtaaaatattcgtaaatcaagattttaagttagtcattaatcttagcttctctattgggcatttatcgattgttgcttgtgtttgcggcattgacgagtgcacacttcttgactgaattttccttcaatttctctgttcttggcttttccaacttactaatgcatcttagcatattgcagccttgcatatattatggggtaatttgccattgtttaatcagttttaacttgtattttccacctgtgtattacatgattgcatcagctggcacattgttaattatgttttctttgggacactcgtttggattaaagttgaaagtatgctattagtgttttttcaaacctgcattagtgttttttcatctataaaaagcccctatgcggtctggtgttttagtgccactttagctattgacttgctgttatcattttctgactttgctaactgcctcataggtgaaggctggtcctttaagcacttaaagatgggcgaggtacacgaagctgacaagaatattgagatctggagggtcaagaagttaatcaaggcgcttgatgctgcaaggggcaatggcactagcatgatttctctcatcatgccacctcgtgatcagatttcacgcgtcactaagatgctgggtgatgagtatggaactgcctcaaacatcaagagcagagtcaacagacagtctgtgttggctgccataacctcggctcaacagaggttgaagctttacagtcgagttccccccaatggcttggtgctctatactggtaccattgtcaccgatgatggcaaagagaagaaggttacctttgactttgagccatttagacccattaatgcttccctgtatctctgtgacaacaagtttcacactgaggcactgaatgagcttctggcatctgatgacaaatttggtttcataatcatggatggcaatggaacactgtatggcacgctgagcggaaacagcagggaggttctgtacaagttcagtgttgatctcccaaagaagcatgggcgaggagggcaatctgcagtccgctttgcccgcttgcgcatggagaggcgacacaattacctgcgcaaggttgctgagcttgcgacacaatacttcatcaatcctgccaccaaccagccaaacatcgttgggcttattcttgccggttctgctgacttcaagaatgaacttggtaaatctgagatgtttgatccgcgtcttcaggccaaagtagtcaagatgattgacgtgtcttatggtggggacagcggcttcaaccaagccatcgagatgtccgctgaggttctttctgatgttaagtttgtccaagaaaagaagcttatcgggaagtactttgaggagataagccaagacacagggaagtatgtccttggcgtcgaggacaccatgacagccctggaaatgggcgctgtagaaatcctgattgtgtgggaaaaccttgatgtcaggcgttatgagctcaagaacagtgtcacaggagaaacagttgtgaagtacctgaaccccactcaggaggctgatcagagcaactttactgacgcggcgacatccggagatctggaggtcattgacaacacacagctgctggagtggtttgctgagaactaccaccagtttggctgctcgcttgagtttgtcaccaacaagtcccaggaaggttctcagttctgccggggatttggcgggatcggtgggatcctccgctacccagccgatgtcagtgcctaccaggatggtgacttgtctgatggggagtatgatgaagacttcgaatagcaatcagccgaaactcaaatgaatccggtccgggaggagcctgtgctggcccgggccgcgccgggacagaaccctgaaacttccaaacgatcggtgcaaggaaaccatggtcagtagtgttgccgatcgagaagaatttaagtttttcttcttgatgttgcaactgggttttcgtttgtttctcttgactgacacatcttttatttccaggtgggggatctgcagggaaggaggtttgagcaacatggaatatatatatgatgaagcttgtgtgaagtgtggtgacgttggttctttggagacggtgtcttgctctgttggtccgagcttgcagtctggtgatgctacaaggaatcaaccatggagggtgccttctgttggtcaggagagcttaagtaatataatcaactagcatcctattaatattgagtcggtgccagagtagtgtggtgaataaagtgcctgtgagacaggcggtcgtgttggcctagtcgttaaggttggtttgagcggctgcgttgccgatgcagctgtctttttttatttgttgatgaatttcttgaactgaggtcgtggtgtgcttgcactctatagtcctggtgttctacattcccagtctgcgttgcatgttcgctttatgacgtgcgtgatatctatgaagtgaacctgaacctgcctaattaattagttacaggcccgtaccggagaattttaggcatacaaatggggcctttatattagggcgtcctcaacggtgatatgaaatcgctagcgaggagtgcaaccaaaagaaataaataaatgtctagcagcatagctcacatagcacagacacagcaaatcgacgaacatctcgctagcactgagttttttttaatatttctttattgtccatgtacgcaaatcaatggcttgcacgcgcttgttgaggacgcccttatagtaactgaagagtatttggctatttttgagagaaaagagaatccaacagctattgtatttggtttgctaaaatagcaagtcatctatcccggagttctcgcatggtaaatatagcttgcatgttccgctagccatatgatttgccgtattagaaagactgttggagatttttgtttttttacatgattttctattttagaagttggctaaatcttgaatttagccatccattttta

SEQ ID NO: 3764 - DNA, 6320 bp, Sorghum bicolor
ggttacacttacaactttacccacatagagcacaagaccgaaccaccataccgaggcatagataatggacaattcatgcaaacaaccatcccgcaaggggccaagtctccaaatgaacaattaagatgtgtcgagtactagagttctagttactctgcaaccaattgcactaaatccatagactaggttacctaaacacaccagggtgctcggcttaccattcccatatagtggtaggtgatctctatgaaaaggtgttccaaactcaccaacatatgcaatggtccttaactagctcaaacgagatacaacacatgagcttgcattcctcctagcagggtccatcgaagcattctgactaggttggaaacctattggcggtcaaattacctagagatcggtcacaccactcttcacttttagcatgggcctcagccaaaaagatggtacaaactgatccacatacagtcagctatgtttagcaaggacaaacataggtcgatagttagaccattccggcctaaagcccataagatcatctaaagcctattaaacttggacgtaaccaaaaacctttaaaccatgctaacttaaattttgatctagctttttccaaacatcttttcaaaggttactctcttaacttttaagtcaccacttgtctctgaatgcaaattcgttcaatctcacaagtggcactacataaccaatatgcaaaacacgtttaaccctcttaatagtacgactatatagcctatcaatccggttcaacctaccaatactaggaggtggtccatctcattgcctaacttgttagtaatactttatctgatttccacatatgcatgtcatctaagcataacatatcaatggttaactaacaaaaccatgagaagtaggattactgagcaaatttgttagacctacaatttaagcaatagttcaccaattctatcaaccttgctacctattgccacattgtcaataatctattgaattcaaagctacctgtgcatcctttggagagattgatgtgctttgcaatatggcattgcaatgtccaactcattacttcaacaacttcaagccttccttcaggtccttggtgctcctagagagatgtgacttaggccttgtttagttgtgaaaactttttggatttcgctactgtagcacttttgtttgtatttggcaaatattgttcaattgtgtactaactaggctcaaaaggttcgtctcgtgatttacagataaactgtgcaattggttatttttttatctatatttagtgctccatgtatgtgccgcaagatttgatgtgacagaaaatcttgaaaactttttggattttagtggaaactaaacaaggccttacttggcaccaaagttaaaattccacaactttggacgtcgagtagcaaaattttagacgtacggtagcaaaatcttccattcacacaagtttctctttcccaaaacaatgaaaaaactatcttattacttgtgatgtatttccattagcaaaatacacgaatatggatgtcgagtagcaaaattttaaacatcccgtagcaaaatttgtctacacacaaattttggacgtcctatagcaaaatttgccgtatttatatatgatgaactgtgtcctgtgtgtgtgagagacgcgcgcgcacacacgcgcacacacacacacagagagagagagagagagagagaggtctgtgtgtgttgatagcttgacatgtgccgtcgctttgacgaggacgtcgaggagttgacgccgtgccgagaccggcctgatccacagacgcagcgtttcggacaaactcgatctctttggcccaataaaagttcgcgcgaaacaggtcacaggcccatccacacatggagctcacattggtacggctctgagcatcggtgtggcaggcaacacgcgccgcgcgagagaggcgcctggggtggggtgaccgggagagtggccgaggcctgccgagtccgagatggccgccgcgagggaggaggatgaggccacgcaggcgcggccgctgctgctgccgcggcggccggcgcaggaggaccagaagtggtggaggcggtgggcgcgcgaggccgggtgggtcgggtacctggccctgcccatggtggtggtgaacctgtcgcagtacgccgttcaggtctcctccaacatgatggtggggcacctccccggcgtgctcccgctctcctccgccgccatcgccacctccctcgccaacgtctccgggttcagccttctagtccgtaccctcccccctttcccctgttttcgttctcgtccccatattttgggctcttttattttacctttaatttcgcatgccgttccgtgctttgaacgctttctggttggagtggagaaagccatctcaaattctcaatcgctgttttgcgtttgcacactgtgcatttctcggttcccggtggtcgacctccatctgagctgggcgccatggattgtcctgccgttaccgaatccttggcaaattcatcagtgagattcttcatactgttcgttgatttcttacgagagaaaaacaccgttaaatagaacaggagtcgtcgcaggggcatgtggtcacgttactttggttttttttatgtcactggaaatataatactgaactagtggatgccatctgaatggttcaaagatatttcctagttcaactaaactagtccgctagcgataggggcgttgcagtaagactggaaaaaaatatgcaatccatctactccctacgacgtttgatttgtgcgagttagcagcctcctgatggtgcccggcattttttccaccggaagtatgcgtcatgacagaactatgggacgtttgatttctgatagcagtgtcctgaaacttgtttagtcagtacaatgtcaaagaagaatttgactatgtttctctcttatgtttaggtcagtttaggtcactccatatgtttctctctcttttctcacatactatatgcattcaatcattcaacactatatatgattggaaactataatattaatagctactccgtaataatgacccaaattcaaatgcacaattaaattttaaaaactaaaataaagtgctatcccaaggaaaacatagcctcatcacaatttaaatttaattgctaattagaagacatcacatgcaatgaaattgtgctcaagaataattaaactaggagaatgccccgcgcattgctgcgggaattaccggtaaaattatactatcataatatatgttagtggaggatttttagtattttaacatggacaactaaatatatgttagaaaatgatgtagtttgctaatatgaataacatagatacaagataaatgatatgtgttagttcaatttattagtggataatgatgtgaacactttgcatggtggggtaatgtattagtgagatgatttagtggatgttgatgtggacgctttgcatgacaagagaaatagttaatgctctagtggatgatgatgtggatgctttgcatgtcaagagaattatctggtggggtttatctatataagagatatatagattagccaaatcaaatcaaaatacatattaagtaatggatttgtgcacaggaacatttattaattataactatggttgcaaatcaatagacatcattgttatagatcacaaataaattataactgcacaatccaattgtctcagtctaaaatagttgatcatcactgtacaacccaatagcacactaagaacatacagtagtgttatccaaataatgattgtgcttctacaaatattatctacttaaacgcaaatttaaatgcactaatgctccaacataacttgtgggatccactccgcaacacaaggggcatcatccttctaattctacagactataggctaagctcaaaacttattgacacacaactcttcactcattcactgattctcttttttccatcgtgacaaaaacagcgatgatttcgcctgctagtattgagtatcttgacctgctattgactattattgttggcctgctctgcacttgggaaacagatcggattagcaagcgcactggagacgctatgtggccaggcgtacggtgcaaaacagtaccataaactaggcctagacacttacagagcgatcgtcaccctcctggtggtctgcatccctctctcgcttctctgggtgttcatggacaagatcctggtcctcatagggcaagaccctctcatctcgcaaggcgccgggaggtacatgatctggatgatcccggggctctttgccaacgcggtgatccagccgctcaccaagttcctgcagacgcagagcctgatctacccgctgctgctgtcgtccgtggcgacggcggcgatccacatcccgctctgctacgtgatggtgttcaagactggccttgggtacacaggcgctgccctgacgataagcatatcgtactggctgaatgtggccatgcttgttgggtacatcgtgttctccagctcttgcaaggagacacgcgcacgcccgacgatcgaggtcttcaggggagtagatgcattcctgcgcctagccctgccttctgcactcatgatgtggtaatcaccacatcctacatttaggcttctctttctctaatctctatatatggtgaattccatcttttaactgtggctaacatttgtttttttggtctcagtttcgaatggtggtcatttgagctccttactctcatgtcagggcttctgcccaacccagagctgcagacctcagtgctttcgatctggtacagagtgaatccatggtcacaatatatatatatatatatatatataacctaatgtttcacaaatccttttgtaacagtctcacaagtgtaacattactcttcactataccttttgggctcggagctgctggaaggtatgattctggtggaacttagctttcatggaagatgcttactctgtctcttttgaattgaagcagtgcatcatctgactattcttacaaaaaaacagcacacgagtggcaaatgaactgggcgctgggaaccctgacggagctcgatccgcggtccgcgtggtgctgtccatggcggggatcgacgcggttatcgtgagcggaactctcctagctgcacggcgcctcgtgggcttggcgtacagcagcgaggaggaggtcatatcttcggtcgccgccatggttcctctggtctgcatcactgtcataactgactgtctacaaggagttctctcaggtttgttatattatctatatctaaaacattacaaaaagcaattacaacataatcgcagtcctctgatctgcatcactgtgataactgactgtctaccacctctgtcgtctcttttcatcaggcgtcgcccgcggttgcgggtggcagcacctgggcgcgtatgtgaaccttggctcgttctacctgctggggatcccgatggcgatcctcctcggctttgtgctgcacatggggtcgagggggctctggatgggcatcgtctgcggctccctgtcgcagaccacgctcatgtccgccatcacattcttcaccgactggcccaagatggtacgttcatttctccaatacatcagcaaggctgtaggctgcacacaatttgttatagcagcaaagatgaacaaataatcgagtcatcttcgaagacttgcattgtgtgtctctctcataggtgcattgcgcttgttgtgttcgcaggctgagaaggccagggagagggtgttcagcgacaaggcacatgagtctgccgggccatgaatccatgatgtgtacccgagtagcggcagctctacatttccagaccggttttgcaggggaaggcgtttgcctgtcattcctgtcagctgttgcactcacgaagggaggtgatcaggccactagtaggaaaagagtacaaccccgacgcctcttttttatactacaggcggttgtagttatcacgcgcctgtggtgtaaaaagggcggtgtcagaactacgaaccgtgtatgaagatgcattttcacgggcggtaactgaaccggtagaaatcatgcatttctacaggcggttgtcctaaggaaccgccactaaaaatcatatttctacagacggtttttctaacaaaaccgtctgtagaatctgtagaaatcatgtatttctacagacggttctcctaagaaaccgcctgtaaaaatcttatttctacaggcggtttgttaagaaagccgcctctagaaataatttgaaatttaaattttttagttttttaaatgacctt

SEQ ID NO: 3765 - DNA, 4128 bp, Sorghum bicolor
tggtatgttgagaatacaatagggattacccgtcttgtttcataaaaaagaacacagtagcgttcgatcctttctccaaaatctaagggatgagctcgtccattccttgcatcgtcaacaagggagagcaacaagcaaagtgtgcctgtgaaatatgtggccgcaacatgggagaggtcctcgggttgggctctaggggctatacctgtaaagggtgcggttcgaacctctctcaaacacgaaccgctcctgaaatctatcaacggttcgagtcggaccgaacccaaatgatagaggggcagatagggtcgtgactcgctaaacctaggattgaaccgaaccttcacgtcgacctccgccgcctccggttctcaagttcgtgctgccaccacactcgtccaatagcccaaaatgttgtatgcatacaacaccatcctgcacggcttctccgcaggccaaacgcacaacagctccacggttgccggcgtagccgtcccagacaccagcctattcacaattcgccatgggcgcaaccgtcatgctcggcgatggcaagaactacacagacgtctcactctactccgggaagccgctccctagcaccctaatccccatcgtgtacgcggccaaggcctccaactccaccgtgggggatcctgtgcatgcctgggaccctcaccgcctcacgccggagaaggtggccggcaagctcgtgctgcctatctcgatgcagtacctgttgcgctcgctctcggcgacgatggccttgatctccctgagcgcggcagccacctggcggcccctgccatgtcggccctcatcgagtggcgctgtggcacagtaggagtcaagcggcgggagcggcgtgggtaagcgctcgatcgggtgcgtgctcggtacggcgacacaacgtgttgttggcatggcgtccatcttggtgggtgccagcacacggcgtgcgactgggcaggtggcgtggccgttggcgaagatagatacggaagcgtaacatcaattgcgaactcgaagcaccacggatcgtaatatcagaagaaaaaagacgggcgggtcgatcctaaccctcgtttaaacataaggggagcacaggttaggatgtaggggcgctccgctccaccccccttccagcttgactaggggcaaagtaggcagttaaacagatttaatatgatttgtgagctctcgggttgatgatgtagggagctccaagtttgtatcatgctacaagtttttatttgaacatttttgctgcattggctcgacggcagagtttataatgtcggaaaaaacaggctgtgcgctagacacactcggcggaccactgtgtaggacttgttggcttgttgctgttgccgtttgctaaccttattacttattagtactagttttttttaccgtgctaataacgctgtcactgaaacagtgaaaaagtgtaaagaacattagccacgtaagaccccacgtcatccggaggcccaatgggtgtgtcctacgtgtcacgccccgcagccactcgtttgccgcacgctcacgtgggctcatctcccgtgcaaaacaacagatccgggcagctttggtcccaggcaccagcggctgctcctccccatgctgcataattgcacgctccgatctactgctccggtcccaaacaccgcgcaccacccatagcaaccagcgcaagtcccgccccaacctcgcccaccagccagcggtgtccacgtacctagaactgcaacggggcacataccgctccggctcatatgatcccgcaacgtcgccatcgcctgtggtggctgaactgaagccaaaacaaaaaaaaatatccagcgggaaaatatcgtccaagaaaatccgggccacgcgctgcgattggctgcggaggctccacgctggcggccgggcccacccccttatcctatctccgtggcgctcctcgctcctcggcccgggtataagtaccgccggcgagctcgccgccactcaccgcctccgaacagagtcacttcgccacagacagcagcgcatctcgatcgctgtcgtcgcccagctcaactcggctccagcctccccgcatcggccatggcccttcaggcggcgctcctcccttccactctctccgtccccaagaagggcagcctcgccgccgcggtgaaggacacggcattcctcagcgtcccccagaaggtcagtcacagtcagttgctgcattgctcacttgcacttgcacaatgtgcttgaacacatcgttgacaattgacatgattcttgtcgtgagcatgaatgcagaagctgcaggcggcgtcgctgtcggtgaggacgcaggtggcgacggcgcctgtggccacgccggggtcgagcacggcgaccaaggacgggaagaagacggtgcggcagggcgtggtggtgatcacgggcgcgtcgtcgggtctgggccttgcggcggccaaggcgctggcggagaccggcaagtggcacgtggtgatggcctgccgcgacttcctcaagacggcgaaggcggccaagggcgccggcatggcggacggcagctacaccatcatgcacctggacctggcctccctcgacagcgtgcggcagttcgtcgacaacttccgccgtgccgggatgccgctcgactcgctcgtctgcaacgccgccatctaccggcccacggcgcggacgccgacgttcacggcggacgggtacgagatgagcgtcggcgtcaaccacctgggccacttcctcctggcgcgcctgctcctcgacgacctgcagaggtccgactacccgtcccgccgcctcatcatcctcggttccatcaccggcaacaccaacacgctggccgggaacatcccgcccaaggccgggctgggcgacctccgcggcctcgcgggcgggctgcgcggccagaacggttccgccatgatcgacggctccgagagcttcgacggcgccaaggcgtacaaggacagcaagatctgcaacatgctcacgatgcaggagctgcaccggcggtaccacgaggacacgggcatcacgttcgcgtcgctctacccgggctgcatcgccaccacggggctgttccgcgagcacatcccgctcttccggctgctcttcccgccgttccagaagttcatcaccaaggggttcgtgtcggaggcggagtccggcaagaggctggcgcaggtcgtcagcgaccccagcctcaccaagtcgggggtgtactggagctggaacaaggactcggcgtcgttcgagaaccagctgtcgcaggaggccagcgacccggagaaggccaggaagctctgggagatcagcgagaagctcgtcgggcttgcctgagcttgccggaacggcgacggcgacacgacgcttggtggaggtggagtcgcctgcgtgcgctgtgaacgctcgtcgtcacggggtgatgtgatgactctctcgagcagaggagctttaaattgcttcgttgtttgatgtgtaccattagcaaccattttgttttttttttgttaggagctggtaatgaccgtaagagaagagcctgtaattgttcgatcatgcattgtgtacaatttttttttacaaaccatgaaataaacacaacaggcttaaaatatctctgtgtgtttttttcaacaaggcatgcttgagctttttagcttgatatgccaattattcagcaatgtttttctcttacaacaaatcagcgaacaatactttcttcaatgacttatcagcaaaacgaatagagtgttatctaagaggcaaagtaccttaaagaaggcagaggaagaaaaatgcaatcttatattttccaactaggcaataaaattagaaatggcccattttttagattgaatacattaattgttgcttctgcataaaattaggaatagcaagcgatcgctgggccagtcaatcgggcggtgcgctttgcatcctgccagctagagtttgaaccccttcagggacggatttgttggccggaggaagcacactttatctgcaaatcttctcatctgctccacgccaaagcacaggtctaatgttgtcttaaccctatagtttgagttttctttttataaaattaggaataaaactattcattct

SEQ ID NO: 3766 - DNA, 3015 bp, Sorghum bicolor
ctacgatcttgtttgaatgtagtcgaattcacattaattcatatgtgttgaggtgagttagagtagaacttgaactaaattccacctcaatccactccaacacatgtggattgagcacaacatccaaacaaggcctacagaaaatgtaactgtcctgcggcctgcagcagcccaaaatggatgaatagggcaagctgttaggtgttagccgtacccgtacgtcagtggtgagtcggcacaaccgcccaggttttttttacttcgtcagtcgtcactcactcactcccacggacacacaccacatacacaaaaatagaaactatatatatagactatatatatagacaaacagttgtagcaaaattggtacttaaaaggccatttcacgttaaattgatcacatgggatcgatgtcaaccattttcagaaagaaaagtaacttatacaactagcataactctctagtgtgtacaaaaaagtgtcattctgattctgctctctatagtaaaattatcttaatttatactttttctatatattagatgcctgttttttttgttgtttttagaccacatacaattttgtcattgttttttttttgcgagacccatcaattctagacgcagacgctcacaaacatgagtatacactcacccatatgaacgtaggcacgcacaccctacctctatgagcatatcgaagaactgagttggaccggcaaaactcgagattgatgaaatcaccgcagactcctcgttgtctaccactgaaagcacccgtgttaagggctgtttgggactgcttcacaaactctgctccacaaactccaccgtggagcagctccacaaaaaactggagtttgtggagtacctctttaggtgctctcacaactccactcttttttctcgaactgattgcgtggagctgaaaccgtttggctaaaaaacgtggagcggagctgaaaaacgtggagcagagtagtctcaaacgccccctaagtccgggagggacttgaatccggatagacaggttccaccataagaaagccaaccagctgatctacgatcagttcgcttatcattgttttttaattataccaattgaacgtgtaagatatgcttgaattttttttaaaaaaattaaccacttgatatataataacaactctctattttttaactatatttatatataaaataacactgttaatattactactaagaaaataaatttcacgatacattatcataaatattcatatatttttatataaattctattttcaggataaatagagtatatcaggtaagctgcctcaacagtacaaatcagttgtatgttgttgacgtacgtaaaaggaaataaaagaaaagaggacctagcactctagatatacttcaattgtttgctagataacggatgggtgaaaaagtgttccattccattccattccattccataggggtacacgtcagaactcagaaccaatcgtaggcagggtgctttcttatccaaaaccaacgaaaaccccggcccgcccttgcccaaaccaggcagcaactcgtcctagtcatcagccggtacggtgtggctgcctccccctttctcgttgccgctcgcaactggggaaggccgcaaccccctcggcccccggcacggcagcgcgcggctgcccccaccaccaccaccaccacggcaccaccagcgtggcagcgacgttgccttgcctgccgtcctggggcgtcctttgcctacttaacacgccgcgcattccgcaggcgagctcaagctggtgggattggccccgtctcggcggaacaagtgcacgcgaccggccgggcagcaggcattattatttcccgctagctgctgccaacaagagacggagacgacgacgacgacgacggcagccactgtaccaaggcgatcgagctcccgcgacctgtgtgtgcgccggcgggcggcccggtgttggccgattcgaattcgacctcgacgcgatggggttccacctgcttgcgttcgtggcggcgagggggctcatgcaggtgttcaacctctcggcgccgctcaacctgcggctgccgctcgcgcgccaccttcccgaggccttcgccgtcctgtgcgtcgtgctcgcctcgcacgccgcgtgggtcaacgacgccctggcgcgcggcgccgcctggagccacagcgggagccggggcggcgtcgacgagtacgtccgctacgccatgctcagcatctccgactgacgccgcactgatcgatgacggacgacgcgacgacgatcgagtggacgacggccaggcgcgtccgtcctttgctagcttaattagcttaggagatatgatctcttcctccccttgtaatacacactgctcgctcgtttggtttcttcttgctcgtagctagcatgatttttgatagcatcgaaaagattgggatcagggagattgttgtaacatgcaaccgtcgttgttggcgcaaatacaagtgaattttttgttcgactgatcgaaatctctcatcgggtcgaaattctgatggcctccatgagcagctagcaagctaagctagctcctctggtcgagaaagggcaacacatctaatcgcctctgacagggacgctgggaaacgacgatgcgcccagcgcccgtatgcatgtactcctccatgtacgataccacatggactgatggactgagaatcttgtgcaaatacccgatcttgcactgcaccttgcttgtgatctgtacacgcaatatatggacactgattaatcaattgaaacttagaatatagatctacaccatgtagtatttgtgagagaaaaaacaaaacacatgtattagtttttattatactgctgctggccccaggtgcaagcattgcatgtgagatgctgacttatccgttcggtgaaaattaaaagacgtgcatgcgtggctcccatctagagtagtgcaaatttaaaactgggacttctttacctcgttctctctccgagcctgc

SEQ ID NO: 3767 - DNA, 4450 bp, Sorghum bicolor
cactagtccagcaaacaaacacgccaaacctagatattggatcaacatagagcatgcaagaacacacacacacactcgcgcgcgaggaatgcagcaagcgacaacaaccaggaacggaagcgagaaaaaggtaacatgagtagtacccttgctgtcggcggtcgaggcggcggcaagcaggaacactggcagcagtagggcggccagcagcggccatgcgaacatcctttgcgcccccaatgtgtgtgggctggcaggggacagtttgggatctagcaggagctcctgcttgcgcgtgtgtgttgtgcgtgtgcgcgatctcggctaggagtgtgggagtggaaggagaactggagaaggggccatctcctccccacaaccacgcatctcctacccacagatatcctccaagccggccatctcctccccacggtcggccatctcctacccacatatgtcctccaagccggccatctcctcccaaaacccgcccttcccctccccgcagtagccaacaatggaaaccgcgcgaagccgagtctccgaatatcaaaaaatgagaaagccataaacatagacaaagggctctaaagcagacaatattaatgcttccatcctttatttgagatctctaaagcaatcatgtctaatttcttgcttgtcaacgagagggcgtccttgacttgctcatcacgctgcaatggggcctagaaacgtaaccaatatgctcctttgaaaataacttgcataatagagttagttttcattttattaaagataaagctgtccgatttaagggatgcacgttgagtgtgacgcaaaagaaaaagaagtgcaaaccaatctaaacctcactaatccactatacgtcctaactcgaactaaacaaaactattagggctatgtttagttccccatagaatacaaaatacaaaaatgccaactactttagagtgataaaatacaaaaggtcaaaattttcaaggtcatgtttagctccatttaaaatgtagaatttattgccttcatgagagccttttgaggctctttttggatttttttggtcttgagaccaaaatccaaatccaaaatgaagaaaataaccacttttttatcaaaaaaattacatcatgtttagttcaattattcaaaataatgtaccaaaatccaaaaaaataaaaataaaagaaggggaactaaacaccctctatatttgtttgcccatttctcaccgaactagctagtccaactgtccaaggtagaaaccaaacccggttttagcctacaccgtcagtaggtttagaccccgtttggtttgcctgttaaagtttatcgtccgtttcatcgaatgttggacacatgtatagagtattaaatataaactatttatgaaactaaaaacacagctggagagtaatttaagagacgaatcttttaaatctaattagtccataattaaatactaattacaagacaaaactgctatagacccgttaaaatttaacaccccaaacaaacaccccattagcacattgcagacgcttaagcagaaacgaacgcaaccaaaataataaaactttcatgtcatcgtgtagccacgcttccgcgccacgtcaaccgaatcacctatccgtagactgtagctcggatgggggtctcttcggtctccgccacaacaagcccacacaacacaaatcgtcaaccacctgctccgccgctcatttccttggaccttccggcgagccggcttgacgcttccccccaaccacgtcgccttcaatccgacgcaccaccaacccgaccccacccgtcattctcacgaaccgcacaaaagaaaaccccgcgcgcaaatatttttggccggatagataactcgtgcacgcaatagcttggccgcccccattttaccactccttgtctcactctccggccacgacgtcaagcacacctcctccactagccgccgggccgcgcgcaccaagcgctcccgggagccgggaatgccgacgccgaagatgctcaggcctcttcccctcttcgtcgtcgtcttcttgctggtccggtcgccggcggcggcggacggcggcgggaacgcgacgacggaatcgtgcccgctcgacctgagctacgtgcggacgttcccatgggaccctacgtcttgcgcgggggccgcgcccaacgtgaccgcctgctgccagacgctgctctccctgttcggcatcggcctcgccgagcgcctccgcgccacgggcaacttccgcctcccgtccgcggcggcctccacggcctgcgtcgagagcttcacggacaccgtctccgccgcgtcggcgggcctctcgggttcctccctggtgccggaatgcttcccggacccgagccagttcgccatcaccccgtcctactgcgccggcgtctccaccgcgacggagttcgcggccgccgtcgggaacgactccgtccaggccctcaactcctcctgcggccccgacctcgcctcgccggcgacctgcgcgctctgctacagcgccggcgtcgccgccaccgcgcatctcaccaccgccgcggccaacgacagcaagtcggaatcctgcttctacctctccgtcctctacgccgccggcatctccaactccgccggccccacctacccacccaccgccgcctgcgctcttggacttggcctcttgtcccctccccccacgtcctccaagtccagcaacgtggccgtctacgccaccaccatcccaatcgcattcgtgctcctcgcgtcgctcttcggcttctttctttggaggaggaagcgaacgcgtgccaatagcaagaagaagaaccacaagatctgcgaggaggggtccggggagcggcggtcgcacctgcggcccaacacagggtcgattctcttcgacattgtcgagctcgccaaggccacgggtggcttctccgagcgcaatctcgtcggtcgcggcgggttcggggccgtgtaccgcggcgtgctcgcggacgggtccgtggtcgccgtcaagaagatgctggacccggacatggagggcggggacgaggagttcaccaatgaggtggagatcatcagccatctcaggcatcggaatctggtgccgctccgcggctgctgcatcgccgacgaagacgtcgaggaagggaagcagagattcctcgtctacgacttcatgcccaacggcgcgctcgaggacttcatcttccatgacagggaaagggaggcggcggctacgaagcggcccccgttgacttgggcccagcggcggagcatcatcatggacgtcgcgaggggtctcgagtacctgcattacggcgtcaagccggcgatttaccacagggacatcaaggcgaccaacatcctgctggacggcgagatgcgcgcgcgcgtggcggacttcggcctcgcccggcggagccgcgaggggcagtcgcacctcacgacgcgcgtcgccgggacgcacggctacctggcgccggagtacgcgctgtacgggcagctgacggagaagagcgacgtctacagcttcggcgtgctgctgctcgagatcatgagcgggcggcgcgtgctggacatgtcggcgccagcggggcccgtgttgatcaccgactgggcgtggacgctcgtcaaggccgggcacgcgagggcggtgctcgacgaggcgctgtccaccgccgagagcccgcggagcggggtcatggaaaggttcgtgctggttggaatcctgtgcgcgcacgtgatggtggcgctccggccgaccatcggcgacgcagtgaggatgctggagggagacatggacgtgccagagctgcccgaccggccgctgccgtatgggcacagcgccatgttcagcgaagctgggagtaccttcagcatctcaccggccttcagtggtccgttgaccccgttcatcgacaatggggacatgctgaggtgatgaagcaggcaaaattcgtttgattcatcgcaaaaactagataagaattagatgggtgtacatagcagctctgtttgttgattgattgaaattcatcttttgtaatatatattcaattggcaaatgaacgacattcacatcgattttctgctactctgttttccatcgatcatcactaaccagaacagacatcaagcaagcatgggatacaagttaccattaattgcacatttcagtctccattaacgcaaagtcatcgtagtaataactgacagacaacatcgttcatccaggctgtcattgaaaagaaagatacacagctaacgctgaacgatggaatgcaggatagaagctgcaggtgggtgagaagcttcagttcagagaggcatgcacaacactatccagcaggctgtagctactcgtcttcctgcagattggggtggttgggctgcacccggaaggtgaacggcatttgggaagtgaattccctgtcatgctgg

SEQ ID NO: 3768 - DNA, 7107 bp, Sorghum bicolor
cacttgagctaatttttagctagctaataattagcccttgtatcaaacatgcttaatctagtcattagtaaaatagtttttttatatataaattttgctcagggacactgctcaaatgtttaatctgctgttggacgccgctaacatggaaatatgctcagtacacatcgtctcaggcgcatctgagaaatagagataagaagagactttgtaactaaatctccaggatttttttacgacttagttcttatttgaatgctatcggatccacttcaatccacatttgttaacttttactataatccaccacagcacattttaattggtgcaaatttgaccacattcatacaagaccttaggatataatagtctctctgttctttctaaagctcgtaggaatataacttttgggggggataatacacgtgatgtgagattgttcttcatgcaaccaaaagtaacgcctatcgtcaatttgtccgtctccttttctttttctttatgcatagtcctgggctcctggctctggctctggctccagcacccccgtctctggtccagctcaacttttatccacagagaagatcaacaacagttgggccgacgccgactgaaactcatttgaaggatgacatgaaacaggtccgggccccgtcccccgaacacagcaatcatacgatgacatttcgctgatgctcgctctctacagtcacaggagtaggagtagatagctagtccgttgtcagactagagtcaagcgttgaactcgcgtagcaccgggccctagttcagcgagacatgtgtcatgcatcagctaaacacgctgtagcgtgaagccgtgaaccgtggcgaaagtgacggtgggtgaggtggccggggcggccagggacgtcgtctggcctcaccatcaccctgggtgcgtgattggagcgagctctggtgaggtggaatgccgactgccgaggagccccgcccgctggcgcggcaagctcccccggcacgcacgtggcggggccgagaagcgcgacgcgatccatgtgtgcgactgcgtcagggacgtcggcagagtgcaaaatcaacactggtcggtcagagaacccaccgcccagagccgccaccgtcttcgccttctcgaggccgggaccgaagcggattcatcgattcctttctggttctagaatcgaggaggtcaagcccagggtagcgtacttgggccggttgcgtcgtgaggtgggaccgtaggtggtgcctcggtggctatcgaacccaactcggactacctgcctatataccagcgaagcgaccaggagaacgctgtcaaccaaacaaaaaggtttttttttttacaaactaaatacgaaagctttggcttgtcttttttacgaaaaatgcaaggatgcgaattgattaaccacgggttgcgctcgtaggaagtcggcacgtcgcatccggattccggaggacggcgacataccgcggttttctgttacgattgattgatgacgacggttttgccgcgggttaaatgggcggtagtcactgcccactgggcaggccgccttgagtatcctgtacccaccacgtccacttctaggccacttctcgtcttctctcgttttattttcttttattattttagtttagtttagttatactcgagacgaggagatccgtggaacagcggagacgacgcgtgcgttgcgtgggggtgagggagcccccgtcgccgcccgtcccccgcgacgtgcaccattcttcagcacacacacgggccaccggaagcgcaaagaaaacaaattacaaatgccccacccagggtcccattctacgccagctcagctcagctcagctcagatcttctcctcccgtcccgttgccgcgtgcgtgacgcggtgacggtgcggcagcaccactccgtcgatccagccgagatccggcttccggcgccatttttatataatctcgcccccgcctgatccgatcggatcgggcttccccctctcctctcacgccttcgctgccttttctacccacgcgtctctcgccagtcgccatcaccatcatcatcgtcaatcacggcgacctcgctctcgctgcccgactggaaccggtaatctaatggctaatgccctccattaaccctctcgctatcctctaaccagtggtgcttaagcaaaaaaaaaaggctctgctactgctgcggcctcgctcagatccgccccgcttcgctccccacccttcccccctgctggccgttgctctgcatctgctgctctcctcggccgggaaaaaggtaggggcaggcagccgttgcgcggttgccggttggctggcgccgctgaccttccgttcgtttcgcggttgcgtggcctcgatctgccgcgcggcatcttttacttgtccctagtgtatgtagtgtactgtcctgtttgttgctcatgctcttccgcttttccgcgggcgtgcgattgttccgcttccgcaggacgctgctgctaggctgacagcggcgaggaggaggaggagacgagggagccatggctcagatcctgctccacggcacgctccacgccaccatcttcgaggccgagtcgctctccaacccgcaccgcgccagcggcggtgcccccaagttcatccgcaaggtactcctctcctcaatctcgggacccctttctccctcccttcctgtctcccaacgatctcttccattccaccacgcccgacccgacttgggcatgctggcgtccaacagccgcgcaaactcgtgatgatgagtgatgtggttagtagagaggcagcgaatggttcatgaatgatggcactgcctgcctccagaatactagtctctctactgttgattgcttcatcatcaacagccatgctactgttttaattttgctcaagagagcgctcaagcactagtccccttcgatcagtctgccgtaatctcgtttctaaaagtatgcctaccagattcgtctcttctgctaacacgacctgttcgtttcgtttcgacagcttgtggaagggatcgaggataccgtgggtgtcggcaagggcagcaccaagatatatgctaccattgatttggagaaggcccgcgtcgggcgtacacgtatgatctccaacgagcccatcaatcctcgttggtacgagtccttccacatctactgcgcgcacatggccgccgacgtcatcttcaccgtcaagatcgacaaccccattggggcgtctctcatcgggagggcctacttgcctgtcacggacctcctggacggagaggagatcgacaagtggcttgaaatctgtgatgagaaccgcgagcctattggagacagcaagatccatgtgaagcttcagtactttgatgttttcaaggaccgcaattgggcgaggggtgttcggagcaccaagtaccctggtgttccttacaccttcttctcgcagaggcagggctgcaaggttactctgtaccaggacgctcatgtccccgacaatttcgttcctaagatcccgcttgctgatggcaagaactatgagccacacaggtgctgggaggatatctttgatgccataagcaaggcccagcatttgatttacatcactggctggtccgtgtacaccgagatcaccttggttagggacaccaacagaccgaaacctggtggtgacgttactcttggggagttgctcaagaggaaggccagtgaaggtgtccgggtcaatatgctagtgtgggatgataggacttcagttggtttgcttaagaaggatggcttgatggctacccatgatgaggagactgcaaattacttccatgacacagaagtcaactgtgttctgtgccctcgcaaccctgatgattctggcagctttgttcaggatctgcagatatcaactatgttcacacaccatcagaagatagtagtagttgaccatgagctgccaaacgagggctcccagcaaagaaggatagtcagcttcattggtggcattgacctttgtgatggaaggtatgatactcagtaccactccttgtttaggacacttgacagtgtccatcatgatgacttccaccagccaaactttgagggtggatcaatcaagaaaggtggtccaagagagccatggcatgatatccattcacggctggaagggcctattgcttgggatgttctttacaactttgagcagagatggaggaagcagggtggcaaggacctccttgtacgtctcagggatctttctgacatcattattcccccttctcctgtgatgttcccggaggacagagaaacatggaatgttcagctcttcagatccattgatggtggtgctgcttttgggttccctgagactcctgaggaagctgcaagagctggccttgtgagtggaaaggatcaaatcatcgatcggagtatccaggatgcatacataaatgccatccgaagggcgaagaacttcatctacattgagaatcagtacttccttggaagttcatatggctggaaggccgaaggcatcaagccggaagaaattggtgctcttcacttgattccgaaggagctctcattgaagattgtcagcaagattgaagctggggaacggtttactgtttatgttgtggtgccaatgtggcctgagggtgttccagaaagtgcttctgttcaggcaatccttgactggcaaaggagaacaatggatatgatgtacactgacatcacacaagctctccaagccaagggaattgaagcaaatcccaaggaatatctcactttcttctgcttaggtaaccgcgaggtgaagcaggagggagaatatgaacctgaggaacacccagaacctgacactgattacatccgggctcaagaggctaggaggtttatgatctatgttcataccaaaatgatgataggtaatgaatcagttctactttgccctcgtattgcactatatttcacttttaagtttactgaattttttagcgcagttaagtttactgatatatatggaatatatgttttatatgttcacatctagaacatgtttcctttagctacaaagcatgcatttctgctttaactgtgtattggaagcaagggatcactttaagttagaagtataattattttagagagcagcagaatcaacttaaagcataaagtatatcaggaagaaattgtcctgtgctactataatcctgcttcaaagatttcttgctcttttggattgaaaccaaagggtatagttagtttctcttgatagcaaagcattgggcactgcttaaattgttttcttttcttggctttagaggtgttagattttctgttcatgatagtaacatctatttatccatgcattacactataaatgccagtagtttttttaataggccacacatcttttgtttttcaagatttagaagcatggttgatgttgtgaaacttacttctgatgtgcatttttttaacgcaacttctgatgtgcatatgtttggagcaacatgtttttttagttaaaagcgtaactatactggacaggaaaggcatcaatataaagcaacaaatattatggggaagaactgtcttgtgctcatataattctaccttttaaaaggatttaacactcttttcaaatgagtaaaaataattcaaggtatacagttactatttgtagcaaaatgttgaacggctgaatcctgcttgaattccctctcttgcttggcttgaaaggcgtccatttgttgatggagatggtaacatttttttgtttgatttcagtggacgatgagtacatcatcattgggtctgccaacatcaaccagaggtccatggacggtgccagggactctgaaatcgccatgggcgcataccagccgtaccacctggcgaccaggcagcctgcccgtggccagatccacggcttccggatgtctctgtggtacgagcacctgggaatgctggatgatgtcttccagcgccctgagagtgtggagtgtgtgcagaaggtgaacaggatcgccgagaagtattgggatctatactcgagcgacgacctggagcaggatctcccaggccacctcctcatgtacccaatcggtgtcactgccgacggcaccgttactgagcttccggggatggagaacttccctgacacccgtgcccgtgtcctcggcaacaagtcggattaccttccacccatcctcaccacatagagtgcagactgcaggtagcgccgtggctcctctcctgtctggcctcaactttggtgtccctgtgtttgtgttcgagacactgaaggttcagatagcagtgttgttattatagtttttattgagtgataataagtgcattgtgcatgatgggacgataggagttagagttgtttattactactaagtactggatccagattgtgttgtccccttgtctggtatagctcgtgtagcttgctacgttgcggtgctgtttgtaagaggtgacttcagagttcaggacttaaacacgattgcttgttcaagtgtgtgctgctaaatgtcaatgtgttgctactacaacaatatggataatctcgcatctatctataaagacctttaaacgtggtgaaaatctcctgttgctcaacagatcccatgccatgtcttccactcccaatctgccatcagtcaggtgcaccctcagcataacaaccgaaaatgacagctttaatttttcagtcttgtttacagcaaggagatttatggctaatctcaacatacaagtttgatcatgcacctgaccactaggaccctccaaaaaaaatctatcttctttctgcttcttttgctatagcttgaaatgagcagtattcgtatcaccctctaagatgttcatatccctgaatccttgtctggccttaatctcctctagagtctatgaccttactagcctagaggctgtttggtccatgttacttttctttgtctcagttaagccactactctcccccataacatatagcttcctatactgttctattagctcattcttttgctacttattcatggccgctatctcattctccgcccaccatctaactattctcctaaggttctgatcccaaact

SEQ ID NO: 3769 - DNA, 4135 bp, Sorghum bicolor
actaaagtcgccaacaaggcaagcatattctcaaatctcaacatcaactaattccaaccaaagggctggatgcccttctaataatgtcagcaaagatttctataacttattagtttttaaatcacatcacagcaccacaaacacgtactgactgaacttatcaagtggtgactttttttctttttgaaatttaagtggtgactttttgagagcggggatttaacggcagggggcagctctgtgggcatgcttcagcggggggagatgaaatcgaattcggaggggagatgaaccgaataattgaaggttggagcaaacgtcagtcgcttttggcagcgacggttttggcgtgttccacgccagctcatccaccatgctgagcgctttcgttctactgcctgcctgtccccttcccctgttcttgtgtgcacgccgtacataaacagggggacagaaaaaaaaaaagcacaatcacaaacaaagagacgtttgatcttatagatacagttgtacagctaagttccttgctcttttatcaatttttttttctaataacaaactaaactctcgactgaaggtttaaatattctagctgctcaccgtcaaagttttagagatcggaaatatgcaatgcaactagggccttatttagttcacctcaaaaccaaaaaatttcaagattctctgtcacatcaaatcttgcggcacatgcatggagcactaaatataaacaaaaataaaaactaattgcacagtttacctataaatcgcaagatgaatcttttaagtctagttactccatgattgaacaatgtttgtcaaataaaaacgaaagtattatagtcccgaaaactaaaaaaatttcggaactaaacaaggcctaggtgaagtgcctgacaacagatcttgctgcttccaggacgaggcttttacatgattcttttggggtaagtttatgtaaatggcctagagtcgaaatcgaaacgcctcaaatccacactgcatactaaatgaaccacacattagcaacaacctacttacatttttatcctcgattcacgtgaaaggatgatgatttggagtctagaagccttagccatgttggtctaaatcaccatcaatagccaaggtgagattaaacctccacaacctcataaataatatacgggtcaccgttagttcataattagacactaattctcagttctcacagcacaatggatatatttacttaaatgctgaatgaagggattttagaaacatctttggaagacgggtcattagaagccacgggtgtatgattagagggtgtttggtcgaagaagttaaaatttaatagatattgtaacgttttgttttatttgataattattgtttaatcataagctaattaagcttagaaggttcgtctcgcaaattactctctagctgtatttttagttttataaataatttatatttagtactctatatatgtgtctaaatatttgatgtgatggaagttaaagtttaaccttccaaaccaaacagagctcatatgcacaacagttaaaactgcaagccaaagagtacatgggacaaaatatatgtcaaatagaaaactttgataacatcgtcatgggtctacaagcatagccaatgctgaaggtactgctccgtgctcacagatgcaaacaactgtcgccccgtgatttgtcagtctgccactgataatttgccccgcatgccttggccccacgtgtcatcgaccttgctcatggcacttataaaaatcactaaaatattctgacacgtagagtgcaaacgccactgaacccaaaaaaccgacgtcataaataaaccttatatatataaaagtttttccaaagcaaaaaccttataaacaatcccttatataataccgaaacattagatcgtaaatccatatataaagattaatataattcaattcatcggcatcacttcgctggtgagggatggtatccactgattagattccgatggacggcgcagatcccccgattccctcccctccgtctccctccttttttaaccaccccacacggctccagactccagagcctgagctgagccactcgccccccttgccactccggattcccccctccgctcccaaagaagacggcgagaccaaaccgccgccgccgtcgctaccctaccaccgggagatccgtccgtccgaggtgaccatgtctacgcggaagcgtcccaggaacaacaacggctccacctccacgccggcgtcgtccgcggggcggagcggcggcggcggctcgacgacgtcgtcgtcctcgtcctcgtccgcgatgcgtcggacgacgagcctgtcggacctcgcgccacctccggagattccaggtaggccccagacgcgggcggcgaggggagatgcggtggtggcgggggcgggcaccgtgtgggtgggtgccgagatgatgaggaggcactcgggggacttcctcccagccatggagacggcagccttcctcaaggcctgcggcctctgcaagcgccgcctcggccctggccgtgacaccttcatctacatgtgcgtaagcaagcctctgctttttccttgctcggatttgcatatgtaggctctgccaatgtttctgctgttggtcgaatctttcagcctgtcgatctgctgcttgttctttccctctccaagattgctgcagcgcaactgctttctgatgatcctggcatagggggtcgtattgatcttggtgcgtcttggacgcaagatatttttggatgatctggcttccttttagttttagagaaactatatatagtcatatctctggctctctgctctctgtttctctgaaaaaagaacgagatacaaaatttgatctcatttcattgccccctgactctggaatattctgcgagattatcgcgttagattctctatttctttgctgttgcaaatgcttggtgatgcatggcgatgattctatactcactcatgctcggtttgaacggggtgaagtggacagaacgaaaatgaaaggaacaagttgattgtttgaggagaaaacaagagccagctgccctttgggttgctggagaatcacagatgcacttttgtaataacaatatctcttgtccattgctttcctcctctttatatgtgtgaaagagaattccttttgtgctgagatacatacagaaatgaaaaacacgctaatgtttccctttccgagtggttcagctcctgagcaagtggcgttgtttagttgtgttcatgggatgtgaatgggtctccaacatagttcctgtccaacactcaagatctgcctcctgttttgtcagcacaaagattgttattaactgctacttagttagttagcaaaatacaagtgcctctcgtccagctcagacacaaacttcttgtgtaaccaaccatcattttggattaaactttctgtgtttgcgcatgcaggggtgaggtggccttctgcagtcaggagtgtaggcagcagcagatgaacctggacgagctcatggagaagaagtgctccactccggctggcggcagcggcggcggtggcggcggtggcagctcagatcagtccggcaaaagcagcaccgttgcggccgcctagcatcgatcgtcagaggggtaataaacaaagaaaattttaatttggaaccctggtatatacagggcccaaatgcattagtttcagaccatctcagcctatgtatatcctatatttttctggagtcactgtgtgtatattggtgggtagggaagggaagggaagggaaggatgtagagattgaaactggggagcatgcttaagttttgcaatgcatctgtgcctgtgggggtgtttgtcttgagcacaaggggctgtgttaaatcctggtgcaaagtagggagttaggatctggacctgtttatgtttttgtttttcctaaaggaagaacataagttcttcatactgttgccgaatcattctctcttgaatgatttttttttaaatattttcgtggaagtttttgttttaggaacactgagcttgaaaaaaagatttaccctatatataagagcagtttttgtctcattacaggacttcggcaaatcccatgggaagctaag

SEQ ID NO: 3770 - DNA, 4900 bp, Sorghum bicolor
ataacttatacatataacttactacatgataaagttatacacgtaacttttatctataatattttatggaacaagtttatcaacataatttatgacgagacaatttagcgaacgttcaaaaaagttacaattaaaactaaagcatataatttaattaaaccaattttaacatataagttaataactgcaagttaagcacaaaatataataaatcaaatagttttgcaaaaagttagacataaaagataataattataagttaatatctactagttacatgtagaaagttagatataaaagttacgtgcagaaagttaataattacaaattctatggttaaaatttacatatagcattttaaaataaatgttttacttttttatgacatcagcggtggttatggaaaagcacgctagaagaggaggtagtttgaacctttgttacatcaaatctaagtgaacgatcgtccaaataaaataagggttgacaacatatataaaaagaaaaaattgatagacttatataaaaaataaaaagagaaaaaaatgcaaaagaaaaattaaaaaaatgttttataacttttgtgcttcaaagttttgacataagttgtaagttatatggtataagtcatatggtgataagttttgcaaagtattctaatttatagaaataagttatattctataacatatatgtataacttagttaacttctaaaaatggaaagttgcggaaattatcatttctaaataagaaaagttgcgggagtagctgatggttggttcgttggattcgttaccggtgaacgatcgtggaattggatttggggtacaccgacctctgatcgtgcttttttggctctagagtaggtgcttcctgaggcgaggatctccgattccattcctctcatacttgtacagttgtactatagaccttgtattgtacagtatggttgtgtatcacaccgattgaccgatgatttaatttaggtcctctccggcacaaaacagagtcgccatccgtctgcgtctgcagctcgcagaggtgtggatcgacgcgcgcgacggctgccgtcgccgaacgccaacgccacccgggagggccgatcgagagaatggaaacggccttgagcgttgcaggtccgtagcacaccacatgcacgtcggcacatcgctgctctgcacccgggagggccgatcaaaagacacttaattacatattatttatggtattttgctgatgtggtagcatatttattgaagaaagaggtagaaaaaataagactccaagtcttatttagactacaagtccacattgttcgaggtaatatataactttagactctatcatagagtctgcattgtgagtgtcctaaacaagacctaaacagggcctctagtacctggagcagagcggcagaggcagagccatggggctcatcatcagtgctccggtacgtccgcaccgtctggtctggcacgcggcacatgcccgggggacacgcgcgccacgacctcacgtccaccaataaatggtttgtcggcttcccaacgccaccgacacgcaagttcctctggacctttcctttctcgccacaaatcctccgcctccgcaacgtcgccgcgccgagtggagtacaaaaaacaaaacgcttttaccactggggtggcgttggagagcggagtggaggccagctggtcgccgcggatgaaaaaaccagatgtccgtccgtcggtttgcgtgccactgtaggtcactgtgccccgctgccgcttgacagaagcgcgcggcctcccctttcttcgcacacgttgctgtcggcagcctcaccaatctcggcgccacatcggacggcgagtggactagtggtcgccggttcttcctcctgctgctccgcctgctttcactcctttctccgtcgccttccccttccagggctacccacaagtgccaagtgctcgtgtccggatgcgccagcgccgcctggtcaacacattttttgccctgcgctgtcactccacgcgcgacgcagctgctgcttctactgaaggaaagcttttttcccagaataaaggctctctgtctgtctcagtgagaggaggaggcggaggcggcggcggcggccaaggagagagagggagagggagatgaagacccggagctcagcgagaggggagccgaggcggctcgggaatgcggctctcctggcgctcatgctctgctccgtcgtcgcgctctccctcatccgggggaggttcgccccaattggtaggtaccttctgccatcttccacctccactttcttatctcggctgcatctgtactctgcgcggtcggaatcctcgctgttgtgagctgatttgggaggtcctgcttcttccgctgcccgcctgtacctgactgcagttaccaccgcaggagacgccatcaaatccgaggacgacgctgctgcagcggcggtggcggtcagcaaggcggctgctgtcaacgttgacaccggcgacggcgccgacgaggccgccgctgaagctgctgctggtaggttacctccgccgttgcttttttgggttccctcctcgatttggataagattagttaggatttggagctggtaggttactcactttgtgttcgtgcagatctgctcacctgctccttcctgcttactagctccaccttccatttctttagattcagcttgatttttctagaagaaatcgtcgtgttaattaaatgtagtgcggcattccgctacgtgattgcgcatcagatctgaaccttaattgggatttcgccggccctgcagaggagaaagacaaggaggaggtccagccgaagccagccgccgacggttcccgcggcggcgcagccaagccggtgtgctacgagacgagccgccgctccgacacctgcgaggcggctggcgacgtgcgcgtgttggggagctcccagacggtgtacgtcgactcgctggaccgggagtggaagaccaagccgtactgccggaagcacgacaacttcgcgctcgcccacgtcaaggagtggtccctcaagccgctcccctccggcgctgcgccgcagtgcacggtgaacagctcggccaccgcgttcgtgctctccacgggcggcttcacgggcaacccgttccacgactacacggacgtgctgatcccggccttcatcacggcgcacccgctccgcggcgaggtccagttcctggtcagcagctacaagtcgtggtggatgaaccgctacatccagatcttccagcagatgagccggcacgaggtggtggacatcgacgccgacgacgaggtccgctgctaccggaacgtggtggtggggccgacgttccaccgtgagctcggcgtggacgcgtccaagtccccgtcgccggggtactccacggccgacttccgcaagatgctgcgcgacgcgttcgggctggagcgcgccacggccacgcccagcggcgaccggtgggacatccggcgccggccgcggctgctcatcatctcgcgccgcccgtcccgcgggcgcgccttcatgaacgagcgcgccatggcggacatggcggcgagcctcgggttcgacgtgcggatcggggagcccgacagcagcaccgacacgtccaagttcgcgcggctggtgaactcgtgcgacgtgatggtgggcgtccacggcgccgggctcaccaacatggtgttcctgccggccggcgccgtggtggtgcaggtggtgccgtacgggcggctggagtggctggcccggaacacgttcgcggagccgtcggcggggatggaggtccactacctggagtacgtggtgcagctggacgagacgacgctgagcgagcagtacccgagcgatcacccggtgctgagggaccccatggccatccacaagcaggggtggaacgcgctcaagaccacgtacctggacaagcagaacgtgcgcccgcacctgggccgcctcaagaacaccttcctacaggcgctcaagatgctgccgcacggccgggacgattgaagaatcgaattagttgatcatttgacctggacctcggcctcagttatttattagagggtaaatgtataggttaatggtaattactactattttttggcttatttttgtttttctctctttatttgtttgtacgagtaagaagagggtgcgctagtagcagcagccagcaagcagtagtgctgctgtgaatgggtgcacagttcgcaggacaaagaacttagtgtttaactgtttatattttatcgttatatatgctgctttgatagcatgaaacgtgattacagttatgtgctttcacttaggacttgtttgaatgtgtatgtatttatctcaatttatatgtgttaaagtagattagaatgaatttaaattaaggtcttgtttggtacagctcaacttcattaataaagttattttttagaaaataacttaatgtctaaacgaagctaagctatttttttaaaaaaaatatttggtaaaatagctttaccaactacttattgcatagacggaagaaagaaatgagggagagagctgtagtaagctattttttcagcttcatcctactcttgtttttgtgagatgagaagaaaaaaaacagcttcacccattgaactgttttggaaacaagtatttgacaaaaaaaaaatagttcacaacaatttatgaagctattgtgagccgtatcaaatagggcttaagttagtttcactagaatccaatccaacgcttatgatttgaagaagatacatgttcatccaaataagaccttattagttttctgccattcaagttttatgtaaaacaatgatattcagaagttctacatgatagagagtgccctaagctggccttcaagcttaggacgccgt

SEQ ID NO: 3771 - DNA, 7103 bp, Sorghum bicolor
aagaaaatatattttcataatatatatattacgagatttataaagtattaattattaagcttgttcagctgcactcatttgcaactactactggttgtcgctcagcgctgcaaaataaacacaatcgaatagggcctttgtctaaaaagtttgattactaaaaaaaaagaaaaacgaaatacgcagttattttgggcgtacgctaacgtcaaaaaaagttggcaccgcaccgcacgcacagcgtcgtgacagcgagagttgttggcgtccgatccggcgaaggcgatggcgcgacgacggctagctggcctcgatcgcttggctacgcacggcggcacgtcgtacgtgtcgtcggcctggtggatccggacctccgcaacgcagccatgcaaacctgtcgtgccatacacatggcctgcggaccgccgctccgctgatcgaaagggagaggagagagagagagccagtactctgtactcctatgaaaaagcgcccaatggagcggaccgccgagcgtacagcgggcgtacatgatgcgcatgctcctatatactagccgtagccgagaaggcgggcgtgcagcaaccagcgagcatccatcgctgtcgtcggctcgtcgcggtgccccgtactcccgtcccatgatcgggccgtccccacaggcccacaacccgtctcacctgcggcgatggacagcggcagcagcggtgtgggtgtgcggccgggcgggcctcgccgtcccgtccggactcggagtgcgcggtgtgctgccgcgcgcagcggaggaaggattccatcggcgcggcttgggcttggacgcgtcgcggcggacaaaaacgccccggccccgccgagatcaggggccgccgatggcgtgctgtgtgatttctgcgcgaagctgcgagagccacaggtcgcgtggcgcccgtggcccgcccgccacgtggtgtctgctctcgtctcgtctctgctgtgtgggccgtgggtgaccgcctcgatccggccgtcgtccggtcggttcaagggcgttttgctacgcccgcgccggctgccggtgccgaacagatcactcatggagggccggcgccggcgggcagcgtgtccgatcgaggcatggacactgcaggcagccttcagccggatatttatgtctattcatggcgcagaacaagctcctgacactttacaggccagcttggactagcaagactgcagaggctgctacccactcgaacacgaacgccgccgcaccagagtagggcgcgtggcgcagcataggccaccaccagaaaccgacagcagcagcagctcgagtcatggcgcatgggcattggccggccttgtgccatgccaaaaaccttggcctgtgtggctgtgtgcagtgcacgacaacaacgggaggcgaggcgagtcgagtcgatttgcgacagataaacccaggaagagaatggaggatgcaacttcccttctccttcaaagtgcaacatactactgggatcgcctcgtgcctccagcggctgaggtgatttcgggccgtcaattcagccggcccggtccagcccagtttgaggcaggtatagacggggggcaccactttcaacccaacgctcgcctctgttctctggtctgcatctgcacccttcattcatgtcggcctgcagctacacctgttgtttcatcgtcagtatacaaaaacgtgttgtttttaataaaatgaccatttgttgaaaattgctaaaatggctatttattgaaaatttaatttagaacgtgtttttaataaaaaaaatatcagcactagtttttttttctaataaaataataatacatggacgaaaacctccaaaaacgctccatgccctttataaaccgacgaagagcccccgcttcaccctttgctgtattctccccgttcaccccgcgtgcgctctttctcgcgcgcgtgcgacaacgacaacgacaaagctaccgccgggcgacgagcacgcacaggtatacacgcgccgcttgtccgcttctctacccttcctgctgtgcgaaacagagctaccgaaccctaacttaaactgcttggctatctgcatttggatctgatctaattacaagtgtatgcatgcctactaactttcatttttttatatatttttttgggaaaaaaatgattgggtgtacatgtatacaccagtgtccttactaggtccgccccccctgatttgatccattgcggcggcggagtccacgatgtcgaaggcgggagccctggatcttgcatctggcctcggagggaagatcaacaaggaggaagtcaaatcggcagtcgatgagtatgtatctgaatctcatcactcacagtcacagctcttcgtgtccgccatgatgtttgttctgtggatattgtgaggctcccgatgatgtttgggagtaaacgaacctgaggagttgactgtacttcacgccatatataattgcagctgctttctgttctctggacctacatttccaagcatcaatgttgtactagttcgcttgcgcaattgcctttgtatgtctaaaatgaaataaccgaatccttctgtttttattatgttttgtgggatagatttttttaagatgattttcagttctttttttagatgtgggctttctgaatcaagaaccgtgtgctttgtgtcacagctcaccaactagtacttgatgtcatatgcccttgacctgtacacgacgtacgggcttgttacctattctcatgtttagtggttggactaataaatgtgcatctgaggttgtatggccaggatgtcactatctttctcctagtctagtactggccatgcaaactgtttcattcattttttttaagataagggaatttccagcctctacgactgtttcatactgtggaaactgtagagcgcaatgttatcatcttagcttatcttctggcagagtgttagctcaacttagatctccacatgtcaggttaagttgtcaacctgtcctttcatgcagtagataccattaaggagcatcaagataattcatctttcacctttggatgaaacatactgtagaatctgctgaatggaactagcatcctggttcatatcatattcattccctttcgaagaaatatccatccagtagttgtgtttactttactctgattttatttaaaattgttttacaaggtatgagaaatatcatggatattatggagggaaggaggaagcaagaaagtccaactacactgatatggtaataagacctttcaaagagatcttttgctttttttatatataaaatttgatgccctttattctagttgtactgtagcttggtaattaaactgttaactaaaggtctgcgagcttgtagttctactcaactagattcctttgaggatagatgttattccttaaataatgtgaagtattggcagaacacattctcaatattaacagatccatggtgctgaaactgttttttgttccgcatgaccttaagatgaatgataagcattggagtgagactatgagaggctatttatatttcataacatttctatactggagataagataaatatgagcaactgattttttttcctgatttgttaggttaacaaatattatgatcttgccactagcttctatgagtatggttggggtgaatccttccactttgctcacaggtgagaagtccttgcagaacctctcttgcagaaaaattatattgttgaccttgacttttcagaatgaataagtgttttagcgcctactctaaaaatggaaacataggttatgcttaccaatggtccatggtaattgaactatgcttattatgttagatggaatggagaatccttgcgtgaaagcatcaagcgtcatgagcattttcttgccctgcagcttggcttgaaaccaggaatgaaggtcagttctcctattgaaatctatctgtgaattgttttttctgttcttgcatgactagagcatgtgtgctttcctttttttaactgtaggttttggatgtgggctgcggaataggtggaccgctgagagagattgcaagatttaggtctgattgtcaagttaaagttctttaatgctggtagattgtgatgtccttggttatagccttttaacaaactgaccaatgtattagaattgattaatatttatcagttaaaagtcaacacttgtggtcaatttgctttagagcattgccttctttcttttcagtatcgattcattttctgttaaaaccgcacggctaactgaatcatgcaaatggtttcatgcagctcaacttcagttactggattgaataacaatgaataccagataaccaggggaaaggttatttgaaaccacatttttaaactaacacctttcattgatgcactcgttatcatgctgctcttatgctaacatgacactctgatgttcaggagctcaatcggttggcaggagttagtggaacctgtgattttgtcaaggtatagttggcctatcgactaggccacattgctttcttggtttagatcctgtatgcacttactactcttttgtttgctacccttgtatgtatccttttgcaattgctttgctgttgaaaataataaagtaactagtgagctttttctgcaaaactgcaaatcttattatgctaacagacagttctatgcattttgcatggctgtataaagaagttgcaaggttgatgcttttagatggagcttagacatttttccatgttcgtctgtataagtgaagatgctgttcttttttaacagaaggttacttgttgaattacagttagctaaagggcaatgttcatatttctctgtaatacaggcagacttcatgaagatgccatttgatgataacacttttgatgctgtttatgcaattgaggcaacatgtcatgcacctgatccggtacgatttgaactgttaatcaaattgtcatttctgtagtaagatttatcatcaatcttgatatgtttttctaatggaaaactaaatttgtatttttgttacaaaggttggctgctataaggagatataccgtgtgttgaagcccggtcagtgctttgctgtatatgagtggtgcattactgatcactatgatccaaacaacgcaacccataaaaggatcaaggatgaaattgagcttggcaatggcctaccagatatcagaagcactaggcaatgtcttcaggcagtcaaagatgcaggttttgaggtaagatagactatgttccccctttttatgatcatgttctttgcatttcacataggggtaaatacactattgacaaagcaatatactactgttctttttttctttctttcagattgataaattgtagttttatagcttatccatgtaggtatgtaagtcgttttcttcatgcaggttgcttgggataaggatctagctgaggattcccccttgccctggtacttgcctttggatccgagccgattttccttgaatagtttccgtttgacgtctgtgggacgcatgattactcgcactatggtgaggccagtaaatagtttattttacttttagatactttatttgttacttgtactatctgatttgttcttataacgttcaaataagttatcattctctatgtttggatgacaactgacatttaggggatagtaaaggcttttctgaatgaatgggcatttgagtctcttgttgatatttttcaggtcaaggcattggaatacattggtcttgccccacaaggcagtgagagggtctccaatttcctagagaaggctgcagaaggtcttgtagagggtgggaagtaagtctgttttttctgaaccagaaagcagaatcgactatcctctacattttcattgtatcattccgattgtttacttactgttgtataaataactacaggaaggagatcttcacaccaatgtacttctttcttgctcggaagcctctttcagaataagttcttgagaacgtttcaggtagcaaataattttgtagatttccaaatccttgttttcgtcgttctgtggtcagtctctcagttgtagtcttgtggattttcagacagagcaatgaggcattttgaagaagccaggggtgtggggagttggggcctccaatcaagaaaatcctgttctttgttgtatgaagaaaattaggaaaaagtgctgaatgttaagcttttcgattgttcagttgtttggttgtgtgaggttgtcgtccagcattcggtcctagaggggttgactgtgctgtttactagtgcggcccaacccctctccgtcgtaagcacaggccgctcaagccctcacagttcatgggaagctgctttggcgggccagcgtacgatgctttgtgggcctgggtctaattctttcctctcctggtagttgcctataagctagatcattgttcttttcttcatgttctcatgtaagcagcactttttttctcatctagattttatgatttattttcaattgtgtaatggtcttgtggtgatgctattaaattatcctattccaaattttgaattgttttgtaatatctttttgtttaattttggtccaagagcataatcagattgcgtattcaccatctccggttctcaaccgtgtacatgaacaagtgtttgccctaatgttgcatgagtaatgttcttagtctaagggattatccgtgttagaactagggctatttatgattgctgtttatatagagcatgcctctagtgctcgctacaaactagggtcttcattgggtttcgaccgctctggtttggtaggattctctctatagctttgactctttgagaagcattgtcaaacagtttcgttttaggagttgtctcctccaaaacagttctaattcctccggaaaagcccttggggaggagctctaccaagcaaagcctagtagtgtttggctgtttgctagtcaaaccccatcatttttgcgatcactcaataaaactgctaaattcttgtgaaccttaatactaaaccctagcccccattctataggcctaacttcagagctctcgctgcttgaaatgatacatgtttgtcttaaaat

SEQ ID NO: 3772 - DNA, 4277 bp, Sorghum bicolor
gtatattatgaaatcattgcatttttcgaaaaacatagcatcattttttcctttattcgatttttcataaaagcgcatttcactctggttcagggctgggttcaaattgggtctgatagtggtaaaggggacgaccatcagaaatgaaaataaatcaaaagtgtacagctcattacttgttatccacctatgtatcactatcacaaatacttacggtacccctagtactaataatgatacaattgcaattaataaatcgatttagcatctcaattcatcttgtttcttgaagggatggggcatctaagatgatagtttaacaactatttagtccctttcgtatatatgcaaatgccacacactcataatgcagaatcttgtatagcttacttgtctagctatttaatccattgctcaaaggtggccaacatttttcatgtcatatcgacaactcatgcaaacctcgatcctgtgtcaatatgaaatgacagaagcataaatactgtgcaatcaacattaacaagatgccatgttaggcccagagcacaaaactactatcctgttgacaattaaggtaaattgtagtctatttgccctataatgataggcttcgtataatgattgcatttcttcttagggaaagcataagcttagtgcttatctgatcatcatgaaatccaccacaactgctaatagtatgtaactcttgatgagaacggaagaaacagtagttatgtcaaaaaggatgtgaaacaaaacacaggagctttcgtgtcatacaccatgtttgacaagaggggcaacaattccctaaagttaattaagaatccagtgtgttccgtatattatgctttgtgctgctttaacagtaggcgtacattgctgtaagataaatcgtagtaatatatatgatccgagcttctcaagtaagacatcaccatgtggaatgcgcttgcttgaacattagctcaacttgcagctgtaataaacgctcgttggatgggaatttgcattaagaggactaaccaaagaaagtatagacaagcaattatataccgtattgtagctcatcagcaccgcaacttacatatgcagtctatatttattcaaaccagggatcggaggcacagttgtacgcacgttctagaagatatgtctgccgtcctagaagatatgcatatgtctgaattactgagacatcattaataacccatgcatagatatgctatacgtcctcgctctcaactgttctcccagctaaatccttcaaatgacattatcataatcctctcagctataccattgttctcgttttctacatagctgctttacatgcatgcagtgcagaatccaatgccatgacccattataagagaaaagtatgagaacaagagaatgtcatgttgggaattggagtcacgtctttgatgtcaccatgaattaaacgtaaaagcaataatattgtgcctaaaggtacactaccaccttgtggcttacttctgcttgagacaattagaactctacactctctgctagcctagctcagtagcgcatgccaatcgtgcttgatgggacctaggtcaaaagtgagcgaactttatatgttatatgcataaaatgggtccagatttagagaataaacggcatggccagaagattttattcaccaatactagacaagagagcaaatggtctttgcctccactagccctaaattaaatgatggagaaggagcctcaaaacttcttgcaagagccacccaaatcacttattattttccaaagcagattccagaacctctggagaaataaggacactttagtttggtctctttggtagagacgaagatgtctcttgatcatcatctatcgatctctctataaataggcctcttcccttccatcatcctctcacagtacaaaccacattcgagctcttatatcctaaccaagctcaacaagcactaccactccttttgcccaaatcataccatgttcaatatgtctagggacccattggtcgtcgggcatgtcgtgggggatattgtggatccattcatcacaactgcatcactgagggtgttctacaacaataaggagatgacaaatggttctgaccttaagccatctcaagtgatgaatgagccaagggtccacatcagtgggcgtgacatgaggactctctacacacttgtaagagtgtgattgtcattgcatcttattgttggttaatacttgtttcttgtgaagataatctgtagattcatggtttctccttttatttggctcaagtttcatatcttagctataaatctatactattagtgtacctagttgatatatatatctttaagtatcttctacatccgtgatgatagtaaaagacaaaaagcaaagaatatgttttcttgtgaactctcatcaagcttttttgtatgcatgtctttaggctgataatactaactgaccttgcaattttcgatcatacaacgactaatgatcatcctttactaaatattgatctcagtgtctttatgtaatttctctatgcatattatctacctatatatatacacactcgtgtaacaatgcaaagaaaatgcactaatgcatcaaagagaatatgtcaattggagagacctgattccatatagtatatctagattggctaacctagttcatgtgtcaatccatcatcgttttgctaggtcatggtggacccagatgcaccaagccccagtaaccccactaaaagagagaaccttcactggtaagctctctctctcttgcaactttgtccatgcatgccgccgggtggtaatccactggcactttccatgttcactttatatgcacgccatgcgtggcatgcgctcctgttgttgattactagagtttaataatatcaccttcgttcatgccgtactgattggttagttctcaatgtcccgcacaggttggtgacagacattccagagacaactgatgccagtttcggtaagtgatttgacccacactttgcattgtctgaatatagcctgtgacttatgctcatgttcactaatatttcattttcggcgccatcatcaaaagaatgtcttctagatttctttgccacgcccaaattaattataaccattttaactgtagcattaaaagggagaagacaaactctaaattgaaatttaaacgtgggaaagaatcattctgtcaactccatatactctgggatggtaaaagataaagcttgggaaacattttcatgtcacatcacatgctcactggattcgttgttcacaagaactttaagaaaatcatatctgcttcacattaatttcggctttaaaactttttaaccattaaatgtcgaccaaacaaatttccatatacagaaaaaagaaatcaatctcattacaagatattctgttttcatatgatgtcaaggcaaactacaactccacattaaaactaaagatggacgaaaagcatgcactgttaataaatatgtagatattccagttcaataaagttgatattgtatgtaacagggaatgaaatagttccatatgagagcccacgtccaactgccggaatccatcgctttgcattcgtcttgttcaggcagtcagtcaggcagaccacctatgcgccggggtggagatcaaactttaacacaagggacttcgcagccatctacaaccttggctcccctgtcgctgcagtgtacttcaactgccagagagagaacggctgtggtggaagaaggtacataaggtgatatatatatagacgaagctgtgtcataatacaacgtagttgtgtgtttacgtctctctgaaggcagaaaagatatatagcggcagcaaactggggtacaagtacaccctagctaaatgaaaaatatatgctttgtgtttgcatgattgttggtgagcattgtaagtacgatgttcacaataataaaagctattattctagacattatcacaagttacaacagctctgatgtaatgctatcatattacttcattggcctagcttaatttctattaatcacaagaagtatagctggggcactatattaattggaaaaatgggcacggtttgagatacatatttctggtggaaattgtgaaattaaatatgtactttcaaatcgttacaaggaagacaagagacaagagatcatttctaccggtgaagatctatatctgttatgttccgtgtaactgcaatcatataagatatgtaaaggtttccagtcaattcaaagaccta

SEQ ID NO: 3773 - DNA, 6012 bp, Sorghum bicolor
catactctccaattttaatggcaaatggacactactgacaaccattattcctattcgatttgctcacacgatatacatgagctgactttttgattaacttgaggcacaatctcagtgtcaacccttacactcaagtgaccaagataatagaacgaaggaatagttaagttaaaaaataaaattatttcaattgtttcatgtacatattttttgctctacgtacaagttgaatgttatattgcgcatagtagcatacctcctagtttatatattgaacttctaataaccatatgcaagttgctgctttacaataaccatatgcttgttatgaacatatatcaattactgtactgcaccaagatttgaaagtatatgtaacttcaatcgccatggctttagtcggctaactcacttggttttagggttgtggctggccggggatggccactaggcgggcagggctcgctgctgctacgcggctgaggacttgccagggctacagccgcctgctcctaggaaacgcagacactgcatgcgctgctaacaaatttacctagtggtggatagcagaggggacgcgcttatcaacgacagcttaagttcgtgttcggctttgtcctacttcaaggggtcacgacccttggcacaaccagtggtggacgccctgcctagcctccagggcaagggcgaggtgcgaggacgagctagggcgaggtgacaggatgggcgaggtgcgagggcagacactaggattgggggagtgaggatttttctatactttgatgcgggacatgaagggaaagacagatgccacggagaggtcaagatttttcttgtgtagaagcaattttatatcagaaatcctttgtttttctttgtttcttttcgcacactttcacctccatggttatatattatttctctcttaagtatttgcatcaggatttcattcttattctatatttctttccgcacacttccacctgctgcatgttgggttggttgatgcggtttggaacggagaggctgaagcgacctaaaaaaaatatcgcaccattcggtggtcttacttttattattttaaattttaggagattatttagagtttttaagtgtatttaatattaccaatatgtctattatcattctagggatgacagcttagtgtatagtgatgttaattaagaaatatgaaccgtcactttctgtttcgtctaacatcatttatttagcatgccagtaccactgtggataatattgaacaccaacacgttatctcccgccctctcccacgtccctggtaaggtgtaccaccagatcacaacaccgttgcacatatacacgaatcgtttccgcaacaccacagatcgtgcaattcagactgctgctatacctgtaataacttccatgtcccatccgtttaattaagcaatgcaatccccatgtagtaagacttccgttcgacacgaagacaacgcaatgcgtgtagatcaacaattacgtactccttgtgttctcttttgtccgacactcaagaagaatccacgtgcactcatcaaacttaatttcaaagttccacaccactgctaataatatcttaaaaaatattaatctgaataaggttacttcaaatgctacaatgatcacgcggttacattagaatacacctattgatttagttatttcaacattcaaatgttaggtttggggaccgtgcggttagttatgcacttaggtactacgaaccaacatacctaagcacgcgcacattattgatgtgaattgaatccaagtagcgaaatggaaacagcaacgcattacttgcatgcttaacctgcgattcccctttatggctactaataataggcaaagcttatagtgcatcacacgcaaacaccagtgagcgacatgaggctcagctcgctcctgttgacccagctggtgtactatttaagcacagtcccgccacccctggcctctcactgactcacgtatttcatatggacgataatgcatctattcgccaccacactactccctcctccacataccatcgcagaaaccccgtcatggcagcgcatgtttcagtgctcctcctggtgccggcgttgctgatgagagtggcagtggccggagcaccgccgttctcgtgcggcccgtcgtcgccgtcgaaggggttaccgttctgcaacatgaagctccccgcgtcacagcgtgcggcggacctggtgtcgcggatgacgcccgccgagaaggcgtcccagcttggggatatcgccaacggggtgccgcgacttggcgtcccctcgtacaagtggtggaacgaggccctgcacggggtggccatctccggcaaggggatccacatgaaccagggcgtacgctcggccaccagctttccgcaggtgctgcacaccgccgcgtccttcaacgacaacctctggttccgcatcggccaggtacgcgatgtgtgacgacggcgcaggacatcatgggcatgacgcactcatgagtcatgacggtacgcgtgccagcattgtcatgggacgtcgtcatccatatccatagtgccatttagtcaccgcgcatgcatgccatttgtttttgatttgctttcgatacgtgatttataatagtggcgcattatggctgccctcttaaccatgttttaactctgatagtaattaggctgaatgatatatatatataatgctgtcaaaagcaacaccatctgttagtgtcgacttaagatcggcacaactaatatgcttgtgaactactctttggtatgagttgttctccaagagtttgcataattaaagttactcagcatgtcatcaccaagagtgcgttgcaagcatgcatccatatgtgtttgttgcgcacaaacactaaaataaaataattaattttccggccacgtgaactgacatgagtgtggatcgacgacgtacgcgtacgcaggcgaccggcaaggaggctcgggcattctacaacatcggacaggcggaggggctcaccatgtggtccccgaacgtgaacatcttccgggacccgcggtggggccgcggccaggagacccccggcgaggaccccgcggtggccagccggtacggcgccgccttcgtccggggcttgcagggcagcagcagcaacaccaaatccgtgccgccggtgctgcagacctcggcttgctgcaagcacgccacggcatatgacctggaggactggaagggagtgtcgcggtacagcttcaaggccaccgtgacgatccaggacctggcggacaccttcaacccgccgttccggagctgtgtggtcgatggaaaggccagctgcgtcatgtgcgcctacacgatcgtcaatggcgtgccgtcgtgcgccaatggcgacctgctcaccaagaccttcaggggcagctggggactcgacgggtgagttgtctcgatcggccgttgttgttgctcacaataactgccttacatttcgcggcgaggacggagctcgttcaagtccaccgagttctttctcgtctcatctcatggtccttttttgcctgatgaaggtatgtcgccgcggactgcgacgcggtggccatcatgcgtaactcacagttctatcgcccgacagcggaggacaccgtcgcggccacgctcaaagccggtatatcgtcctctcgtatgatgcaactctttctctagggcctcttagaccttgtttagttccacgcaaaaaacgtttcaccaatcacattaaatcttttgacacatgtatagagtatcaaatgtaaaaaaaatagaaattaattgcacagtttacgtgtaaattgcgagacccatattttaaaccgagataattgaacactagttgtcaaataaaacaaaaatgctatagatagctaaatctaaaaacttttttttttgaaataaacaagctcttaatttgagttcgccccacctatgcaaattaacgctttctaatgactaatgactagtaaatggcaatcactgatcgagttcattttaattggatccccacggacaacttgtaggattggacatagactgtggtccatacatccagcagtacgccatggccgcgatccagaaggggaagctgacgcagcaggacgtagacaaggccgtcaagaacctcctcaccacccgcatgcggctgggccacttcgacggcgaccccaagaccaacgtgtacggcaacctcggagccggccacatctgcacggcggagcacaagaacctagcgctcgaggcggcgctggacggcatcgtcttactcaagaacagcgcgggcgtcctcccgcttaaacgagggacggtcaactctgccgccgtcatcggccacaacgccaacgacgttctcgctctcctcggcaactattggggcccaccgtgcgcgccgaccacgcctctccaggggatccagggctacgtgaagaacgtcaagttcctggccgggtgcaacaaggcggcctgcaacgtcgccgcgacgccccaggcgaccgcgctggcgagctcgtcggatgccgtgatcctgttcatgggactgagccaggagcaggagagcgaagggaaggacaggacgacacttctccttccgggtaaccagcagagcttgatcaacgccgtcgccaacgcagcgaagcggccagtgatcttggtgcttctcactggcggcccggtggacatcacattcgcccaggcgaaccccaagatcggcgccatcctgtgggccggctaccctggccaggctggcggcctcgccattgcaaaagtcctgttcggcgagaagaaccccagtgggaagctgccgaacacgtggtacccggaggagttcacgaggatccccatgacggacatgcggatgcgcgccgcgggcagctaccctggccggacttaccggttctacaatggcaagaccatctataagttcggctacggcctcagctactccaagttctctcaccgtgtagtcaccgggcgcaagaacccggcgcacaacacgagcctactcgccgccggcctcgcagcgatgaccgaggacaacttgagctaccatgtcgagcacatcggcgacgtcgtgtgcgatcagctcaaattcttggcagtggtcaaggtgcagaaccacgggccaatcgacgggaagcacacggcgctcatgttcctccggtggcccagcgcgaccgacggccgaccaacgaggcagctgatcgggttccagagccagcacatcaaggcaggggagaaggcgaacctgaggtttgaggtgagcccgtgtgagcatttcagcagggtgaggcaggacggcagaaaggtgatcgataaagggtcacatttcctcaaggttggcaagcatgagctggagattagttttggggcatgagtttttcttttctttttggaaaataagagtatatgggtcttatgtttcctagtgtgatttatcactttgtttattattctactggcacgtaaaatgaatttatttgtaggttaccatgaaaatccccgataaaacatgctcaccgtcttagcctacaacatctccaaccatgcactactacacatacatactatacaggcggttgagagcatatttgtataggcgtttctcagcgccgactgcgctgggggcttatacaaatgggacagtaccacaggcggttcacggagaaccgcctgtggtaattgtttccactaggaggcggctcacttagtgaactgcttgtgtatacacaggagtgagccgcctatggtaattaattaccacagacggtaattaattatcacagacggttcaattaatataaatatttggttttatttttgtattattaatatttagtattatttttatattattatgaataactatatatatatattgatattggaactactattggatgattgtgttcacatatagcatcatgcaattttaaatactttatatatatatatatatatttaaatacataaaaagtttggtgctcac

SEQ ID NO: 3774 - DNA, 3556 bp, Sorghum bicolor
atataatttattctgaaaagacgtatgtacatgtgcacatgtatacattgcttaaaccataagcaaacatgcacgcgtatgtgcttttaccaaaggaaaaaaaaacgtgctagtcatatacaatatatgtggcaccgacgaccccagtctggtcacacccagaccgtatatatgtcgttttgttgagcatcggaacaggttgattaataacatatatgcctgcatttgtataggcataaacctgatcttttggatttttttcctaactttttttgtttcctaattgtatttggcggattagcctttttctcattttcaataaaattccagtaggggttttaaacctcttctgtttcataaaaaaaaaacatatatgcatgcatattgtgcgtggcctggatatagattttgtacgatttgataaacttaccaccactaccggcctcttgctgtttgtatgtgagatttgcttttaactactgtttctaagaacaaagtgggaaataaagtactgcaccatgatatatgcacgacatgctatattttatttacgtctacggacgacgagaaacgtgcccccaaccagttattaccagtgtattgaacagcttgaattgacgtggaaaagtatatatcagcttgtctgtacgtatatattgtcatgccgatatttagcttttaactatttattaataccaaataaatgatcctaagagtcacaccattaggtttatactttggtcgtggaaactattcataatgtgcaaatctttatacgtcgtcaaatgattaataaacattgctctagtcaaaatacattgtgattattttgagagctgagaccatgcatgtcagtgtttgtctgaccacaaatgtatgactcgtaaggctaatcctaataagtcaaaatttattttgttgtttgcaagagcgcgacattagcaaaaataatcaattcatgcttggaaaaaccttaaatgctggtttcattttttgtgttttgcatgttcttgttctatttagttattccttgcgtctcaaaaaataagtgatgttttaggtgagtcaaataattttaaatttaatcaagtttatatgaaagaacattaatatttatgacatcgtaatatagaataaaaatatatttcataataaatttaatgatactttattggtatgaaaaacattaacatttttatataaattttgttaataacttaaaatggtttgacttaggataaacttaaaatatcacttattttaggacggagtatgagacattttaagacagaacaggtaagtgggctaactaccacaagacataacccaagtgcaaagtaccaccaatagtatcacctaaaaccgcttatgtgttaccctcttaagtgagaacaaaactcctattggggtaaaataatactacgtccggttaaaacttatgatttttagccctgttccaagcagtggcgaatctagccgaaaacatcgttggggtcatcggggtcaacttcactatatgatataaattttcttatgttcaaacagtattttacaaaggattttacaaatttcgccggggtcagctgaccccgataaaccaccctagattcgcccctggttccaagtcaaatattctttttgccatcaatttctacatattcatatagtttattaacatgtatattacatactacggaaatatttctcatggtgaatgtaaaagtgtagatcttatgattgttttatcatacttgtagcccactaacaaattaagcacttgattgtcgtggcttcgtgctttggtcttttaagtatatcttttactcctaacaaatattgtgttttatttaaaatcagtgtgtcttactacgtgagagcaacttaacaatactactcatcatcaagtggggtattttgagctccctccactatatataccagtcccaggtgggttgaaatgcctcgtcctcgtccatctatcaacactacacacaggcaggccgcaggcttccttgccttctgtagtgagtatagtgactagctagttcgttagatggatccttgtcaccaatccatagagaccgcaggcgcgaaggactacagtgacccacccccagcaccattggtcaacgccggcgagctgggcaagtggtccctctaccgcgccgccatcgccgagttcgtcgccacgttgctcttcgtctacgtcacgctggccaccgtcatcgggcacaagcgccaggccgagtcccagccgtgcggcagcgtcggcgtgctgggcatcgcgtggtccttcggcggcatgatcttcgtgctcgtctactgcaccgcgggcatctccggcggccacatcaacccggcggtcaccttcggccttctgctggcgcgcaaggtgtcgcttgtgcgcgccgcgctctacgtggtggcgcagtgcctgggcgccatgtgtggcgctggcctcgtcaaggccttccacggggcccattggtaccttcactacggcggcggcgccaacgagctctccgccggctactccaagggagccggtctggccgccgagatcgtgggcaccttcgtcctcgtctacaccgtgttctcggccaccgaccccaagcgcaaggtcagggattcgcacgtcccggtcctagcgccgctgcccatcggattcgcggtgttcatggtgcacctggccaccatccccgtcaccggcacgggcatcaacccggcaaggagcctggggccggccgttgtgtacaaccagcgaaaggcgtgggaagatcagtggatattctgggtcggccccctcattggcgctgccgccgccatgatctaccaccagttagttctccgcgccggcgcagccaaggccttggcatccttacgcaacaactaccatatctgatgatctcatccatatatcttattgtcgtcgttcgaccaccggtcggcacgagatgttctaggcgtgcatgcattccgtgtctccagcgtttgcatcgtgtgtccattccgatttcaccggcctgcatttcaagcttcaactattcgtttactgtttattgtgctgatttaggtccagtgcaaacactttgcctatttgtataattcatctcatgtctaaggttatttgtttatatattcatatataaataatactcctcgcaaaaattccgtttcatcaccgtagcacaaacattttacaaacaaaactgaacaaagccaaaatttcgtttgtctttgtacagtcctgacatgattaagctctagcttgctctaaaatcagcccgatatcttgtaatccttcatccgtaggtccttccacacgcgttaacactactgacccctattgcactcggcaaaagtttcttggccgagtgccacctaacgaacactcggaaaagcctttgccgagtcccatgtcagcacccggcaaagcttttgccaagtgccacatcagcattcggcaaaaaaaatccgccgtcaactgtgacagcttctttgagtgtccaatgtgtgccactcggcatgagtgccagttttttgcactcgacgaaga

SEQ ID NO: 3775 - DNA, 2912 bp, Sorghum bicolor
gattacatgcttcatactctaccatttataatgtcattgtttatattcaaataggttgacttctaatctgctatgaagcccacatcaaaagtacccatacccataaataaaatatatgttaacaattactactgttagttgcacaaaaaaaaaaaaaaaaaatcaaagttagtaggcatgaatctggatgcaactacctttcaatctctacgtacatgagaaatctacagttcctactctaaacaatggatctgacagtcaagactgctcaccttgcttcaaccggagctcgagctgggaccggggataggggccattggggccgatgggatgtctggagtccggaccgctgggcgccgacgggtggccatcgagtggttgctgcgggcacggcgctggccgttgggttggagcactgcctcgcagccgcgcatggccgagacggcaagtagtaggtggaaggagcactggaggaggctgccatcgtcgtggtgctccaccagctgctgcagccccgccgcttccgtccgcagtccgtggttcctcgcgctgctaataggtgcgcgagctgcgaaccagtcagcgagagacagagatctgggctccaggcctcgagccgccggagggacccacgccgaggctccatccgcgtttgagagacagagagttgcggctaagggagaaggaaatgagggagacggacgcaggggttatcgattatagaaaatcaattctcaaaattttgaaacttgtacacaacagtatgtatgtagcctatttgatgtaaaaaaaagtttggagtataaaagacatttttaaaggttgcttcacaagttgctttctctatatacatgccgcccacataaatgatcatatgtagagatgtgtaggttttaggctcttgatgttgtaatttattcgaaaccttcttaatttgttatcatagcctctacattcgataacatgacaccaaacaagttttgtgattttcgaacttcgtttaaattttatataatttaaaaacacttttcctacaagttgttcctcatgttacgacaacaaggtgtcttgtcctagcactcgagaaaggacctcttccccgagggccaagcaagacaccaaggaagtttttttttcgttttttagttgtaacgacgccggtgggttgggccgtcatgtaacacttttcttccgcgaatgctccgagtattgtactcggggaagagggcctttgccgagtgccgctcttttccgagtgacaggtactctgcggcactcggaaaaacctgtttttccgagtgcaaatctttttcgagtgcaacactcggggaagattggccacccgagtgactggttttttgcactatgggaagcctgcgatactcgagaaatttttcctctcccgtagtgaatgcgtgatacttagatcactagtcactttggtcaactatccctttctctgctcttagccttaggaacttcgaagtagtcacttcttgcttttgatctcttctatttattcaagagtttctaagaaccgctccaaatgcagtattaggaagcaccgcttggtcctaaagaaaagtcttgaattagatcataaatatccaggttaatgtggcatattacttttttgtcgattctgtttttttcagtgtggccatggttggttatggctgtgtgttcgtgtttggattgggctctctgcctaactctttgtatttgtgttgtttcttatcttgaaatgacaagtagctcaatggtggctccagttccggtctacagtacttgtttcatttttgttcctttgctgcaataatttgaaaatatggcatgttttgactttattttagacgagtggtcgtcagctaaataaattggctgctgcgtttcaattttcaattcaacaggcaacaccgcaacagccaccgctgagactgagacaccaaaaatacaagccgactcttgttgccgtgtcttgtttgtactgtcatgcagtgcccgcccaaccctatacccacaactcgcggggatggaatctggacacgtacctggagcaggagctggaccgcctcctgcgcctctgggaaaccccgcacgaccgccgtggtgaattcctctgtgcccacgcctcgtcgattagggtcgtggtcaccggcggcgacgcggaccttatcgacgcggctccagatcatcgcgtgctaggccgtcggcttcgaccgcgtcgacctcaccaggtgccgcgagcacgggttccgggtcactaacacccctgacgtgctcaccgacgacgtcgcggaccttgccgtgggactcgccatcgccgctctccgcaggatcccacacgccgacagctacgttcgcgccggcctgtggaaggccaaccatggctactatggtctcaccactcgggtttgttttaatttcttctattctattcgatcactgtcctgtccatgctacgattgctcaaaaacactccgttttttattaaatttgctggcgaacactacatttaatcaaacattattacaaaatagatataaaattatataagtgctagaaaattatactataaatttttttaactccacaactatagtgtaaaaatattattttgcactgaaatgaccattttgcccctcttcaacactgtaacattttcgtttgtatttgacaaatattgtccaattatgaattaactaggctcaaaagattagtctcgtccattccaaccaaactgtgcaattagtttttattttcatctatatttaatactccatacacacgtctaaagattcgatgtgacgggggatgtaacaaattttgcaaaattttctgggaaagccttatactggagaaaactctttcagttgccgtcagccattgcattcaattttagtttagccgct

SEQ ID NO: 3776 - DNA, 2749 bp, Sorghum bicolor
cttcatccgatccgggcaaattaccaaagcatttgacggttgacacattgcaatataaaggactagtcaaaaaaattctagataggaagtgggtcggtctcaaaataaatgagttgttagttgtagaatattattctcgccagacttgaacttaacgaaaaaaggaaaggttcatagaatttttttccccttcccctttccccgaactaaatcgacctaaggctattaattcgtattttcccgttcacctagcagaaatagattaaccctaggatccttttttcttttttgttatttcctagatgtgtattttacataccacagtaatttgctatagagaatttctattaattaaaggcattattgttggaataaattgttatttaatttgatacattgtgatcgctaacattgatgaattaagagaaacggaaagagagggattcgaaccctcggtaaacaaaagtctacatagcagttccaatgctacgccttgaaccgctcggccatctctcctacataatcttattatggaaaataaactgagtgaatagcgagttttcgtattcctgcagtacaggtacagccacaacggctcgggaattccatggctctattggattggatggaaaaattccttttcatctaagtggaaggatccagtatttttttactaggaattccgcttcctcgaaaagtttttctttggggaaaacaaaaataaaaagagaatggaagaattcttcttattccataagaaaataaaggaaccctagaattctatttgcataaggtacattacgccatacaatctaaatataaaaggggtatggggcaattaattactttgaaaacgcgaaatagctgatgagagaagttgttgttgagaaataggaaagtggaatgaaatccagtcttagtcaaatatttcatatctcttcttgtccaaacagaaggaaaaggagacaatttgagctgagcggaaaatccatacctctcttatccattccatttagagcatatggatcgatttataagaatcgagtgttttgtttttatgttattttgtgatagaatgaaaagaattctatatagaatgggttgggaattatgcctagatcccgtataaatggaaatttcattgataagacctcctcgattgtagccaatattttattgcaaataattccgacaacctccggggaaaaaagggcatttacttattatagagatggtgcgatttgactcttttttttattttagccctacctatatctcattcttacgagaaagagagagggttcgcatagagagaacaaaattagtaaaggaaacccgcgcttggggaaggtgaggtgaactaacaattccttctgtcgtgtatcctcgattgatgtggcctcagatgcttcaattgtagatttgagtattgagcgaaaggttacacctacaggataggttctgtattacaggccaatccgactctactagtaccaataggcagcataggggagaaaagcactacaccacgaaataggaatcaacaagagaaaaactttgttagaaattagccctttcctgattggtatcagggttgggaagaatggttgggataacaaacaaccatcaggtttgtactttggatacccttataaccatcaaaggtcgttgaagtggctaattcctctaaataggaggcgttgagaacaaagaaattcttggagctatcgttttcctctagcattaatataattcattggtgttaagaaaaacctcttgggggaaggttggctagagatttcttggaaaaataccagcccccttcggtccataatgagatgggactaattctatttttattctatagatttttcgcttagtactaggtatagaagggagaagccatatgagagtatagaagggagaagccgtatgagatgaaaacctcatgtacggttttggaacggagattttttgaatagaatgaacgaccgtaacggatgttggctcaatccgaaggaaattatgcggaagctttgcagaattattatgaagctacgcgactagaaattgatccctatgatcgaagttatatactatataacataggccttatacacacaagcaatggagagcatacaaaggctttggaatattatttccgggcgctagaacgaaaccccttcttaccgcaagcttttaataatatggccgtgatctgtcattacgtgcgactatctccactatagaaagaagaaaaaaagaaaggaggaaattttctagtgaatactagaaaagagggctttctacatagggatcgtcaaaacaacgattttaccctatcagctgtaggaaggaaggacacttcacgagaatcaaaataggaagaaagtagagcctatactactattctatggataaagctgaaattgatagagaaaacaccgtaaagatcaattagtgagcgactgggtcgatacaactaaaaaaaactgcttcattataccacgatatgggacaaaatttaggaatccgcttatgtaataaagccgatccactaagggattaagcagcggtgtagtatcagatcccaaagatagtaagttcttttttctttcttatggaaaaaggtctttttccaggattctatagaaatttcatatatgaaagaaacgaaaccgagatagttacctttcagaaaattcgaacgaaggatataggtctatctatgcttcattcttctgaaggt

SEQ ID NO: 3777 - DNA, 6093 bp, Sorghum bicolor
aaggccgcccaggatcagattgccaagggaggttactcgatcacacttgaaccaagctcagggttcgatgtgccatggtttacgagaggcaccgtggagaggttggcgtctagatttctatactactgtagtacagttacttctggcactgcctatttgcctgttgggtcattcttgtgtcaactctttgcagatttgtgcgtttcgtgagtactccagaggtccttgagcgagtcacaacactagagtctgagatcctgcagctcgaggatgccattgctatccagagcaatgatagtcttggattaaaatctgtaagcttagaagatttgtagcttatgggtacttgctgtgtttttttccttttatactagaaagatgacatattcttgctgtgccatttaaaaggtcgaagaccatggaagaaagttgactgaaagcaatggaggtagtatgacactgcaccaacctgattgctttctgtgagcatgttgtatagagtagtgcatgcctttgaggattctctaaatctcaaacattattccattgggctaccaaaaagaaaagctaggtgcaatccactacgattatttaatctagtcatcatggagtttgatgcgacatcacatcaagggccattattaagatggtacttatcatttaactcccaaaatgttagggaacatagtttgatttgtggacaacctttactatcgtttagtgttatgaagcaagtaggttgaatttgccatgtgatcaaaacgatttactccctccattccaaattataagatgaatacatagattttgttacgcacttagatatatacactttgtctagatacatagtaaaagcaatgtatctagaaacgctaaaacgccttataatttggaatagagggggtagatatgaagctatatttttttaaagtcctgaatatttagcaatatcttatttccaaccagagaattctggatgctattatgttctgcattcaggggagtactggaatggattgagctgttccacccttttattcgccttacccgtcacagcctgccatatctttttatttatttctacaacatgcctgacgctatccatccactaataggtggacgggcaaattatgatcctgattcagccacggcaattgttgtctacaaggtatgattatatggacaagccaagttttgtttctgtaattgtattatggtacaacactgcagtctgattgggatatttgatcaatgacagcctgggtcaaattcaacgccaccgatgcagaacgaaacaacagcacatgaggagaattcaaagtacttacacatctcagtttttcttgtagaatgttatttgttagtcttcacattttttttggctaatatggctgtatgaactcagaccaacctaggaggaaaccaggtgtcgttgtaaataaaaagaaataggcacttgcttttgagtccaataggatttgtacctggatggtgggggtgtctgcccagagcatccaccaactgtactaggctcggttcattcataaagctgtataaagtcatactctacaaaatgaataatgaattaaaggcatctaaaggcaatgttttcaggtcgtctagtcgaacctggtcgacctgggaccaaccaggacgattaaacatgactaatcgcgattaatcggatgacttttacgggtcgacagtacccctgatcagtcacctgggaccgactaggacgattaatcgtgattaattggacgacttgaaaacattgtctaaaggagaaatatacgagaatgtcattattcattcaccgtgctattgtcttgatccccattacaagcagcgtatacactctgagatcatgtttagtttcttattattttaagtgtctttcaacagtagaaagctgttaacagaactgcattacaaattgcagagttcaattgctcagagtgcttgaaacacgcagaactgtgttaagaaaagagcaggctatggcctttgctcgtgctgtggctgctgggtttgacattgacaacttgggttacttgattgcatttgcagagcgctttggtgctgcacgtctgatgtaagtatatccttacaattacttggtggttttatatgcaggactgaactagttgtcttgatatcttcagtgcttttaagttgtaacttgaccttagagatgctacccatgaagcttgtatcatccggcacttttattttgtagcatgtcataaaatcagaatagtgtggaactgtggatagctcagatgttttggtttattcagatgtgaacagctgccttggtagtgttattgaactttgttaatgaagttatactattgcacaagttttagtcagttgtctgtcatcaaactaataacattttgtcaatagatcttacatgtttaactgcctcagtttcactaattgaacaggaaggcatgttcacatttcatcgaactgtggaagcagaagcatgaaactggacaatggattgaagttgaacctgaagcaatgtctacacgctctgaatttcctccatttaacgcatctggcattgtgttcatgggagacaacatgaagccaaatctggaatcagggtctattaatggagaggcgaatggcgaggatggagctaaatctggtaaaagttgttgcattttccgaaaagaaagcatgccatttcaattttgaactttgaatgaatgtactccccaaaagaatatcttttcttttaagctaagaatgtttttgaggcaaaaagctaagaatgttactaatgaagcactactaacattactagtaaagaaaaggcaatgctattcttgcttttagtttccttccatttgtgggaatgaggaaaatgaatattttgaaatatcagcatttcatgtatagttttatattgctgttttaaggtggatgtgttatcctatttttcttattcaagaatgaaacagattgtagtttttttcttgagttggcatttagcaatgcttatccagcttttccttgaccaagttatttcaagcattcagaaaaaacatttctatagtaagcagagttatacttaaatgttgtacaatcatggatttagttcatttcttgtcactccgttaagcactttagattttctcttactgcccattgttgagaaaatattttctttctgctttgcagatcagaagcccatgggatctcatgctgcatatcctccatgggcaatgcatcctccatctggtgcagttgtttacccaccttatcctatgcaaggcatgcctttctatcctggggtgaatccgtactaccctccatatcctccagtggatgatcctaggtaccactactcaggaaggaaatcttcgaggaagcactcctcggatagtaaggactcagaaactcttgatgttgaaagtgaccatagcaattcagatagaggaagttctcatggtcgcaagtcacatagaaaggggaagaggtccggaaagaagaagcctagtgtagttgttatcaagaatgtgaatgtaacatctaaaaagcatggctcatcagagagcgaatcacaatcaagttctgaagttgagtctgtggacagtgacaattcgcactccaaatcaagagaaaggaagcataaaagctcaaactcaaagaaaaaggagggtaggagaactacttttgactcaggagatgaatatagcaaggatgaaacgtcgaatggccacgatgctgagcaaggtaactggagtgcatttcaaaatttcttgttgagagcagaagaaaaaacaagatctagtgatgcagacctgtttgctggtgagaaagaacccccatcaaggagaaaacaaaatgtaaacacaacagatcctattcttttagctgagagagatggaggcaatgtccatgagcggaacagggtaggttttgattcagccaatgggaggactagagctatccgggtcatgtccaatgatgaacttgttatgtctggagaagggagaagctatatggatggtgaaataaaggagattgaagctggtggaggaaggtacaggagagggacagctgatgacttcatggtttatggtcagagaagtcagatagagagacatagtttgttggatcctcttgcagaggcccagtacaagaatcccgttcagcaggacaagaatagatatggtgtggcggatgagtccttcatgattcctcttaggtccagctcacaggataatattggagcagaaagcagaactactattgacatagatgttgagcttccttctagcattcataaagcatcagatgaaaaggctgggcatcagcttttttacgaacctgacgaattggtgccagagcgtggatttgaagatgtttcatttggatatgatccagcaatggattatgatagccacatgcagactattgtgaaggtggaagatgcaaaaacagaggatgtcttgccagttactgacggtgatgtacagaaggtagagaaagagaagctaaggaatgcaaaggatggttcagataagcgaaggaaagatgccttattgaggaggctatcagcgccaaggaccccactgaatgatgcacaaaaacgtgcacagaacctgcgtgcatataaagcagaccttcagaaactgaagaaagaacaggtatttgacgtttcattccattttcccttctgtgagttccatttgtagcctacaccagcttgcttgggataaaaggcttcattgtttctgcctagttgatgttttatcattgttgaaaaaagcttaagaaaactgagcagatgatactttcccatgcatatatttgcagctgagtttgtcagacattgtttctaaatctgattgacaaaccgtacaatgatatcatctgtgtagttgaattgctagtaacttttcttattttcaggaagaagagcaaataaagcgattggagaggcttaaattggagaggcaaaagaggatcgccgcaagaggtggaaagggtccagggaatgatgctcctaaggggaatggtatgaatggacttagtaaatcagttccaaccttgactgggttgaaaaaggagaaaaatggaacaactgaatcactcagcgatcgactgaagaggctttctgaacccaaaagcattgctggggcagagcattcttcgaatccaaagtcaactggagcagaccattcacgaagaagaagtatggcatgagttgacgtgagatggagaaccgaaataccaaatatcttgatccatcgtgccactcgctagcccagtgacctgcctactagaacaaatgagggcgcccaacaaatgaatggcatctcaaaaggcttcttgtacagaaaaaggaaatggctggtctgtagcattgcctgcttccaaggtttgtgatggaaaatcaattatctttcaatggcatggcgttgtacttccaattttaacataattatttcattctttaattgagggtggcttgtaatagctgtaaacctgggttttttttggcgatgctgagctatattctgggtgtatttatggaacggatttatcggtgtttgagatatattgtggtatttacagtgtataaatgtcaattgactttggattggacgagttgggcccatccagtttgtacgccagtagcatatatggtacagttggatgacggtattcagaactctatcgaaggaccaaggagcagatcaacctggtttcaattcttggtgattgctacttgcctttgataaaggcgcatgatatctgcttctttaaaaaaagaacacttcgcacttgggacactactgatgacagcccaaggataagagggcgtgaattaggcctttttttttgaaaactaagttaattagggggtgtttagttccccttttttcctaaaaaaatttaagttttggtctattattttgcaaaatggaactaaccatcatgtaaaatttttggcaaaaaggtggttatattttattttgaattttgagctcaaaaggcaaaaaaaaaaaacccaaaaaaagtctcaagaggctttcatgagggtaataaattctgcattttagatggaac

SEQ ID NO: 3778 - DNA, 7623 bp, Sorghum bicolor
aatcaattatatatatgaatattaatattttataatgcaagattaataccattagatgaatcgttgaatacattttttataataaataaatttatttagtgatacaaatgttgctaatattttctataaacataactgaatttaataaagtttgactagcattctcctaggatgttagagatagtaacacttagaaaagtaaaagaacacaaccaagaaaatgtatgaaaacaattgcagaatatacagagttagagaatgcacacttttgcacaatgctattgttattgagtatcaaaaactttaaactttctactggtcctcgttgaagcctttcacaaagactaaggtctgagtcaggtaactccacagataacttatgtgtcctcaattacaagtgatcttcgtgtggcctctcctagatgacttcatcttcactaggtgagcttaggccaatacatcgagacctcacacccctcgtataacattagtggccacaccacagatataattgatgtgatctttgtaggattacaagccccatatatacaactctttatatgcataggcaccgatagcctaaaagtatacaaacctcacataacattaggcctaacacatagaacaatcacaaaagatgacctttaactagcataagcactcgtgtacttttgctaaccgcataatcttctcttaagcgcatatagtggcaagagcacaaatggatgagttttaactcaactacaccattgtgtaaagggatgtctctgcagtgagcatccgtgacagacattgaagaaatctagtgccctactacgtgcccttttttcttattacatatcatatacgccaaacatttatatctttgatcgttagttcaaaatttgctatagagttataacataagatttatatttttagatttgttataagtaatatttttatattatataattgaaattataagaatttttaaatagataatcaaagataataatgtttaagttaggacaaagctaatacaacacgtaaggcaggtatgctcgtttctcgtgatatacaggaagcaacttcccctcggcgtactcctggaacatatgtcttccttgctcggcgtgcaacaacatttgccgtccgccgacagcgtatcccaacgacgaacacacacacacacacacaccaaggcacatttgccgtccgccgccaaccgtttacaattggccacgtcgtcgccgccggccggcgaggagacgtctgctttgctcttcttttcatcgaaccaagccacccggcggaaagggtcaaaggggaaacaaagatttcgctttgcagaagaggacacctgcgctgctgatctggcgccgccgtccactcgctacgtcgctggataatagactagccgtcccttcccgtcacggcccggcgactcagcaaggagaactgcagcgacagcgacagcgaccgccggattgttaatcagcctatacagtcttcttctagatagaaaagaaacaaagataaaggttaaagctttctcgtagcctctcctggacaaaccggcgattgtcctgtcgcaggtgagccattaattccgtcgaggtgtgaacacctcgtctctggcggtagctgatttcttcttgctggttttgccctttttttttgcccttttatttattggtaattcgtggcgatttcttttggttcgagtttggggcttttaatagctcaagctcagctacagtcgtcccctttcctcctggtttcaaatctgtttggaactttggttagttccggtccagattaaggggaatcgtactctcctgggatcaaaatttgtcgcttctttcttcgtgtcgttctctctatacacaccaaaaagaaaaaaaaaagagatgattttctcccaactttgagtaatttccaagtgtttattcaacttggagttcggctctgtgcttagccgggacccctaaacttggtgtttcagcgggcccgtcggaatggtgagcggaaatctgctctcccggaggaagcgctcgtggcgtgccgatgagttcgtgagccgcagcacgctgcaattggtaagatccttctccctcctcttccttcaattggtcctgaaaccgttagtgcctgcattgggaagtgacaaaactgtaatatctgccctggtactaaatttggtagcatagatgatttgatggataaagttgattctagtgagctagtctatctatttgtgatatcttatttctgctatcttgctgcttatggtgattgtagtattcagagtattctgaaatgttttttttataaaaaggctcggaagttgtgctcgacgaatatgctgagtacttgtttaactgactgttgcagatgaaaaagttgcatttttctccatcattaatagctgtattaagaattttattggcttaccaaattaaactgcagattgcttaaccatttgtatttgttgaaagcatcacaagattgtggagaaattttcccattcgatttggttaagttttgagtaaaatatatgagtagtccagggtatggtgtggaattctgctgtgactacgtttttttattttatttatttttttcttacttattgatcattgcttttgggaatgctcagctggactttgatgatggctcaccaccagagcatgcatggagaaggaaactaagtagtcatgctaatagattgaaggagttcaatgtcacattcagagaagcaattagaatggtatggaaaaatgcagctttcagctttccttgttaatggaagttgtacatgtcttctctgttacttaagcctgctgaagtcttcaagtgatacatgaagagtcaacattataaattaatgtgtttcccccctgattgttagatgaaacttggtctccgactttggtcatacattcgggaagaagcttctcatggaagggtaatatgtagatttcacatttcaagttactcgttcttttacagttgatcttttattctgatagttcacttttagcttgacaacttaccttttggcagaaagcaccaattgatccattcactagagagggcaacagaccctcagcctcacaaggagtacctcttggtgggatggggtgtgtgattattggtttacaactagcctttgtgtcattctgttttcatgaacatttagtgtgtacattcattcccttgtgcagcagtggtagcatttcaagaggctttagaggagaattcaagcattggcagataactcctggttcttgtgaaatgtcacctgtgatggccaatcaattttcggtaactccagaactttgtcactcttctgctatatcttagatttttctaactagaggatcttggtagaagctcaatcaaaatatatgttctacaacaaaagcttgtgaaaacaagttctcagaaaaaatactaattttagctctgagcttgctcaaacccaaccattttggctcattacaggaaataggtttggtgaacttttttcatgcagagtgtgtcctttcagacttcatgcaaacagactcctgccaacaatctcattgattgtaagaatggcatatcacttctggataaaaataaatatagccacaaaaaaaaaaactatagtaagggccagtttggtagagctcttcctgctttagatgctctatggaagctgattctctgtgagaagtgattctttgactgaaatggattccctatgattctctacgataaaactatatgtgcatacagtgattttgttcgtgaagtgaatcggaagaagctagtttcttcagctctcagcaccttagttcatttcagagaatcaattcacaggatcagcaaagaatcacttctcagtaaaaaactatttggcagagcttctcctggattcagcctgctgctctgtgagatctgccaaactcgctaacagattataactgattctgaactcattggaaagagacatcagtacatcacaattctgttttgttgagatcctttaaaaatatcaaaccagtttgaaatctaagcattctcactttactgtctagagtcttgactaagcttcctgatgttactattatctacatgcctaagttgctgcttgtatgtataaccaactggtgcaggtttttgctatgaagtctaaattttgactgacaagcatatcatgtttattcattatgtttttcttattattgcagatctttgtcactcggggaggaaataagaaatacgcttcagttttggcccctggtcaacttggtggtttgaagtatgatgttcttgtttattcttctcattgctggcaccataatcttattttccacgtttatttaatttatattgtcttatgcttggtattttcccccaaaatagacataactctggaacgttctcttcatttttcacaactaagaatatatgaatatatgtgcaagtgatgttgtactattcatttatcatatttgtaatcttcattaacatttctatttgcaagaaggatatgacattttctaatgtgccaccattgtattttatatttcttagggtaaatactttcagattttctatggattaaaatatttatactacctcaagtcaccaatatatgaacagcttgttttcttggtctgaaacgtcatatattgttgactggacgtatcattaccctgcatactgagcagcaattcttgagctgctcttgtactgcaatgtctgctttacatttctacctgattaagctgtgccctgatctgcatagttcctctgtcatgtcaatgtgtttggtctataccatgcatccatgccactgcgtggcatggtgcgttgccacacagatggcttcttttgctgagctcatatgtgctgcttatggccaaattgagatagggaaaagtggcctcgttaggaagtgaccaagcctgattatgccatagccttctgtagctttatttggtggcgttgactagcagatgaatagggaatggcatgaaaccatggaaaatatttatgttagatgtaggtaaaagttcttctaggataaatggagaattataggactaaaaatcgttataggttaatgtgtttattgtgggtggtggatttttgttagaggtttttatggggtgcttgagaaaagtagagtttggtgaggaaatatatggtttgtccaggattttatcggagaagggtatttttctgctttagtggtggatttttctttgaacaaaaaggcaggaggtctgcgctcaattaagaagaagagaagttcagtacaaagacatgacacacttgcacacccacacaatagctgggctcttcacttagagacaaacacacaaacaatattcttccgctttagtggtgttatggcccacatgttggtacatgatagttctgtgcataggactggatgggtgtaggaatcgtccatggtaaggatatcaagatattgcttgtcttatttttttgaaagagaattgctcgtcttattactgtatatattcagttaatttatacttccctagactcgcatccagctttctttttctttcttcctttttctagtaccaattcaacctgaaattatcctgtattcaattttctggttcttaggaaatctattgatgatggtatatcgtcctgggactggaaattaaagggcgatcgttcaacatatcatgctttgtttcctcgtgcatggactgtttatgatggtaatgatgcttattatttctgagaaaggtttcttttgctattagtttgagacctaatctccttcacactaccacaaaatttccaccatctcttttaccactgctccatctatattcatttttttggccattcccacttggtcaatactaattgggcacaaaaattcagacgtacagaaaaatagaaaaaagtaaacattattgaaaattggaaagataaaaataattcctgaaacagacctagaacacccagtggtcatttttgaagaatacttctaaagatttgtaaaaatattcatttgggcaaggatgaataattgctaactacttcaataagtagcacgccatttaaaatattgcaaacatgcagtgaggttcacatgttattattcttttggtttaaaggcgagccagatcctgaactgaaagtatcctgccgtcaaatatctccatttattccccatgattaccaagagagcagtcttcctacctctgtttttgtatatactgtaagtcttcactttctttttcagagtaaatttgatgaaaatacaacattgacttatatgtttcatatagctgaatctttgctctaaatggtcctatgtttctctgcataccaactcatttatgtttatggagccggtgagagtgtccataactctctttaatcactgaggcatagtggcattgtcactaaactgcgactatgtgcattattaattgtagtgcgcgtgtgaggttcctgcctgtttgccaggttcggtgggccccttaagactaaagtcaaggggacatatctccccttgatcaaatatttttttaatactaattgtagtttttcaccttttttttgtcaagcacgcaggctgtgtatcattatattatattaagaagaaagggttttagaactggtacaagcccaacacactcacagtttaacaaagaaacacacatgacctctacgaacagcagcctccaagatctagcctccaattcgagcaagggcatcattcttacttttattactgatattttgcagctagtgaatactggaaaggaaagggcaaaagttagcctattgatgacttgggcggtactagctactacttttccttgggtgtttgcaccaattttgtattttatgatatgttggatctgatcatgttctattattgatgctatgctagaattctataggaggactttcacatcattctgggggtcacgtaaatgagccattcatgttagtatgatgtcacaaaagcttaatatgttctctattgccagtgctccatatagtgaaatgatttctgttctgtttgacatgcagaggaaaaaatggagtttctggtgttcttctacatcacaagcaagtcaataactgatcactctttttctattcttcttttggtgtggatttttcagattagtccaatcttgaaactaagcacttatagctgatctaaagtcatccatactctctgcctaaaagaagaagaaactatggctcaatacatggtgttttctgcatatattttccaacatgatttttttgttacttaaagactagcattgattctctattaataacattgcaggacagccaataataatcctcctgtaacatttgcaattgcggcatgtgaaaatcaaaatgtaaatgtcacagtattgcctgtttttgggctttctggagaaagttctgttactgctagggaaatgtggggcacaatggttcaggtgatctttactttttttcccttgtttttccctgcctgtaattccctgttttagataagactattgtatgcgtacaaggctagccttctgtggaactgtttagaaataaccaaatgtttgccatttcgatgactgaaactgcata

SEQ ID NO: 3779 - DNA, 27737 bp, Sorghum bicolor
gaatcctcggtcacaagcatggaggaccacctcgttgtcgacaaagcggaggaggaggaagaggtgctcaaggcggccgttgcctggacggcggacgacgagcacagcatccggagcatcgggtcgctggagctggagagggacgccaggctggagaagctcatgtccagccgcaccaccgcccaccggaacctcatcgacctcgacgtccacatccccgccgtgatggcgcctagtaggaccaacaaccccttcgacctcaaccaccattctcctccttcttactatgatgatggccatggcgcatcagccgccgcccctgccggctcctccccgtcgtccctgctcgtccagcacaccaacaacaacccctttgatatcgatatcgatatccagcagcaaagggaaagggatagctgcgatccggacgaggagggcgacaacgatgcggcaataataatgctgagacggcacgagagcttcacgggggccagcgctgcccctctcgcccgcccatcgcgcttcaagccatactttgtcgccgacgtcccggagggaggcggcggcagggacgccggcagcgacaactccaactccaacgcctccagtccatcatcctctacggccagcgatcgccaggctcagcaagaagccgcccaagccacagtcagagtagaagaagcacctgcggcaccgacgccgctgtccaagtgggacggcaaaggcaatgggatggtgatggcggtggacgtggagctcatcagtgattcctctgacgacgacatgtcgctgcagggtgacgatgtcaccggcggcggcggcggcggtggcagcctgaacaatgctcgcggtcactcggatgacgacgaggaggactcgttcgaggtggagagcatcacgcagcaagtagctgcaggtaggtacctgctcttctgcattttggacagctattgcttgctgcaaatgcaaattgatgtgatgccatgtgcaggcaaccagcagctgcagctgcagccgccccgtgtgactgctgtggttgagcccgtgtcgcctccatcagagcaaggccaccggcagcagcagcacgaggacgacgacaaaaaggacgtgggcatcgtcagtggcagcaacgagtccacgctggcatcagtgaaagagaacgagcagagggagagggagctcaccgagatcagggagcaccacatcttgggcgctgttccagtcattgactcatccggcacctccgctggtgctcgcgttggagctacaggtgccgcggtcgcaccaccggcaactgctgctgctgcaggaccaccacctctagcagcaccaccacagcccgcggcagctgcatcagcaccaacaccaccggcagcagctgctgctgcacgaccaccacctgtagccacaccaccacaaccggcagcagctgcagctgcagctgcaccaacaccacgggcaactgctgcagcaccaccattagggaagctgagcagcaaatccaaggtggcctccaagaagatagaccccaagaaggctgtcttcggtctcttccgaaaatagtgaatgcttttctattcctttgtttttttttctttatttactgacaagtctctcaagtttgtactctacacaaacaaagagcagtagctggtatagccaacccaagaaatagatcaattaaagagcaaacaattctaaagaagaagaagaagaagaagaagaagaagaagaagaagcaagtgtaaatgcattattactaattacttaccagtaaaaaaagtataagtagttggattggctgcagctctaaagattcttatcaggaagcagttggattacatccaaagaaagcaatcccttgcttatgtagtagacaacagcgggatggatgatgctttattcttaacacacagtcttattcttaaaccaccaagcaagcaagtttgtccagctgcaagaacctcgcaccccttcagcttcaggcggcctctttcatcaagcaagcaaagccccttccctatgctcacacatccaacaccatgaaccccaccttgccatctatctccttccaatctccttgtttcaagatccaaccagatcctcagcggagccactggcctcctcggcaacagagcacaaggaaaccagggctgtctctaaagcttatacgcgcaacactaggaccagacgccaatggcggactccacaatgctgaccgcagaggtgccaccttaccatcttcgcccctgtcagatgtagttcaggagttttactcctccctcaatgaaaagaacagcaaacgactcgataagttgatggcccctgattgcatcgtcgaggatactgcttattataagccactggatgccaaggttaatttctcatctgcttcagaatttcacagtccagttacatctacatgttacattggagcatcaggcttcctaggttcctatacttaagttcacacacacacacacaaaactgcatgcagtgtacccgtatctacttcaaacgattgatggaatccatgggaaagaaggtcaaatttgccattgacgaggtttgtcaaggtgcagggcggaccgctgcagtaatgtggcaccttggtaagatcactgcgagtttaaattacaaagtgattgaaaaatctggtaggacaatgatgcctgtcatattgcttgctacagaatggaatggatacatcatcccctttacgaagggctgcagcttctacatatgctcagcaaatggagcagcgcttcttatcaggtagctgagatcaacccctttgtatttcagccaagaattgcgatattgttagttatgattttttttgaagacgtcaccacaggggtgagagccccacctgaataaattttcattgattccggaagccggtgcatggagggtctagggcactaaagtttacaaaaaggtttaggacttgggaaagagagagattacaacaccaccaccaccaacaacaacaacgacaacaataacaacactcgaaagactcaaggataagcctagacacaagctgaaagacaccaatcgaacgttgatttgtgccaccaccgaacaacatactcgctggtttcaccatgaccgttgtgctgtgccctccatcactcctcgtagctacgccattccgctgccgccctccatctgatggccaaccagtgagatggggactaagagtaacgaccgacatgcaagcccataatcatcagacatgacgacctcccttggaactgatggtgacatcctccaacacatccaggcccacatgccactatccaacaccatccatggggaggaagccatggaggggaatgcagcggtggaaacaccacccgtcatttgtttctggcaccatcaaggagaccgccgacggagcagagacgccagaggaggacactcgtcgaaacgtcggcaacgaccgacaaccatagcgagtctcacccaagagggttcaacaataacatgggagagagggagagagcaaacaaagagaatacaaggcggcggcatatccctccacagtggcaccctcaagagggtcaacggtgtcgacgacgtcgccaccatcggctccagaaaactagagctaggttttcaccaggaggggagacacaaaactacagtcatagagttgggagcctacaatatcgacgcctccaaggaggtaatcggtgctagagtgcgccaccgtcgattgcacagacatggttgtgcaaggctttcgcctaagcttccctaactcatggaccatagtttgtcgacttgtcggagtaagttagcgtggacgtggagagactacaccgctcgtcggaggacctcattgttgtggagcacgacaggaggcacaacacccatgtgggccccgcgactgggtatcgccacccggtcgcgcctagtcccacggtcaggagccgcacactacctgcaggccgccatgcccagtagtgccagagcctcaggctaccaccgagcaccaccaccacgcggccacctcgagcgccagagacccaccaacacctctgactctccattgctgtcgtcggcaccgcaagaagtggaggccgtgccaacgccgtcgaaggcaggggtcgccggatccggccacagggccaccgaatctggtgaaggccactccaaaagcaccgggagcaagccacaacctgagcgagcaaagcatccaccgtcggggaagcatcttcttgccgctgtacgtcgtgctctggtagagtgtcaagggcgttaagccccagaacaggcggacctcggctacgtagttcgtagccttgatccgtggtagccggcagggttttgcccccacgccggtgaacgtcgccgggttatgccccctggcgactgaagagaagagggagggattagataggtttaatctttgcttgcctccttaggatgtgcggttacaagatataaatggcctcaggcccaaccaaccggagcaaaaggctcctctaatttaggaactaataatagaaagataacaaataatagaaggctattaatcagctaacaactccttccttctcagccactatcgtgacttgtggccagggctgggccctgctccgcccgagcctgctgctcggcgcgttcctgggcgcggcgcacgtccctggctcggcgacacctggtgtacgtgcgcccgaacatgacatctccctccccgccgagaatcagctcgtcctcaagctggaacgccgggtacttggcacggaacgccgccgtgtcttcccacgtagccgaggcagcggacgcaccctgccactggacgaggacctggggcacacccctggcgatgcgatagcgcaccgcacgcgcaggttcggggtcgatggcgccatgtcagagaggaggtagaggcggtgttgcagctggagggtctccttggaactttttcaacagtcccacgtgaaagacgttatgaatgcgggtgccggctggtagggcaagccgcacagcgacgtcgttgatgagctcgatgacctggtatggaccgcagaagcgagccttgagcttgccaccggcggtctggggcagtgaggaggccgagcgctggcgaagacgaagcagcacccagtcaccaacttggtagctgaccggacgatgatggcggtcgtagaacagcttctgagtggcttgagcttgctccaggcgggcacggacatcagccaagaactcctcgcgctccgctatggtcttggcaacggccggcaccctggtgtcgccgggctcatacgagcggatggacggcggatcgcgcccgtagacgacgcggaacggcgtatcacgcagcgacgactggtaggccgtgttgaacaagtactccgcccatggcagccaccggagccactgccgcggccgatcacccgtcggacactgcaggtacatgatgatgacgcggttggccgactcggactgcccgtccgactgaggatggaacgccgtcgtcatgtggagcttggtacccatcagcctcataagttcctgccaaaacagagacgtgaagacagtgtcccggtcggagaccatggactgcggtaccccatggaggcggactacttcactgaagaatgcttgggcgacgggctcggcggagtaggggtgggccaactggatgaagtggcaatacttgctcaggcgatccaccacggtgagaatgactaactttccgcggacgcgcggcaaggcttccacaaagtcaagcgcgacgtcggtccatatgccctgcggcaccggaagcggcatcaagaggcccgcggggtgaagatgctcagacttgtagcgctggcagaccgcgcacgctcgcaccagcgcctgcacctcctccttcatgttagggaagtggaagtcacgtcggaggcggtgcaaggtacgctgaacgccctcgtgtccgtcctcgtggaccgcccggaggagctcctggagcagtggcgatgctgtcggaatgtagaggcgccccccaaacagcaccatgccgtcgacgatggtacaggtcgcagaccggctcccggcagcaatctcggtgtgcagtgccaccagagccgggtcctggagctgtgcttggcggagtcggtcgacgaagtcgaaacacggcccggagatggccagcagctccccatcctcagtatcccgccgggacagcgcatctgcaacggcgttagccgctcccggcttgtactccacggagaagtcgaagcccagcaacttgcccacccaatggtgctgtggaatggtggacaagcgctggtccagcaggtactttaggctgtagtgatcagtccggacgacgaagctgcgcccccacaagtaaggtcgccaatggcggactgcctagaccagcccaatgagctcccgctcgtaggcggcgagcgcccggtgtcgcggcgccaccggccgactatagaaggcgatcgggtggccgtcttggatgagaacagccccgaatccatgggatgacgcgtcgcactcgacggcgaatggcttggcgaagtctggcatgcccaataccggcgcggtggtgactgcggctttgagctcggcgaaggccgcagccgcctcatcactccaagcgaagccgtcccgtttgagcagggcggtgaggggcgccgcgatggagccgtagttgtggatgaacttgcggtagtggcccgctgttgatgcaaaagttgatctgcaaacacaaagggctaatacctaatttaaacgttaaggcgtgccagccgatttgacattactatcggcaaaggtgataactcgaatactttggtcccgacaacagcgatgcgcccggatgccacggccaagaggtattcacacggaacttgagaatacgccttcatcctcctggagctggatgaaccagaactgggcaatgtcctccagattgtaggaggccatccacacgcgctcctccggcatggtgcgctgctggcggaaataggactcgcaccgattgatgaacagcagcggatcagcgtgaaatcggggaaaatcggggcggccgagccgtcctggtggctactctccgcggaggcagctttctccttgaggcccgccacatcggcggagagggtcttcaacatctggacgacgtcggcgaggctgggttcgccgtcacccatggctggatgcacagaacaagacgcagccgatgatggtggtgaagatggtggggcttgtggtggcgcggtggaagcagaggggctggaggcgacggattgggaggatcgacgcgacgctgataccaggttgtcaagggcgttaagccccagaacaggcggacctcggctacgtagttcgtagccttgatccgtggtagccggcagtgttttgcccccacgccggtgaacgtcgccgggttatgccccctggcggctgaagagaagagggagggattagataggtttaatctttgcttgcctccttaggatgtgcggttacaggatataaatggcctcaggcccaaccaaccggagcaacaggctcctctaatttaggaactaataatagaaagattacaaataatagaaggctattaatcagctaacaactcctttcttctcagccactatcgtgacttgtggccaggtgaaaggtcctaatatggctagagggggggtgaatagcctatttaaaaatctacaaactcactagagcatgaggttagtaaataacaaagcgaagctttatgctctagctctaatggggtgtttgcaagccacctatccaacaattctagttgatataatcactatgcacacaagaactaagtctctacttacactagagagctacctaaagtttctatagaagaagtaagctactctagtttgcaagaaagtaagagagagagtttgatctttataccaccacgtagaggggatgaaccaatcaataatatgaagtctaatcaccgggagaaatccaaagaacaatcacaatggagacacacaatctttctcccgaggttcacgtgcttgccggcacgctacgtccccgttgtgtcgaccaacacttggtggttcggtggctaagaggtgtagcacgaacctcgtccttactaggacaccacaagaacctacccacaagtgaggtaactcaatgacacgagcaatccactagagttacctttcggctctccgccggggaaggtacaagacccctcacaatcaccgggagatggccacgaacaatcaccaactcgtgccaatcctcctccgctgctccaagccgtctaggtggcggcaaccaccaagagtaacaagaaaaccgcagctagaacgatccccaagtgccactagatgcaatcactcaagcaaatgcacttggaatcactcccaatctcacaaagatgtataatctatgaaggagatgagtgggaggtgtttgcttaggctcacaaggatgtcaagtatgttagaatgccaagagggtaagccctaagccggccaaacacgtatttatagcccctcaaacaaatagagccgttggctctttcactgggcaaaacacggggtcaccggacgctcttaaaggggcaccggacgctcaacaccagcgtccggtgctccaacgtcagccgcgtgtcagagtctaacggtaacctgcagagcaccgtgttgacaccgtttttgggcacgtgtctaggatggcaggataaggtggcagtacgatgtttacaaagcgggttgccgatgaggatggttgccgatgagggagaagttgaatgtgacagacagtaatatggtgccgatggctagataagaaagtctgccgatgactatggcaaaggatctgccgatgatgcaaaggaggagtctggaagctgccggtcgttatgtggaggagtttcggtttgttacgagggatagttttgttatttccttaattatttgcatcgttttgtatacggattccgtgtaatttggaatttgaattctaatcgtgtctggttgtagctctttgagcagggtataaatatagaccctagggccttgtaagaagaatcaagaaatcagtcaatcaaacatacgtttttactcatattccagcatctacttttcgacgacttcgtcatacttttttccttttattacgagttcttaggaattcgtcgacttaagctcggcgtgttctcgagttccgcgtgagtacctcttagccgtgacatccgggcgcatcgctgttgtcaggactaaagtattcgagttatcacctttgccgatagtaaggtcaaatcggctggcacgccttaacgtttgaatcgggtattagccctttgtgtttgcagatcagttttgcatcaacacatcttttggcacgcctggtgggacaggattcaagatcaagatcaacatgtcgatctctgacctcgatcaagagaacgtcatccccgtgacggaggccaacctcaaggatgagcagaagcaagctattgcccaagccatggaagagttcaagcagcaatgcctgaggtctttcagcataaacaggagcagcgaagtggtccagaaagatgcactgtcggcaccacggcaggttacctttgacgccaatcctggcaagcttcaagatatggttgacaatgccatcaatcgagcgttgattaaccaagctggtgtactgtctaatacggttttcaatgccgtggcaagaactttcaaggaaggacaaatcccaccagattatgtgggcccctctcatcatcagccaacggcaccagaggtcacggctccatcggctgccttgacgaatgcaagtgcacaatctgccgtccctccaagtacatcggggactactggtgcactatctatgccgatggcaaccaacccacaaacttcagttgggcagcataaactgacaacagatatgttggcatcggcaatgtcagggttgactcttcctcccaactggtggggttacggtatgcctccagagttgacgccggaaacatcacaaataaccgacatgaggggcaaaactcctatgacatcggcacctcccaatgcgccggtgaaccagagtcctcagtataccacaactactactgcaaggcctcacactggaaatcctcaagattcaatgttccagatgcccaacacatcggtagagtcaatgctgatgcaacagaggcctatggcccagtcggggtatgtcaattcaacgacggtacccaattaccaatcatcggcagcacctatgccgatgaacgctaataatggatggcttggacagcaagcctttccacaatcgccccagcagagttatcagactacagggttccagcaagggcaggtctatcccgggttccaaggtcaggggattcccaaccagccaatgaattttggacagcaactcggaggacagccagtcggtggacagcagtttggtggtccgcagattggaggacaggtgatcaatacgatgttccgtgcagatcacgtcccgaacagacacgtggaggttcgccaccaagtgccggatccgcagccgcctcatcggcaagatgccgatgcatattgggccgataagattgctgaagtaatgagagaacaatttgggataaaacccaaagtcaacacttattcttatcggacaccgtatcctcccgcgtatgatttgatcccgcttccacatcggtacaaggtaccggattttacaaagttttccggacaggacgacacgtcaaccatggagcatgtcaacaggttcattattcaatgtggagaggctggtaacagggacgaattgagggttcgtctattttcatcatcattgtctggatcggcctttacttggttcatatcattacctcccaactcagtaattacttgggccgatctagagaagcaattccacaaatacttcttctcgggggttcatgagaagaagatcaccgacttggtcaagttgaggcaacgtaatgatgagtcggttgagggatttgtgcagaggatacgagaggtcaagaataaatgctatagcctagttctggatgatcggcagctagccgatttggctttccagggtttgttgccacatatcagggataagtatgcctctcaggagttcgaaagtttaagtcatttggtgcagaggatttctgatcaagacatcaagcctttcgagcctaagagggcatggaataagaaagtgtcatttgttgatgaagcaacaagctcagattctgatgaagaaccagtaatcggtttggcagagtgggtaaaaaacaagaagccgatgtcttgtccttttgggcagaaggaaccggagaagtttgcttttgacaccgctaaggctgataggatatttgactttctacttcaggaaggtcagatcaaactgtcacctaaccatgtgatcccatcggcagaagagttgaagaggatgagatattgcaagtggcataatgcaacttcccatgacaccaacgagtgcaaagtattcagacagcagctgcaatcggctatagagtcagggagaatcaagtttgacagttccaaagcccagaagccgatgaagatagaccaacatcctttcccgacaaacatgttggatgctaaggggaaggctaaggtcttaacatcggagacagctgagaggagtgcatcggtagatcctcagcatcaagttactactgccgatgcaagaagtaagggcttggtccaggaaggaactagctcaggaaggcttcctcgatccggtatcgtcataactcatagaaggcacagggatcattggaattgtccattcttcatccattgttgggaggaaaatatcaagcttcctactgtcagagactgccctgagtgcaacggttatgatcggtacgataggatcgatcggcattatcataatgatgaacggcgatttaatgggccgatcagaggaagggtgtcagttcatgaccggctggggggcagatttagtgggcacaacagacttagtgaccgtgtccagtattttcccaggaaccaagaagagctcggggaaatggctgatgcgcgggttcccgatgaattcatattttgcaaggatgctaacacgcatcgtatggagtcaagggagaaccgacgcccgacggcaaggcaaaggccacttcctccatggtgccctggaggattaaccaagacacagaaaaggagattgcaacgtgagaggcaagaagagctaaacaagggagagaactctggaagtcggcagccgtcagacactaagagggaaggtccatcggcagacgtcaacatggtcttcatgttgccgatggagtttcttgcaccagccagcgatgatgaggtggaattttctgatcagatagctcagttggctctggatccgatgacggctatctttgagaaacctgccgatgacgagaggcagcatcttaaagccctgttcctcaaaggaagggttgatgggcagccaatgaccaagatcctagttgatggtggagctgctattaatattatgccgtatgcagtatatcggaagcttgggaaaggggatcaagatttgaccaagaccgatatgatgctcaaagactttgaaggaaacgtgtctccagtcaagggggcgatatgtgcagagttgaccattggcagcaaaaccttgccgacaacttttttcgtgatcagcggaaaaggtgcttacaacttattattgggaagagattggattcatgccaattgttgtatcccatctacaatgcatcagtgcttggttcagtgggtaggtgacaagattgagattgtcccaagagattcttcttatgttatcgcatcggcagaagcggatacttacgaaaggaccaggtgcatttcaggagaagtttgggagaaagattttctcaaagttgccgattatgagattccaccgatccaagcagtcggttctgacgacgatttttaatggatagattcgccgatgatggaaaattaggccaggggttcacatcggccgatgatttggtagaagtagatataggtagtggtgataagcctaggcctacttttattagtgctaaattagatcctgagagtaagcgacaattgactagtttgttaaaggaatataaagattgctttgcttgggattatacagagatgcctggtttagaccgatcaattgttgaacatcggttacccatcaagtctggatttcggccacatcagcaaccagcccgccgatgtaatcctaacattctacctgatattaaggccgaaatcactaaacttattgaagctaagtttattcggcagtgtcggtatgccgaatggatttccaatgttgttccggtttacaagaagaacgggaagcttcgggtgtgcattgatttcaggaatctcaataaagctacgccgatggatggatacccaatgcctgtcgccgatctactggttgatgctgcagctggtcatcgggtcatcagcttcatggatgataatgcaggttataatcaaatattcatggcggaggaggatattccaaaaaccgcattcagatgtcctggtcatgttgggctatttgaatggatagtcatgacttttgggttgaagaatgctggtgctacttatcaaagggctatgaattttatatttcatgagttcatcggcaagctcgtagagatttatattgatgatgtggtggttaagtctggagatttctcaaagcatcttgccgatttacaaaaagtgttagagtgcacaaggaagcatggattgaagatgaatcccaacaagtgtgcatttggtgtatcggcagggcagtttcttggtttcatggtacatcagaggggtattgaaattagtcgaagatctattgatgccatcaataaaatagtggcccctaccaacaaaatcgagctccaatccttgatcggcaaggtaaattttatcaggagatttatatcgaatttgtctggtaggattcgtgctttcagtcctcttcttaaattgaaagccgatcaagagtttatttggggagaagaacagcagttggctctggatgaaatcaagaagtatctagtaaatcctccagttctagttccacctcaacaagggaagcccttcagattgtatttatctaccgatggatcggttatcggttcagccttagttcaagaatttgaagggaaagaaagggtaatttattatttgagtaggaggttgattgatgctgaaaccaggtatgcggccattgagaaattatgcttatgcttatatttttcatgtgtcaagctgagacattacctgttatcggccgaatgcactgttgtttgcaaagatgacgtggtccgatacatgctatctatgccgattatgagtggtaggatcggtaaatggattttagcgctgtcggagttcgatttgcgttacgaatcggctaaggcagtcaaagggcagattatggccgattttgtgactcagcattgcggtctagtggaaaccttggaaattgtaccctggacgctcttctttgatggatctacctgtgaccggggggcaggaatcggcattgtattagtttcccctaaggggaggaagtatgagttttccttgccgattgttgccacatcaacaaataatcaggctgagtatcaagctctgatcaagggattagagttgttaagagaagttcgtgctgatgctgttgaaatattcggggattctatgttggttataaatcaattggccggaagctatgaatgccgaagtgaagttctcataacttatttcgagagaagtatgcaattgttaaaggaattcaaggatttccggttggagcatgttccccgattgcataatgaagacgctaatcggttagctcagcatgcctcgggatatcagccaatgattaatgcgacatcggcagtcggtgccggtgattggaggaaagaaattattgattatctaaaagatccatccaaaaaagttgaaagacgggttcgatttcaagcaaccaagtatgtgctccttgaagatgaattgtattatcgaactatcgacggaattcttctccgatgcttgggtgatgatgaagctagaagtttgatgggggaaatccatgaaggagtgtgtggagcgcatcagtcagcttttaagatgaagtggatgattcgaaggaatggatatttttggccaaccatacttgaagattgttttaaatatttcaagggatgtcaaggttgtcaaaagtttggtaatatccagagagcacccgcatcggctatgaaccctataataaagccttggccgttccggggatgggccatcgatctgatcggccagatttatccaccatctagcaaagggcataagttcattctagttgccactgactatttcactaagtgggttgaagctattcctttgaagaaagtcacatcggccaatatgattgattttgtgaaggagcatattatttaccgatttgggattccccaaacgattactaccgatcagggcaccatgttcacatcgggggagttcgatgaattcgcaatcggtatgggaattaaagtgttgaattcttctccttattatgctcaagccaatgggcaggccgaagcgtctaacaaaggaattatcaagcttattaaacgaaagattgaagaaaatcctaagcggtggcatacattattaaatgaagcattgtggtcttatcggatggcttgtcatggatcgaccaaggtatcaccctatcaattggtgtatggacatgatgcagtgttgccttgggaaattaaggctggatctaggcgattatcttttcaagatcaattaacttctgatggttatgccactttgatgaccgatgaattggacgatctagcagggcatcggttaaaagctttaatgagtatagaagaaaataagaagagagttgctagatggtatgataagaaagtgaaggctaaagagtttgccgatggggatttggtatggaaattaattttaccaattgggaccaaaagttcgaagtttggaaagtggtctcctaattgggagggtccttatcggataagtcgatcggctcctggtaatgcctacattctagaaaccctcgaagggattgaatttcccagagcattaaacggcaaatatttaaagaagtactaccccagtatatgggtcgatgcatagaagtttaggtgccgataacactcctatcggctggatccaaatgcttggggacaggacgtggtgtttcaaaagtttgggcgccgataacagtcctatcggctagactaaaagctgaggaagcaggaaagcgcagaaacaatgccgatggaaactctatgtgttaagcagcgtctggattgccgatatagcgcgtaaccgaatttggttggctgcttctatctccttgatgtcatcatcggcagaaccttctatcggcttcagcttcttcttcagttggagtgctttgcgaccgtgggcatttcgctcacgctcaagaagccttatggcctctggcaattggctttcttcctgttgggcttgggacagagcgttctctacttccttgagctccgccaatagggacttttttcttgccgatagatcggatatcttctgcttcagcgcgtctccagaagatctcaggatgccgatgttcttgtgcttctcatcggtcaaaagcttctctttcctcatttcatcggagagctgagtctgagcggctctatcggcaagccgccgagaagctctttggtactgcagttggcgactctccacatgagcggcttggaacaggatttcttcaacatcggctgggacttggcctctgagagttctgaacagggtcttggtaggatcggaatcatcaaccaattgcgctgtgtcctggtgaaggagagttgacaattcttccagcctgaccctgacctctgccgatgtgatgccgaccgactgagaagtgcttgcttcttcaccttcttattcttcagagaaatcgatggcgaaggagaacaggctatcgggagaatcttgttcctgggagggaaagcaaaattagctcatacttagagaatcggcaaataatactggcggtaaacagtgacttacttgcttcaaggcgatctcttgccttggactgggaggtgctgacggagctgcgggctgaccggccaaagatgccgatgaaactacaggttgatcggctaaggttgccgatgggacgatatcgactgaaaggagacaagaaagtttatgagactaaatgagaataagttcatcggcaacggtattgttaaagtatgttacctggaaggggaacaacggttgtctgaatcgggagaaccgccgatgatataattagacccaccggaccagttgtttgttcacccacatcgactgatgtaccttctgtttgaggctctccctgctgggattcttccatctgtggtgcttcctgcattggttggggagatggcgcttgctgtgtctgggcttctggagaagaaggagaagactccactgggattggagataccggaggaagagggggagttgccaccttttggcgtttcgtttcggccctggtgctcttgacacccttcctctttggctggctggactgggtggcatcggcaccttgacgtgtgacctttgccgatgcactggtttgctgcaataacgaataagggtttataagtataaataaagccgatataaagatagtcagcgtaaaagatgaagatttgacaaattgccttgaaagcccgcgccagagtgggagcagctaccgttggtgatgtctgggttctcctggtcgtaactttcctgaggcgcacaccccgatgcacgatggaagccagagtgggagcattgtggccgattgaggaaatcgggcctaatggaaacaagtcgatcggcttgccactcctgctaaccgatgaggggatgttatcaacctgcaaaaggaatacaagggtaagctactgatggaaataatgttgaaaaaatgaaacatcggttggagatacttacagtgtcatcgggaatttcgtattcggagtcgatcatgccgcggtatgaaagggccgatctgcagaatagatgctctttccattctgcccaccataacttgtatgcctgagtgataaaagcagccggaacccattctgatagatctacatctgtatcggcgtttggtggtagttgggctactcgactccactcaagaaagttattgatagtttctctgggttttatcacatcggcataaggaagtgcgattggcaactggccgaaagctaactggtgagctaatgccgatggattataaaattcataagtctggggagaagtttttgtgctaccgaagaaattcactggaatggctctgggagtcacaattgccatcatcgcctcattgtccctgtcgagagcttcatcaaatggattgaaggtcagagggagcatgctatctgggtcatcataagccaaccatggtcgttcatctctggccaaaccctcatacagagtctcgaagaatcggccgatctgatccggattactccctgaaccaggtaggactatgacggcttcgccaaagttcaagggggcacgcgttgccgattcctcttcacccaacacatgattttcggctatatctcttgggaagtgctgtgagaacaagttgaaatcaaggcgcttatgcaggtgcagattgagccacatattaataaaccaccaggggcccccaagttgccgatggattggccaagcaggagtttctgggctacctgatggagaaggtggtaaacagcgccaagcaagtatcggccgagaggaaattggccaccgttagccagtctctctgctgccgatagatagacggaagtcggtcctgccgatcgaccacagaatacaaacttgtccagccacatgttcagaaaggtggtttgctcctttatggtgacaggccctctcccgcggtacttctgaatataccctgaccaaccgccgatagcgcgagtctccactttagcactgggggcagtatcaaaaaagtgggtgctatcggcagaagatatatctagaccagtgagcatggctacatcggcaagggtaggagaagcagggccgtggccaaaaacaaaggcattgagggtgtctgaccaaaagtaggacgcagctatcagcagtgactcgttcctgtgcatatcggcaatggatagcctaatgcattgggctagcttcctttcgccccactggacttcataagaattgctagccctcaagaaccagtctttccaccctatggtagggctgggccaagagcgaaaagtgtctttccacagatctaaagaaaagttttcagctctaaaggggatcctattggtttctgcgttgataaggttggttggatctgaatcccctagagggccgagacattgaaggtgtggttgatcggtggggatgacaattttattggacaactcctagtgattttgggggaataaaaatacaaagaaaagggaaaaggagaatattcagtaagatgaatcgcggatgaacaggaataaaaatacagaagatgagatggagatctgacctcagggacgacgaagccaatggccatcttgtcgtgaaggaagcgtgtgaaggcgccggagttgatgaagaggggtacttgtcggagaccttaggagtttttggtggcgccgccgctggaaaagtaaagttgggtagtagaatggtgtgatggggaaggagtacccaagaaggaactatttataggacaagatgggcaagggcaaatccgacttatctctttgccgcatccgagaaacccgagggtattcaggtggatatggcaactattcgcacggtaatccagggattgtgcaggtgatttgacaggaagcggtcattatctgaagatattttactgtgcgagatctcctggtcggtccatcggcgatattctataacggtcattttgccgatgggcggatagaggggaagtaaccgtttttgcgaatatcctggtcagagcatcggcagatctttgtaacagtattgttaccgatgtacgactgagaaaaatgcccgtttaggaagttggggatttcgaggaatctgcggaggattaggatcggagttgtccagattgaggttgtcggttaccagattaggagcattaattgcgggagaaggcgtcattactgcagagaatttcggagcattaatagttttatactccgaaactggggggcatgtgttgacaccgtttttgggcacgtgtctaggatggcaggataaggtggcagtacgatgtttacaaagcgggttgccgatgaggatggttgccgatgagggagaagttgaatgtgacaggcagtaatatggtgccgatggctagataagaaagtctgccgatgactatggcaaaggatctgccgatgatgcaaaggaggagtctggaagctgccggtcgttatgtggaggagtttcggtttgttacgagggatagttttgttatttccttaattatttgcatcgttttgtatacggattccgtgtaatttggaattcgaattctaatcgtgtctggttgtagctctttgagcagggtataaatatagaccctagggccttgtaagaagaatcaagaaatcagtcaatcaaacatacgtttttactcatattccagcatctacttttcgacgacttcgtcatacttttttccttttattacgagttcttaggaattcgtcgacttaagctcggcgtgttctcgagttccgcgtgagtacctcttagccgtgacatccgggcgcatcgcagttgtcaggactaaagtattcgagttatcacctttgccgatagtaaggtcaaatcggctggcacgccttaacgtttgaatcgggtattagccctttgtgtttgcagatcagttttgcatcaacacaccggacgctgagcaggttggcaccggacgcgtccggtgcacaccggactcatgcgcagagagctccgcaaactcgcagggtcaccggacgcaagccaccggacgcaccctgagcgtccggtgctcaccggactcatgcgcagagagggtcgcagaacgcccgcacaccggacgcgcaccaccggacgctccaagctgcgtccggtgcctatcgtccggtgccttaccctaaccgagtcaggcagcctgcacaccggacgctcagacacagcgtccggtgcctctgagccagcgtccggtgagtgttcctcagcgagaaacactcccgcgacttctccaaattttcccaccggcgcaatagaaaatatgcacttcattttctcgaaaagcgccgaaaatatacccatcctctctctactcttcaaactccacctccttctcaaagtgtgccaacaccacaacgtgtgtaccaacaagtgcacgtgtgttagcattttcacaaacattttctttgaaggagttaagttagctcactaggttctaaatgcatgcatatgaacaatgacacctagtggcacttgataaccgcttagccaaagaattcccctctttatagtacggctatctatcctaaatgtgatcacaccctctatggtgtcttgatcaccaaaaccaaaaccctaagcaatacctttgccttgatctccatagggttttgtttttctctttcttcttttccaacttgatcattttgtggtcatcaccatcatcaccatgatcatcacttgctccatcacttggcatgtaccaacctcattaagtctacacacacttagcatagaggttagtactagggtttcatcaattatccaaaaccaaactagggctttcaatctccccctttttggtaattgatgacaacccttttttacaaagaatttcaataaaatttttcttggattcatgttgcttgcccaagcattttaccatgtgcaaaggttatggacaagtttcataaacccaaattggtagcaattgctccccctacatatgtgctaagagtttggatttgaaagcttgcacatatgcttgaataggaaatataggagtcaatttctaccaaatgatgctaaggtgtaaagaatggacctttgaagcgtgataccaatcggagttgccaatgtataccatccttagcaccattagtaactagacattcacaaaactagaacaccccgtgagatcaacattataaacaaggttctagtaccacttgtgaagcaaaaatatagtccagttacactacctatgcatgctagttcttcatttcatcaatcaagtctataactagcatacgccacacaagcaaggcattggagagaaaacttctaaagctaatgcaaatgcaagcaaacatatgtgatgcacattcaaatgcaacatacaagtttatgagcttgctccccctacttgtgtgcttcaaaattttaattgatccccttcttttatcatgttattactcctctatcttaaatctttgggaaattttctccccctttgtcatcaatgaccacaaaaggtgagctcaaattttagataggttagtgtgaaaccatgtgaagggagatcattttcccaaattggtccaatctagattacttgcctaagatatttaactcggtttgatccaaggacaagcttcttcacgcctccaaatgagggttatcttgtaccatgttgagttaaacacttatagctcatattctagatcaaacactaggattgcaagcccacaaacatgtcatatgctaccactagatcaagtcaagcatagaagcaatagtggtaccatacaagcatcaaatttatttgattttcatgaatgatcctaagacatgtaaggaatgactagatgcactaaacaaatccttagcaaagatggatgacatgtcaaacaattttaccttgctttgctcgaaggagaggcatgtcatatagtgggggtgcatcaacacatatttgagaaatcaagtatgttcaattcattccttagcttgcaaaacctcttcttatcaagtggcttggtgaatatatcggcaagttgatcatcggtgcctatactctcaatgcaaatgtcccctttttgttggtgatctcttatgaagtgatggcggacatctatcggcaagtatgagtagcgggatgttttgcaatagcaaccatagaggtaccattaccatcctttctaagcatagtattatcatcatttgaaatgggcttagaattattacctaggggacatgaataagccatgtgtcccctttcccggcataagtagcaacttcgctttgattgagccttttcttccatgctcatgtgttgcttctcattgccttgcctcttgagagttgcttcagccttcttctcaagcttggtaggacacctcgaggcaaagtgtccatcattcttgcactcaaagcatttgatatgggagaggtcttttgatgaccttgattgtctacctccccttcttgtcttcttcttcatcatccccatgtcaccaccatcttcatggtagatcttgacttgagcttggggcttcttttcttgctcaacttgtggcttttgttgaggcttcgcttgatgcttcaccaattgcttggttgggcacattgaggtgagatgaccccaagtgcggcacttgaagcacttgacatgatttagcctctcttctttcatcttcttgagcttctctttgtttgggcaactatttgcaagatgtcccacttcatggcaccgatagcacatgaaatgagaaatcttttctctctctcttgctttcttttgccctttgccatcttcttcttgaagccaaggccacatttgtcaccataatttctttgagtcttcaatatatgctcaaaggtgacttttgagttgtagcacctctctaacttgttgctcaaaatcttcacttcacttttgagctcattgttcttcttcaaaaggttagtctcacaagacaaagaagtagaacaagcatttgtatgtgaagaacatggcataaacaataaatcatcacaagaggtggatacatgcttcttgcctacatcacaagggttagtaacaatatgtgattgatcatttgatccaagtgatgagctctcactagttttaatttcttcattagaaagcttcttagtgagaaaagcatgatcttttactaagttatcatgagtaacataaagttcctcatgaaccaattttagctcctcatgtgaacaagtagtaacataaagtagatgcttttgttgttcacatgtggtctttagaaatgagttttcgtttttcaatttttttgtttttgccatctcatttcttaaagctttggtgagtctacatacaagctcaaaatttggatcatcacaatcaacaatcacacctccaatagataccttgccgtcaccgtgagacatggaggtatgtgatgaagtggatgagcttgtagaagcatcactctcatagccatcatcttcatcctcacttgaccatgaggtggagcaatcctccacaaccaccatgttgtggtcatgctcaacatcctcacgtgcatccacctttggcacatcatcttctttggtgattgccccatatttctcattgagataactccaaatctcatgggcggacttcatatccatgatttcaccaaatatgttatctttcatggatgaatagaagatgttagtagcttggtagtcgagatgtagacatttctcttgtgcttgagttagattctcttcatccaacacatgagaaaggcctacatctaccatccaccacatttgaggagaaataaacttaaaattgcatgtcatccaatttctccactgtgcaaagtgtgtgccatcaaaaatgtgtggacactcaacatctagcccataagccgccatcctctcgagtcggtgaagaccacaaatgagagacctagctccgataccacttgaagggtcgagatggcggactagagggggggtgaatagtccttactaaaacttatcgcgtcggctaatcgaaaacaaatgcggaattaaatctatcggcctagccaagacgacacccctctatctaagttctctagcaccttgaaaagatcctaaacaagcaagcaaggtgctaccttagaaagagctcacctaatcaattctaggtgcaaggtcacacaaacctatgcaactagtactttgcaaaccgggggagctcctacacaaactagtgaggcaaagcgcacaaagcctaagctcactagcaagctcaataacaaggcaactcgtgcgcagagagggtgtcaaactcgcgacctcaccggacgctaggcaccggacggtccggtgctcaccggactcgtgcgcagagagggttgcaaaacaccttcacaccggacgctgagcaccggactcactccggtgcgtccggtgcacacctgcaccacagacaccacaccggcgctctggaccagcgtccggtgctgccagcaccagcgttcggtgagtgtttctcagcgagaaacactcccgcgacttctccaaacttcccaccagcgcaatagaaaatatgcccttaattttctcaaaagcgcggaatcccgcctcgcaagctcggcgggagggagagagaaacccacacctgtctcaaccctaggaacaccacctcctttgaaaatgtgccaacaccaccaagtgtacaccaccatgtgcaagtgtgttagtattttcacaaacatttttccaaaaggagttagcctctcaacttgccacgccactcgatcctaacaaatatgcaaagttagatcgctcaagtggcactagatgaccgatatgcaaactggtttgcccctcttgatagtacggccatctatcctaaatccggtcataaacttctctacacacctatgaccggtgaaatggaaatgccctaggttatacctttgccttgcgctttccatttcatcttctccaatgttgatgcaacacatgcaccaaccaatcaccaaatgatatgatccacttcatatcatcacgtgaccgtattggttcatcgatcttgacctcacttgctcttcaccgttgcctcggtccatcggcgccaagtcttgctcaagcttcaccgtcacacgcggtccctcgcttcaaagcctccgacttgcccttcactcttgcaaccggtccatcaagccaagcctcatcttgatcttctccaccttggtcacataactccatgtcatgtctcatatgcaatgagctccttcatcatcacatcatcacctgtggactaatctcctgtgtatctcacataaacactattagtccaactaagttgtcactcaattaccaaaaccaaacaaggacctttcagccctgctccgcccgagcctgctgctcggcgcgttcctgggcacggcacacatccctggctcggcgacgcctggtgtacgtgcgcccgaacatgacatagagctaaattgagggcaaagggcatcgtttctaggtccctaagccatggatctagagctgtgccagcctccatgaccaccgtcagtcgtccttgttgctggaggttccaaggtcgccaatgggaggaaggaagaggaggcagcacgcatctgtccccaacgaacacggatccggccattagaagcaaggatctgaccaaagctagtagatcaagatatgcttgagggattatggattggggaagaaagaaacgagggaggatagaaacatgtgggggcgagccttttttgtgccgctagctggccgccgccgccgccacgattgtcgctggcgaagagccgcggcagcaacgtccgagctcgccggggagagtgtggtggccggcggccggactgggtcgccctcgagtcgcctcgcgagcgagacgacgcaagagacagccattgtctagctaattatgatttgtacagtttgcattaagcaatgaaaaagtaaacgtgcttccctttacctgagctagcaatgattccacatacactgcaggaaaattcacatcttcgatgagtcaccactgaagccaggaaagtgggcattggtaggcacactaatgagtctccttcatttgctgctctataaatctgtataaatccaattgaacaagccataccttgcactaatcatatcccatgaaaaaatccaatgcctacaggaaatactcaacattgttaccaacttgatcaacatgttccccaaactagctgaaggtatgtgatcaacaaaagttctgtatagattgttactagctaaatctagctaagcatgctggtatgcctacaggtttcctcaaggatccagaagcagtagttcaaccattcataaagatctacaagttttatgtggagccttttatcctcccctttcttgcatattatacccacttctggacatatgtggctcgaggattgactatggtgctacatatcttgtataacctatataaacagcttatgtaaagagctaaagtgactgaatccagaaaaacaaatttgcaaagattcatgtattagtattattaacttgatttcatgcgctcaaaagagtaataaaaaaacttccattattgaggaaaaaaactattagtatattaccagtaacatcaggaacaggggagaagcaagcagcccatgagaacaagatgtgctacggggagactccatggcacagaagttttcatatgatgtgatactagttatcatatccatg

SEQ ID NO: 3780 - DNA, 3757 bp, Sorghum bicolor
atatcacttcatgtctaggattttgtgtagacatggtttctaacttagacccagtttatatgatttttactctctctatcttcaataactacattgccacatcagcaaaatgcttagatggcgctgcaattaatgtctatagaaaccacaatgatttttgcattgggagtgctctaatatcaccaggtagttaagtctggaatacatagacgcgacgtcattaactaaataattcgccgtcgtccatcacacatcagggattcggaggggatatagatgacgaagcatcctcgctcatcaattaattagtaacagtatgactgtttgagtgatggaatcactacaaaatctgcatgctaattaggcaactcccagtggtcagtatccattctagctgctacacgttccctaatataaatgcacatgatctgtcacggaccattttttttagtgattatgtgttagatcatcaataatataatacgtactccaataagaagacagagaagagtcgaaattcatcaactgaacattggcattgaggcgggaggtgttctttaatataagtagttgtttgggtccatcgtgtagtaagcacatgcatcgagtatatattaacatttatattattgcaaagaaaaatattaacatttataatattaaataagtatttttatgataaacctatttcgagacatagatgttgatactacgtactctgtatgagcttagccaaactcaataaagtttgacttagttcaaatcttgaaatcgcatgcgctttttatcagacggacgatgtatatattcttattagatgatgttccagtatgtacttattataggtggcatgcatatatataaatgtgttacttgtctcaaactgtgtacaaacagtagatacccagacatttttttttccgaacgcacattcttccatgccttgttcattcctcaaaaagaaaaaaagagaaaaggaaatgaaaaattaatatggcgcgcgcgcatgcagttggctgtcaacaagctgtcatgcgcatatgctgatctgctgatgtctcactttcaactacctgttacgtacgtgtcagcatctgctacccaatgacaataaatcacaaaattcctattaatttgtttcaaagggataatcgtatatatacatatatggcatggcatgcatgataggtacgtgatgaagcaggggcaaccgggttaattaaaggtggcatgcatgcagctcgatcgatcactgtaggtagctcaagctcaacaatatacatagcagtagagcgacctgtcgtccggatctcgcaacagtactgccatctaattagctttaatgcatgtttcaaccaaaaaaaaaagcatcatcatatcatcagttgcacgcaggtaggtacggttagcagggcatcgccgtcaaaatactgtttatatattagtataagagtagtgctcaggttcacacacgttatagctacagaagctagtagatcgagtactctctacatgcatgcatatatgtgaggtgttgcatatatacatacgttgccgcatgcttttgcggtgtccgcgcgccagcattattatatatattattgagagttttgagtccacaccacacataccaccttgtatgcatgtgatgtatgtgagtataattaagtagatccacgagagctctatcatgcatctactagtatatatactactgtagctaataataagtattagctgcagtgcacaaggtaaggtacgtcgctagctatatatagctctcggcagcaagcgagcagcaggcgttgcttgcattgcatgctgctgctagctagcagtcggcgtcctccacctgcatgcagatatagagaaagaatatagtatatattgttgttaagaaggcagccagcagcgctagctagagacttacgtacgacagctagctagctatatatcatatccagcaggcgcaggccgcctagctgcgacgacaaccaaccatgacgacgccgccgacgccgctcctcctcctcctcctgctgctggtggcggcggcgaggggctgccatgggtcgtcgtcgtcgtcgtcgtactcgtaccagccgcagcagtacaagatgatgatgaacgcgtcatcgtcggggcgccgcccggcggtggtgacggcggtgatcgtgttcggcgactccattgttgacccggggaacaacaacgacctgcacacgctgatcaaggccaaccatccgccctacggcaaggacttgttcaaccacgaggccacgggacgctactccaacggactcattcccagcgacctcattggtatttgttaccttagttcagcattatattaattaataattatttcttgaattattaatatatagatgatcgaggacgatcgactgaattgaattgtatatatattgtgcctgcatgcagcccagcagcttggtgtgaagcagctggtgccggcctacttgggcgttgatctgagccccgaggatctgctcaccggtgtcagcttcgcatccggcgccacgggattcgacccgctgacgcccgtggtagtgagcgtgatctccatggatcagcagctggcctacttcgacgagtaccgcgggaagctggtggacatcgccggcgaggaggagacggcgaggatcatcgacggggcgctgttcgtggtgtgcgcgggcaccgacgatgtggccaacacctacttcacgacgccgttccgcagcgtggagtacgacatccccagttacgtggagctgctggtgagcggcgccgaggagttcctccgcaaggtcagcgccaggggagccaggaagatcggcttcgtggggatgccgccggtggggtgcgtgccgtcgcagcggacgctgggtgggggcctcgccagggcgtgcgagcccagccggaacgaggcggcgcagctatacaacgccaggatccaggagatgatcgccgggctgaacgcggagcaaacgcagactctggtggtgttcctggacatctaccgcatcctggacgacctcatggagcacggggacaagtacggcttcgccgacaccaccaggggctgctgcggcaccggcaccatcgaggtcaccggactctgcgactcccgcttcgtctccgtctgcgacgacgtctccaagcacgtcttcttcgacagctaccaccccaccgagcgagcctacaggatcatcgtcaacgacgtgtttgacaactacggccaagtgctcttctgatcgaattctcatgcatgcatatgcatgtggtgtatctattatctatctatctatctaccggccggccggccccctgcttgcaaattaagtccattctgtcgatgccaaattaataccggcggattcatttttattcgatcgatcattgcatagtatgtaatgcacatatattatatataacagatattgttgttatagttacatatatcgacgaagcattcaacaacgccaaccctcatcatcattaatccatgcatgcatatatgtccatctagcaatatgcaggatgtacatgtactgtaccacgtacaagatatgatcttgatcgatacttttatttgctttattactacaaaaactataaaatttcagttttttttgtctgtcaaatttccactaaactacaagtcaataaacattttgtttggttcgattctagtaggaaatgaaaactctctgtattattagaggcttggcatcgaccgaacagctagcaacca

SEQ ID NO: 3781 - DNA, 4219 bp, Sorghum bicolor
ctcctagctctctcaaaatcatttgaattatctatcttaacttatattgaaaaatatgataaatacctaataagggtttgaggccaataaaaatcatagagatggaatgagacataaagatcccaaataaagttttttataggccatgaaaatatatctaaaaattcataaaattagatttgcctctaggatgttcatatgtgtttggaaaacaatctacaacaaaaatataacatgcaaccagcaagaacacaacataagtttaagactatgctggtccattagggtactcacaatgcagactctatcatagagtctaaagttatttattatctagaacaatatggacttagagtctaaataagacttggagtcttattttttctacctctttcttcaataaatatgttgccacatcagcaaaataccataaataatatatgattaattgtcttaaactctgtgatagagacttgcattgtgagtgcccttatttgttacaaagaagttttcgaaacgtatctagacattgagtggattgttttggggatttttttaatttttttttcattttcatagcgctaaatataattcttgaaagctttcaaagacagttccatgatctctgtatttcaactttttttaattttacaatttactcgtattttgttttgtataggtttgatcaaacgtaaaatttgttgtaaatcgagaatttcattttgttttaagccctgtttagtttcccgcccaaaaactttcatccatcccattgaatctttggacacatacatggaacattaaatatagattaaaaaataaactaattacacagtttgattgaaagatcgtgagaaaaatcttttaagcctagctagtccataattacccttaagtgctacagtaatccacacgtgctaatgacagattaattatgcttaatagatttgtcttgcagtttccagatgagcaatgtaatttgttttttttattagtttctaatactcttcccaacatccttccgatatattcgatgtgactccaaaaaaaattttatgtccaatctaaacagaccttaatggcttaatatagagcgagtagatgaggcgcctggcgattagggctgaatatcgagccagctcggctcgttatagctcgttatactaacgagctagaaggctggctcggctcggctcgttagtgagctcgagcagctcgtttggctcgcgagccaaatcataaaaacatagtacaaagagactataaatttgtaaaagtaattgagcaacaaatacattacatgcatacttaaaatgaactaaataaagtacttatagctttaacaattcaataaacaaactagagttttgtccagccaacgcactacgaccacgactgtgactacatgatagtcatactcatacagtttaagcatcatctattgacggataaaattagggattcatgaatgtgctaggtcgagctactaagaaatatttgggtatatagctgagtcaattttaggtgctagcataataattgactggctcattatggctcgcgagcagctcacgagctggctcgttataaaacgagctagctcattgtaaaacgagctgactcattataaaacgagtagagccggagccgagctattaacgagcgattcgagcgagctacgaattttttatcaagcccttactggcgattgtgactataaagtaatggaaggaaggacgtgttcacatgaaggatctttgttaaagtctgaactggcggaaggagcacgtgagtgtagatcggcggacaggggcgtccatccctctgagaatgtcagtgagtggccgtgggacccgcctcgccgggtgctgctttgtttgacctcggtcgctcggccgcttgccttccttgcaaaccaaagtgctccgaattcaaaatctctgtcggccagccagaccctctgacccagaagatcaccagacgagggggttaccaaaacaatggtgctcctcctcctcctgctcctcgtcgccgtcgcctcctcctccctatcccatgatggcgtcgtcgtcgccgacgtgccgccgtccaacaagctgatcttcatcctggcggggcaatccaacatggccggccgcggcggggtggtggcgaaccgctgggacggcgtggtgccgggcgactgcgcgccgtcccccgcggtgctccgcctctcgcccgacctgcgctgggaggaggcgcgggagccgctgcacgcgggaatcgacgccgaccaccacgccgtcggggtcgggcccgggatggcgttcgccaacgcgctgctgcggtcgggccacgcggggagccccgtggtggggctcgtcccctgcgccgtcgggggcacgcggatggcccagtggggcaagggcaccgacctctacgccgagatgctgcgccgcgccagggtcgccgtcgagaccgggggacgcatcggggcgctgctgtggtaccaaggggagagcgacaccgtcaggtggtctgacgccaccgagtacggccgacggatggccatgctcgtccgcgatctccgcgctgatctcggcatcccgcacctcctcgtcatccaggtaattaaggatgcttctttttgtttttgtttgtttttgcctcggttggtaggagtaactagcaaggaacgacctagctagcttgcttgcttgctgctgctgctacctattactacctgctctggtatcctactagtccgttactatcatttggttatggttggtgacgattgcattgcaacaaaacaattccattcgtctcacaaaggcaaccctcttctgttcgtgcctgccttgcccgcagagtactctatctcattcccgttctcacaagcaagcaaattattctcagtactcgccggagccagcgactttccattccatcaccggaccaccgaccacacaccacctcaaccacattccgctccaagcgtacatcactggaccagtttgctttgtcaacccacagtaattgctgtacctggttcatgatccatgcatttattactgtggcccttgctcattgcgttcctgccttgcaaagtacaccacgaagcctacaaaaaggttgttagcctacaaatgcagcattccgacatctttcatcattagcctcaagtattgttgagagttcatcatttgggggtcggtgtgccatttctgtacagacaagcacacgctctcgtttctgtactgaattaaacatcatatgctgagaaagataccataatcgaagtaaagatggtggggggctgggggctatcgtactgaattaaacatcatatgcgatattgaccattttgctccattccatgaaccaacgatataccttcttctgatgcttgcacttgaactgaatggtctacggaccaacagtagttttcaattcgtggacccaatgactaataatgaacactaaccgcatgcctaatgccttttttcccccctctgtctttccacatgtttcaggtagggttagcatcaggcctaggacagtatactcaagtcgtaagggatgctcagaaagggatcaaacttcgcaacgtcagattcgttgatgcaatgggattgccattgcaagacggccatctgcatctaagcacccaagctcaagtccagcttggacatatgctggctcagtcctatttgaattatggtacatcccagctctagttctctatctacttctttcttcgcaaaataagatagaagctctgaaacttttgctcccacctctaatcaattaattcctatttggacgattcattgagtacccattcttataatattattgtatcaaatcaaattgttatagacttacagagctagctcagtgcaatatcttcatcatcacaactcagaaccatcattgtcttacacttttagttcttggtaatgataccatgataatcattacgctctggaaaacctggaggtatgcaatggaaaataatctagttcatggaactgaattgggatctgtatattaggattattgtacaagtacagtgtatacaatacgctagctataaatagaaaatacactagctgtattaataatcctagtgtattttctctttatagctagcgactagcgtattgtatacactggctgtacaataatcctaatagtatcattgaagtttttttgaccgaattgtatcattgaagtt

SEQ ID NO: 3782 - DNA, 3805 bp, Sorghum bicolor
cacctgggctgcttattatttgcttgtttgccaatatattatgcagcgctgctgagggactcgtcggagcccttcgcgggcgccccggaggccgtgcatgagcggctcgcgctccggtctctgcaggagctgtcgtcgctgatacccgccgggggtgatgccgcgccggcgacggcacgtgtgcttagggttgatggcgcccggtcgtgcaaggacgtgttctttcggcttgccacagaggtgcgtcgtggagtggttcatatgctgggatgtgcactcacgtgtatttttttttcatatagacattagtgtaaaaattttctaattatgtgtagatccagcctgttgctgtttctttttcattaagtgtgactttgaattttcacattgtgcaaaaatcatatgattttagtgggttcttttttacgaaaaacttcccagtttttagtgtatttgagatttttgatacatagtaaaatttgcagattgaaatttctggaaaatttaagaaggatttgcttccaccttaccgtcaagacatccaggaaaccatacgtacaaaaaaaattacattaccagaaactttggtaagttgaagagaaaatctcaatattagtagtaaaataatggtaaactgaatttctaattttctcttcagttaaaaggagttgacgcatggatcacatctatgaccccacattcccaatcggagcacaatggcactgctgatcagtccctgcaaaacagccatggatgtgtaaatatagtgaagcctgtgttccctacagacaatgctgaggttcagcaagagactatgacaaattcaatcaatgaaggtgaaacaggaaatctccaaaaggattcgtctgtaccaacttctgttcttcaccaaccatgtacacccaaaagtaggtcttacgtccctctgcaagaagatactatggatgctgttggtttaggcgctaggtcccgaaaaaggagtcttattgtggaggggaacatgtcagttggatttgtgcttgcttcagctggctgtgatacacctttgcagggaagcattattgagtccttttcccagtttgataaacatgatcatactgctacagttgaaccaaaatctcgtagacaaaaatctccaaatctacctcactgtgccgatgagggggcagatgatggtggctccagcaatcagtcatctaaggtttccagtcatgaaggactgagcgctcatgccacagtaactccaggttttgacagaatcagcgatgtcttaccgacagatgcatctgaacctggacatttgcctgagtgcataaccgcacaggatacaaccatgatttcacagcctgtttgcaggaaagctcatctgagtgctctgcaacatgaaaggggtgagaaagtaaaccaagatctggaagatgtctctgcaagtactcggccactggaagaggaccacgttcatggggatctgactttgcaatctcctagtgctttactttctgtaagctgcaatggtgctaatcaaggaagtaagtctgggaccaatcttcaaccagggactgctacagaggatagtatggcttttgaagagcagaatgcagacaagtcttgcttagaattcactggtgccaacaaggatccagagaaaaagcagcatgcgggagacaaaggtcttgtttggtttcctccggtaaagtttaactcctgtcacattgaatgtttggacacatgcatgaagtattaaatatagactatttacgaaactaaacacacagctagagagtaatttgcgagacaaatcttttaagcctaattagtccatgattggacactaattgccaaataaaacgaaatgctacagtacctgttaaattttaacacccccaaccaaacacccacaaagaagcttgcaaagaagctggtaatgacaactcatcttatgaaacaatagcttcgtctaatagaggatgtggtcctcatttgatcaggttgatgaggctgaccaggaggatagtcttacagcttctaaccaatctggtggcaagcgatcatcacccccttcgcgtaatatgagacacagcaaaaaaatgttgcaagaaaaggagtcagctgtaccaagtaaatctggaaaaggtattgcaaagcaggatcaacacatgcctacttcaccaaggaaaagaagttatgtacgcccgcaaaagcgctagtaagtgtcggaatgcagttacagtaccgcttctttcctttactttagtctcaattgttgtgtttacagagtaaaaaggttaatcaatactttgctggattaactaaacatgactgaggtctgtacctagtttaggattgaatgatatatgagcgtactggtctacgtatgcaaataataaatctctacatgaatatcagtgggggtggcatttgcatgcagtgtgtctttttgttcttgttcaagcagtttccattattctgttggctcatatcatggataacatggcggcaatcagttttgacactattagaactcttaaggtcttaggccttttgagagaacagagagcattaactatgtcatgaatcgtgacaatgattctatggaaagctgatctcattttaaggccttaggccttttgtcatgcattgtttttcaaattcagatgcgagagattcacatggttagttcttaagatcagacttagcattggtattttgttatgattatgattatgcaatgttgaacgtgcaccgatggtattaccctgtgttatgtgccatgataaaatgttcgacacatataaaaaagagaccagagcataaaagttgagccaactttcttttagagtagtataggttttgacttgaaatattcacatttcccatctattatagtatatttttcatctgaaaatgttccatttaatgctattccaagaactgagcacatgtcttgcagctccaatcctcttgcaccaaatagtagacgcaaaagagtcaattggacaaaagaagaagaagctattttgagggtaatcattctttggatgtaaattttcattgttgaaacaccatctttggcgctggcttttcccaggccaggtttatagtatcatagtatgtaattatgtctcacttggccatgcgtttttatactttttactgtgatgatccaggaagcgatggaaaaattcactccacaggatgatgcgcgaattccatggattcagatacgagaatatggccgtcatgtgtttcacgaggagcgcctgccagatgatttgagggtcaagtggaggagcatgaagggcaaggagctggcaggctattgatgctggcaatcttacaggaatgtagccgttgtagcctttatctcttttgagtccacatggaacactgatgtggtacttgtagatagcgaatgtgctaactcctcactgcaagtaggaatggagggtttcttttaactaggatgttgatgcttggtaagggacatatatgtgtcaagcatgaagcatctatcaaatgtctgtgtaccttttggccgtggtatcacgacaattatcacagactaggtatcacgacaattatcacagactataatatcttgctgttgcagtttagatgagattatgtatgtaaacatgattattatgagaagggctagtacgtttggagagaagctgacaggttctggccttttgggcgtcagcctgctgctgctgcacttcctatacgtactgttgaatcagttatgaaaacaagcagcggcagtggtgtggctgcgaagttgcagcatgtgggccacatatat

SEQ ID NO: 3783 - DNA, 7706 bp, Sorghum bicolor
gaatcaaagtatctcaagtttgacgaaaattatatgataaggtaataattattgtatcaactaagtatcattagattatttattaattatattttcatagtatatctatttgatgttataaatctttgtaattcactttataattttggtcaaacttgagatgttttgactcttcaagatttttggaatattttataatttggaatggagggagtagtttgtatttgcaatgttagcaacagctatggtgtttagttcacgccatttttttaaaaaaagaacgattggcacatgcttaatttgccttcaaataccactcaacgtggtgattggtgaatagttttattgtcacgcttatcatgggattacacaaaaatagcattttgctgacactgacggaaccaataatgcacgggtattctagtagcaagaaaaaatcgatagtcgtaggtagggtccaagggagatgaatttgaaattagggctagtttgttgggcgctctgatcttctaaggcctcgtttagttcagcccgaaattaaaaaagttttcaagatttcctgtcacatcgaattttacggcacatgcatgaagcattaaatatagacgaaaataaaaattaattacacattttaactgtaaatcgcgagactaatcttttaactttagttagtttatgattggataatatttaccacaaacaaacgaaagggctacaataacgaaatctaaaaaaaaatcacatctaaacaaggcctaaaacggcttcagcctggcttcttggtggagcacctttttgtaaaaatgttttggtaaaacaagtatcccaaagaaaatttcgaagaagccaattttttgggctgcagttccttttcaaaaagagcttcggctccttgctgcctgcctgccttcatggagaaagctggtttatatgcacctcactgggatggcttcttcagaaatcagaactcaagccttttaagatgctatggtccactttggtaaaatttctcatggttttagcttcacttgttgatccaccaatatagggcaacagatacagtgcaaactcatctcccgtataaactgtgcaaactttaatctggaccgtaggatattgatccaagggagtgcatgagagaggtggaaggagggatttgtaaaagtgtgcttaagagcgggcggttaagtacaaaattacccaatctctccgcgctccttggatcaacatcatgtgtccagattagagtttgcatagtttgcacaggagatgagtttgcactagatccgttgcccccaatatagaactctttttctctttctcctctccaacaatagaagctaataaaccactattttttatttctctagctaccatagcaataaggtaaaaattagatgaagctccaccaaagagacctaacaataacaataagagagtactcacgaagccgagttaggcccccttggaactttggattgtttttttctattcatacgtttatgttgtgaaaaataagctcattgctatgaaatttctatacgattttttacgaaattccgtttcgaaggggacaaatttgtgacgttgatgcgaccattaataatctaacaaacacaaaatgctttggtattactcgtgctaacaaattccactcacttgatttcatagttgctggcgtcgacgtcaccctcggaagaaaaaggcgaagaatccgctggcggctgcgactggcatcatccccaagaccgcgcgcaggtccagcagcgtcacttccacgcggggcccaccccgcgtccgctaccgctgcttcttcatttttctgcgtccctccctccggcctccgtccactggtggggtcaacgtcagcctaccccacgcgcccccggtgtttgatccgcgccgtccgttgggcggctgacccaacggcccaccccgccgcgccgtccgtttccgcgccggctatataaagcgtcccgtcctccgcaccccgcttccccgtctcgccgccaccatctccccttcgcttcccgttcgattcgagccagcccagcctccccgcgcgcgcctgctcccgcaccggagaattcacaggcctctcgaccgcccaacgatggcggaggcgctgcggttcccgggggtagtcgcgggggagtctctggacgcgcccatcgccgcctccaagctcggaagggagcggcactcggtctccgcgagcgcgaggccgggagcgcaatgctggaggcggaggaagggtctggcggtgagctgccagacgggcgccgccccggctgttctcaggacggaggagaccacggccgcggcggcggcggggagcaatgctcaggcggagttcaccgttgtcatgaagttcggcggctcttcgctcgcgtcggccgagcggatgcgggaggtggccgatctcatccttagcttccccgacgagacccccgtcgtcgtcctctccgccatggggaagaccaccaataacctcctcctggtaccgcccatttctatctcttgggcggattgtttggcttgtagtactagctggtgtaaagctaaatgcgcgtgcctgttccgttgattctgtaggccggagagaaggcggtgagctgcggcgcccccaaggcgtccgaaatccctgagctcgccgtcatcaaggacctgcatcttaggtgtgtttcgcttttgttttttggccgcctctgattgatcgtgctgccatgtgctgttccagcatctggttctgaccatgcgtcgttttgttcctatcaggacggttgatgagctcgggttagataggtcgattgtttcaggtatgttgttgtttcctccactctgctctcggttctattcctcttgctctatcaggaatgcttttgttagccatacaaagggacctcgttctgtttgatgtgcaaaagttttctccgcggactctgaataataattcctggtggaagttgaatggacatcacatgatttcttttgctatgtatggtggtgaaaggccttgcggtcactgtcagcactacaaaccattttccgcatgcaccttgccaccagccaacattctactgtgtgcacaaaagggacactttgtttaaatatttgccttctcggtttaaatatttgctagtcctcgcactcaaagtaagttattgctatgctaccagtctatatacctgttactttagccagcatagcagaaatgacagagtggatgctaagctgtaataccactgtgaactgtgacaacttatgctttagtggtttaactggtgtccattattgttttagtttttctttggctaattctccttgaagcacttatttatcttccaatcaaagtatctttcagtttcagaagcactactcaaacattgcctctgtcaatgtttatttcgacaggtttattggatgaattggagcaacttcttaaaggagttgctatgatgaaagagctgactcttaggacaagagattatcttgtttcctttggtgaatgtatgtctacaagaatatttgctgcatatttgaataaacttgggaaaaaggcacgccaggtgagtcaaatgctatgtttctatacgcacatactattgcttagtgtttattatttttcctgtcggaaggttgttttttttggtgttccaaggtcatttagcacaagcaacacataaaagttgcctagaattattttgaactgaaagtttggattctagtcaaacaatcaattctaacctgtggtagaataagtgtgaatgcaactagtccacagaagatggtgtgtcaaaacatgtactctgcccaccggccactctgggaagaaaagtagtctttgtttaacctaactttcttggactaaggaaggaagtcagcttttgatacaaacaagggcacagttgagagtaaatatgcccctcgtatttaatagcacacttaaatctgtcctggcatagtactgcatgtgggtgccttcaaattttgggcaatatttcttataacattacacataaaccatgtcttcatggtgctaagatcatatggagtcccccctgtctttgtagacttggtccataaataaaaacaccaatttcaatccaacaatattgtaaactaattgttgttatttttggcagtatgatgcatttgatattggctttataaccactgatgatttcacaaatgcggatattcttgaagtcacttatcctactgttgcaaagaggctacatagagactggatggataaccctgctattcctatagtcactggttttcttgggaaggtatgtacttctacatgatttcttgggagggtgtcaagtttactttgattggattcgtaatgatgcacatcaatttcagggatgtaaatcatgtgctgtcaccactttaggcaggggtggtagtgacttgacagctacaaccattggcaaagccttgggattaagagaaatccaggtttgttttcacttttccgatgttccagtttcagatccttagactgtctccaacaaccgcgacccaaaatacaggacccatttgtcctttgtgtaatgctataggcaaaaagttcaatacctatttttggtcttctccaacaacaagacccaaaagacaaccctttctgcaaatgggtctccaggagagaggatattcagatttgggttatgcctctcctgacgcccaaaatgggtcttccatataggtactctgttggaggctataggtattatgttggagatccattttaggtttgggtatcccaatgggtctcctgttggatgcatatagaatatttgtgcttgtttcaggttcattaagttttaacaaatcaataagctgttcaaggctttagatcctcaaataatatagtcattgctacctttttatgtttttgtataaattttcccttgatgtaccatgtcatctctagcctaccccaacttgcttgtgactaacaggctctgttgctaaataccaagttgtttcattatttatgaaaactaaaagtcccctgtaactctattactatttttttataggtttggaaggatgtagatggtgtgttgacgtgtgatcctaatatttatgcaaatgctatacccgtgccctacttgacttttgatgaagctgctgagcttgcctactttggggcacaggtatttcatctttcttttttagttataatttgttcatcaaataaaatgttacctgttgcacctcaaaactcaaattctaagccagaagatttagtttagtttacatggtcattctcgttggcctttgtctttcctttttgtttttggtttaggaggtcagttgttttggcagaaattttaagaaccaataaatttgttcttattataacttctgatgatagttgtcttttggtaggttttgcatccccaatcaatgcgaccggctagggatggtgatataccagtgagagttaagaactcatacaatcgtcatgcacctggtactgtcatcactaaatccagagatatgagcaaggtttgttgtgttagtagattatgattctttcttgtgcaatatctcattactgcttttgctgagttccttgaaatagacagagctacattttttttggcagagcatattgaccagcattgtgttgaaatcaaatgttaccatgctggatatagtgagcacacggatgcttggccagtacggatttttagcaaaggtacatgaagcaactgacgtggctcatttgtttgtttgtttatttccattatacctttttgttagcttttgattatatttttatgtacatgtgcaggtcttctcaatatttgaagatttgggcatctctgttgatgttgtggctactagtgaagtcagcatctcgttgactctagatccatcaaaactatggagccgtgaactgatccagcaggtaagcatctgagtgaggaaatattattagttcaactttcagcaaacaatacagccagtacctccaataacatccagttaccaaatgttttactctgcatgtgttatcatctgtgttcaatgttatgattaagcttggaattttgaattgcttagtattaaattacacattttgtaactatgtgttttgatctatggattcttggggcggttgataacccacataacctttttaggtgcatgttgaacttacagaacagataatatattgaattcttttgctggatttgcttcttgtggttttactttgcaggtttaacctggcaaattttcagaaagtattttactggcctcctgattctttttttttttacaatgatgtcgcaggaacttgatcatgttgttgaagagcttgaaaaattttctgttgttcatctgctccagcgtagatcaatcatctcactgatagggaatgtacagagatcatcattggttcttgaaaaggtcagagctcctaatgatactactagtaacatgacatcttgtgattctgaacttccatgcttttttattctggagaatggacaccaaaacatgaatgtctgacccttttgctgcatgccaggcattcaatgttctacgtagaaatggtgttaatgtccagatgatctcacaaggggcgtccaaggtatccatcccctcttacaaaacataaaacaagcttttatggaatttctatatgttgcagtaatacttattatgtactcatgcaggtgaacatttccttggtagtcaatgacagtgaggcaaaacagtgtgtacaagccctccattcggcattctttgagaatggcttcttgtcagaagtagagggagctgatgttccccagaacggctcctctctgaactcaaatggcgctatctatgcaaactagtcgactctgcaactgcattctcagatttatgtaccattgataggttaaatggcgattcatagctacttgtttaggtcacccagggccctgagcaaattccttgatgttttaagaacttactaggaactgtttgcatggtatgcaatcgtttaccgtgtgattgggtgctaccaagtagtagccaatgtcttggggatctgccacttgcattcccaagcttattatatgttgagttgtactgtatgtgaaagttataagagaattgcttgcgccctttgggtggtgataaagtttgtagtttcagactgaactcagtggatggaccattatcaggttgctcatgatatgtaagcgaatgtgatctgtttctgtgacaccattatcaggtcgctttcctcaatgatatgcaagttcataggcttgtggtcagcagataacctctgtttcctcaaccttcatctcatccattcagtgatgaattttgcatttactcgattctggcacgagagctcaacaaaatattggcttacaccaagacaagctacaatgtctactcaaactgctgctgtgccttttgcctctccagtttctggatcaaagcgttcttttcctcttcagggagcgcattgaacatgaaaacagatttgtccccaatgtcgtcctgaatggtgaagaagaatgaaattgccagatttgaaccaggaagcagaatatcagctacaaatggagatacatgcaaatcactgggagagattgtaccttgatgggctgctggaactttctagctgcgaaaaccgtgaaaagaagcatccacactcctaaaagggttgtctttgtgct

SEQ ID NO: 3784 - DNA, 11695 bp, Sorghum bicolor
  misc_feature (3967)..(4066): n is a, c, g, or t
gatcagtcactgatgaaggtgtacctgttgattttgtttggtatttgactatttgttttgtatatgaatcccgactcggagcattttatccttttccgtcacgtgtattctcggttgttctttgtttacactctgcaatgtgttttcagagatgcagattcctaacattatcacatttttagcctaatgtctattccgtctctggtgtaacctgtcaaaactcgttacacgctgtattttccttgcataagaaccacttggcaggttggcatcatgaattcatgactaacatcaggccttttttgaaaattgtcttaaggtaagtaccttgagcttgtagaacccaaactacgtaccatgccaaagatcgagtatataactaactaacaacaaagcctttaccataccgtttatttccatagccctagttgttaaccggtgatgaggtctggatttgcttcgattgcaagtccagtacacccaaaatataaaaacttttcaagattctttaacacatcaaatcttccggtacatttcaagatttattaccacatcaaatcttccggtacatacatagagcattaaatataaataaaaaataactaattgtataatttatttataatttgcgagacaaatcttttaaacctagttagtttataattagaaaataattgtcaaatacaaacaaatatgctacacttgcaaaataaaaaaaatctaaacaaggcccaagtcgtgttgtggagggcaaatctaaagcgccacaactcgagacaagagtgcaaagcttgcatctacgtatcagtgtaaattgaggccttgtttagatgcgaattttttttggatttcgctactgtagcactttcgtttgtttgtggcaaatattgtccaattatggactaactatgatcaaaagatttgtctcgtgatttacagacaaactgtgtaattagtttttgttttcgtctatatttaatgttttatgcatgtgccacaagattcgatgtgacgagaaatcttgaaaactttttggtttttaggggtaaactaaacaaggcctgaggttaatattctgacttgcatcagtatctcagtattagtaagaggaatgaggtcaacccacaaaatttacgaaagccactaacaaatggcaaccaaactttcatgcggttggttcgggagtgctgacttggctgggtgcatgccgcacacccgagcggatatgggaggtggaccaaaatttccagggattttttcaattaatttaattttcaaccatcttatcctgtctaaaagaaaaatcaagagcttacacttgtttgagaaactactttcaagaagtagccgcagtgccaggtgtgccgtggcacaacgccagccaatgtttacatggtacaaccattcaaagttgattgatggtagcgtttgtcactggttatttggatcggtcactaaagtttaagagatatcatatcgagtgtcataagaaatatcaaatcaaacatttagatagcaataagaacataaattataaaagtcgtcaataattcgtgagataaatttattaaatttaattaatctattataaaaaatgatgagccaaaatgccgccacctctttcttgtttgttgtttctgtgagacgagaggtcgtacttgcactgtttattaggctagtcttaatagaattttattaaaattttatggatactaaatatattgatgtgacactagagtaatgaagaactgcgaggcgagaggtcgtactcacactacttattagacacgagttgtctggatcagtgactaaatataaatgtattgaaaattaaatcataaaactccactaaaaatggccgatccctgaatcctccgtcgtccttttttttttttttgacaatatcctccgtcctccttgtttccttgttggggatcgatcccagtcccagaaatggcagccgcccacacgcgtggtcacaaaagcacgcggcgcagaagatgacgctcctcgatgtctccacgactccaccacgtcccgacgaagcccacgaggccgagcccgcacgacgcgacacggccacctcacctcaccaatgcccctgcgccgggccgggcgtcgtctcgtcgctctcccgggaggctctccctatatactcgagcgcgagcgaggcaaaccagatgagccgatgcccccccgcccccgctggcagcgtcacgccagtgcgtcactccggcccccgcgactcgagcactcgtcgggcgggcaggccggccggagcgtctagatcgccggcaccggcgcgatgctcgctgcctccgcctcgtccggtcagatggccgggctctacgttccgcgccgctcgccgattcctccgctcctcgcccgccgcggccgcctgctccctcggcgcccggccgcgctgcttccccgcgcccgcgacccggccctccgccccaccgccgctgccgccgcgtctccgccgcccccgtccgccgactccgcggttagtccttcagcttgtttgtttcccggtgattttgttgcgattccccctcgtccgcgggtgtggccagccggagcgcgcgtgcttattcctccatttcgtcagtttttttctccgagtagtgaggtataggggagtggattacgtgaacggtgggcgcccgcccgaggttcagtctccccggtgatctctgcctggcagtgcacagataccgctttctgcctccgggaaagcagccaccgctttgcctttggatgagccgccaaatttcggcccaccattaatcggttatcgctttccgtacgtcaagtgttgaggtcattatccaaattggctaatcgactgggactgtgatgtgtgatcgagctaaacagttccacccgtgtcaattaaggggtacggtgaggtggtagtggtacagctagctgttcctatcatcctgttcctgggttatccctttgatgtctagattcctttttaccatcgtgggagtattatttcgaccccctttgatgtgttatgtgtatatttatttttagccacgtgggggacttgatttcgtcgtgccgttgtggatttgtttcccgccattgcccatggagttgtaaaatagtgggcaggtgggtcaaattgtgaaactgtagcagtctttgaagtattgtgctgcaaatagtaattctgtgaaggatgaatagtttattatatggattactgcattggcgtattgagttatcacctattcttgcagctagaacatcaagtacgtagaaaatgctcacctctactggagagtgttctgttgcctggtggaagtgattcgacagtgcatgaatggaaggcggttccagatatttggaggacagcagcagaaaaatacgctgacctcgtagctgtgatagatccttaccatgaaccgccgacggaatggacgtatacacaggtacatctttgacttcaatggtcatgcataaatgttatctttctaccatactgaataatcacctttaaaggaacggagcatgagcttgaaagccatcataaatacttagaacaagtgaggctatctacatgatttcatgttaatgcacacaaatggcaacaataaaggatactgctctatttgagtctatagatgaatactgctctatttgacaataaagtgctacagtaacacatgtgctcatgacggattcattaggcttaataaattcatctcgcggtttactgacggattttgtaatttattttttttattagtatccgaacaccccatgcgacatccctatgtgacaccccaaaactttacaccgtggaactaaacaaggccaaacatattcatcttccctaccacatttagaatacacaattgcatttcagagctttaatgcccacaaatctacagtacctaattgctgatttatgttcttatcagcttgagcaagaaatatggattttctcaannnnnnnnnnnnnnnnnnnnnnnnnnnnnnnnnnnnnnnnnnnnnnnnnnnnnnnnnnnnnnnnnnnnnnnnnnnnnnnnnnnnnnnnnnnnnnnnnnnntccttcgcataaggaccaatctggcagatacgcggatatgacatccccctttattgttactttactggtgataattatgtggttgtttatcctttctgatatttgctgctggagcactggaatgttagcaacagcatttggttgttacagatactagtcaacaaatgtcagcttggccttgatttttcagtaatagctatacagtacaaagctagctgtatatgttttatgaatttatatgcataattctctgtttatcatttttatggctgctatccagaggcttcctctgtcattgatgatttgacactaacaaatgaaatacaggaatcatggcaactggtgctatcaatgttgttaggggaacaagatcatctgatgaagaattgtttcaaatatacactcattcagaaaggtgagtttatcaaattatttcttagcatggatttcaagataagtcctggtatttatatccatcatatggccttataagacctaaacctgcaaattctcttctacctgtattgaatggaaaataaaaggagatatagtttctgctaaaaacagccaagccatgtggccatgtccctatatgaccattttcatttcaaaatggctaataattgaattcttccgttaattctgcttcatggaattgaggtgggaactgatatgctttgtggggatatgcactgtgggtgcacacttggcgttttgtttgccagctagagttaacataagaagtggaactgcagcatcctcatgaattgagggatcaaatagtcaaccctatatcaaaacgtattccagcatgtggctctgcttaccttttgagatctgtggcaggcaaaactatttgtaatgggatgttgttatcatatgctaggttgccagaaagttgtcctcaagcaatatgcatgtcagacatgttaaatggattgttttgtcttagttgaacctaacaatggaatatagcatcgcattttcagtataagattggttgttggctgaatcaaaatatcattgtattgcacagcttataattatgcaaagcacatacgttcatgaaacttgataaacttatgtatcatatgaaccctggaaaagtaggcagagagattatatactatcagtggtttatgcgtctgcatagtatttacttagtacttatgtttgtttatgttttactttcatgttgtgattatggatttattgtttttccccatcacagcattgcacttgttgtggacagtcctcaattctttaaccggcttgcagaatctttcatatcaaggattaatacaagattcattattctactttggggtgacaaatcatgcatagatagccaagctgttaaggacataccactttatggctacaaggatatcaccaaacttggtcgagaaagccgtaatgcattgtttctttctggccagcaaggtaccttctgtgtgatatcataatgtgctacatatcataattaacaatcatctgacagtgcaacttcttgagaacttttttattattattattttatttttaatatttatgggcacattgttctgttctgttactgtttctagcagtaaaggataataaattcataagctatgtttccctatagtattctcatcatgtttgatggcttcgcaccccataacatgagcatccaagcttgtaccaccaatagctgatttatgtacatgtgatataaaaaaagaaaattcaacgaatataggagtaattaggtgacattgtaaacgagaacaaataggcacctaaattcaagttgaagaggacttgaaccctttgggggtggggggtagttcatgccctgtaatatttagaatgtatggtcctttccaaatctctgatttgaagcttgacctggtaagtgataacacttaatttctttcttgctaagcagcactaacatttctttcttattgtttaaagattataggaataggtgaagaacctcagacatcttttgttttttactcaatccatcccaaattataagatgcttgacttttttaacaccaagtttgacaactgtcttattcaaaattttgtgcaaaatatcatttcttttgttcttcaagaataacttaaatttgactatgtttgcgcaatttttttgaataagacgagtggtcaaacttggggtaaaaaaagtcaaacgtcttataattttggatttattcgatgacctacactgctgtaccatgcaacagtgattgcgtccttcataaattatttttcccttcaatggtactgtcatatcttgcagtagattgattatgcctgtagtcctggcaaagcatggaaattgaatgttcaatattttctggtagtcaacttgcatatacagttgcttttttcaaaactgtgtgatagtcaatagaactgttgtttttcatttgtcaggtcagcaagatgtcttcgaaactattagtcctgaagacgtggccacactaatatatactagtggaactagtggcacaccaaaaggcgtcatgcttacccacggaaatctcttgcatcaggtaaagatagaaacatcacacttttaaccaagtttgttgaacgatggtatgccatgtggattagttactattttatttccttatcttgatgtgatttcctaatctctataatatgaacctaattaatattatattttttccttgaatgtcctgtaaatatttcaatcaccctgctaaagaaaccgagtcaatcaccctgttgatacacattttatgctgttctgttccacagataaataatctgtgggagattgtgccggcagaacctggtgataggtttctaagcatgcttccaccatggcatgcatatgagcgtgcttgtgagtacttcatcttctcgtacgggatccagcaagtttacactactgttaagtacctgaaggtagggttttacatgtttcaacttaaattaccttactatagtttttagagaaattacattgctctagttagttacttagtttcaccattaaagcaccttgtaatgttatctaggatgcttgctctgcataaagcacctagtatgctattgagcaattcatgtggtctcgtagtgtatttgcgtgctctagttagttagtttcagcattaagcaccttgtaatgttatctaggatgcttgctctgcatcaagcattgagcaattcatgtggtctcatagtgtatttgcgtgctctgctgtatgaatatgctgtattatttttttatcagcttactaaaagctgcaaaatgggtcagatctcgtattagcatgcggtgatctgcaaaactcgtctctacagttctatcggtggtgttgttcactagttttattttctatctgttgcagaagatgctgaagttccttagggcattttgacatcttcttctatcttctttgataggaagatttgcagcgttaccagcctcactatattatatccgtaccactggtctatgaaactttgtacaggtttgttttcttctgctccttccatttcatttgatgctttatagttgtctctgcctggagaaacttgctttaaaacttgcccatcagtatattaaaatatatcaatgtttgaaatatctctacatttgtcattattaaacctgtagcattagaattattaattttcctataaccaaaaagaaaacacgttgagctacattttggaactgtgaaactcgataacataaataaaaaaaaataatgaaggaggtatagtgataaaccacttatgtactgcagtaaatgattgttcacttaatatgaacacttcagttcactaatgcactggtgcccagatagtggctacatgtacgtagcaattattattttttaccattgaatcgtcaagtagtgagtagtgtcactttatgggaagtcttttgcccatttcctaattttcttctttttttctacagttcaattcataagcagatttcatccagttcagctgctcgaaaatttattgctctttcacttatcaagataagtttactatatatggaggcaaagaagatctatgaggtctggacactgaattgtcataagctacttactttagttagctgcaaggaattacttcaaagatgctataatttgtttccttattcttcaataaccagatgttctagaaattgaagttcctttcgttattatctacttgtggcctctttctttgcttgactcagtttccatttcctgttttttctcctccattgagaagggaacagttttatcaaataatcttgtgaaaccaccattcatcgcctatatgataaagtggctgtgggcaagattggttgctgcatttctctggcctttacataatctggcgaagattctagtatacaagaaaattcattcagcaatcgggatttcaaaggtatattagttttgcttatattcttatttctgtgttgcatcaattatccttgcaattttaagtgtaacctgaactttcttaacacctactccctccatcccaaattgtaagtcattccaagaatcttggagagtcaaactttcttaagtttgaccaaatttatatgataaaataattattattatgatacaaactaagtatcattagattctttcttaattatattttcatagtatactcactttatgttacaaatcttagtatttctctctataattttggtcaaacgtgaaaatactttgactctccaagattcttggaacgacttacaatttgggatggagggagtacttaacaaatacttaacaaatcacctagtttccttgataacttgcaggctggtattagtggcggtggaagtcttccgatgcatgttgataagttttttgaggtaagggttatcaatgaacttcttatttaaatgtcagtagctttaacaatgttctgctctttcaggccattggcattaaagtacaaaacggctatggtcttactgagacttctcctgttgttgctgctagacgaccattctgtaatgtaagatgaggaaatgctcgttttatttactaattggatatagtcttgcatactgtttcctatttgttacatgcgataagtcgataatgctaaccttaagtgtgtatgtcgcttgaaggttcttgggacaattggccacccaataaagcatactgagatcaaggtttttgacatagagactggtgaggtgcttccagatggttcaaaggggattgtgaaaattaaaggaccgcaagtaatgaagggatactataaggttctacttcttccctttgctgatacaaatcaatcgccaaatctaaattaggttgctgatgttccattaacttgttgctggtcgaattaacactttcttttggtagaaacggaccaatatttttcttcttaagaattaattagttatctgtggaacactgttttagattctctatggaacagtgttttagattctctgtacttagagtcagctaagaatatggtccagagttattaacaacctgatatctttgctacaatagatagttgacaaaatgaggagctgtagtatttctataatttcatgttttacttaatatattaatccttatgttgttgatggacataaccgaaagtgaaatgcacattaagaaccaagcatataaatctgagaatccatgtttcggcccgatgcacagaacaatgatataatttgagtattattcagcttttttggaggaatcatttcttttttttttgtttgtcattagaatccattggctacaaatgaagcttttgaccaagagggttggttcagcactggagatataggttggattgtacctcaccatggaatagggccaagtcgccagtgtggagggatgattgttcttgaagggcgtgcaaaggatacaatagtcctctcaacaggttcagattataattagtagtatctcctttttcagaatgtgtaccttttttctataaatttattctttgtcattttttatgattctgttattaaacttactgtttggtctttaatgtttgtacacaggaaatctacttgatatcatgtatcttttcgtactaaacttgaccatctcatttgtaggtgaaaatgttgaacctgctgagatcgaggaagcagccggcaggagtaacttgattaatcagatagttgtgatcggccaggtaagagaaatgcccagctataatcatcactgagttcagttcagactcctttatatgtgtgggcatgtctttttcttgatgcaactagaggaaatattctcaagaaaaaacccatgccattgtctgaaactgtggtgttacggctactgcattgtgcacccatgtatcatgtttttccccctggttatgagattagatttgaatattagcaatgataactagattattgccactgaagtcacgaagttcctgtcatggtctctgaataggatcaacggcgtcttggtgccataattgttcccaacaatgacgaaattctggcagaagcaaaaaggaagtccatccttggtgagaatggcgacctagccaaagataaggtcatgaacatgctgtatgatgaattgaaaacctggtgagagtttcccgccctgctgttgtttctctctctcccttttggcttcttcttgctgttgagaatactaaaacatgggtgacactatttcatgattcatgattttgattgatagggagatgattcatataatgattacaaacaaacatggggctttgtggcgatgtctttctttgtgtggacgtgacactatttcatgattttgactgtttgattgattgatgacatctatcatcagaggaagcatttaattatttgagggacccctaattatattttgttaataaatttcaggaccatgcattgctctttccgagtcgggccaattatgattgtcgacgaaccatttacggtgggttttcactcatcatcatatatatatttatgaccgagaaactatcctgcttggaacttgacaattttttttttcttcagattgacaatggtctgatgacacccaccatgaaaataagaagggacaaagtgacagacaagtacagaagggagatcgaagcgttgttcaagtgagatatgcggagcgcgtggctgtgctctgctagcagatctgtctaataagaaattcgagagcgatgcatccgactgattgaaacaagttctttttggataaatgatgaataacactattagatgtatgtatgtatgtatgtacatgtaataagtgactgattaaactcaaaggcactgctgaccctcggataaaaaaactgatgttgtctactgatgagctaggtagtactaatctgctataaactactggtcatgttgcggtgtgagccggcgcagcagcatgaacccagaaggcgatgaggaccgccgccactgccgcacgcagcagcctgcctatcaccgtccggcagtagctggtactctcctcctcgccgtcagactcgtcgtcactgccgacagctgtggcctccgccgcctgtacgacgatggctgtgttagcatcgccattggccaccgcgactggctgctttggcttcttcctttgcttcttgctccgctcc

SEQ ID NO: 3785 - DNA, 3115 bp, Sorghum bicolor
acccgcaactagtaatgttgatagtgccacaataaatacctaagatatctacagaaatacatctctgaaatgaaaataagacccctaaaacgcctaacgggatacatccaatcttcttgattgcttacaaaattatgataaagcatgattagtttagctctatacatagccaactagaaacgaaagacgagacaactacgtacatttgaagttgcctaaaaactacatttttctattgaacttttttaatctcactcattacaacataaaatattgaaatgtcacgaagaaatttagcattacctttccatcaatctgcaaaggaatatttgtttccatctctcacgtccaaagactgaccccatggccccacaaaccagaacatttcccgcgcgaaactcaacccaaaaccaaaagcgcggcaaatcgaagcaaccaacaggtccaacacactaggcaccccacaaggaaaagaaaagaaaatccccaataccgaacccctcgcccgccacgccccgatccatggatgcggagatggaggacgcaggcgcccaggccaagatcgaatgggacggcggcggcggcggggccgacgcggtgctgggccttgccggcggcggtcccccggtgtcgctgtgctaccaccaggcgttcggctcccacgacgacatcgtcctcctcgaggccgccgacgacctgctccctgacctcctgcaaggccggtaagcgccctccgcccaaccaagcgaaaaacgatgctttcccccaaagagaccaaggaccggcaacgccattctttcgacttcagggggggggggggggggggggcattcgacgtttttttaggatttggaatacagtcgatctacagaagaagcgcattttctatacttggttcgtagtccagaaatttgccctgtttcgctattcaccatgtgtgcgaactagttctttcaacttcaggggggcattcgaactacgtttttttaggatttgggatgtcatcattattcatgagatctacaatcgatctaaagaagaatcgcattttctatacttggtttgtagtccagaaatttgcccagtttcactattcaccatgtgtgctaactagtctgcacgaaatgttctagcactattcttgcctaacgcaaagttagttgttgtcaaattggtccaccgtgactctatatttccatgccatagtggttggaaaacaaaggatgttaatccatagacatgggcatctctgttgcttaattatgaggaagtctaagtttaagcataattatgagtttatcctcgtgtagttcagtttcccattatacagctggcatctatgccacagatatcaactgaacataggttgctccttgcgtttgcagtgctaattcatgttgcatgagagaagtataaagccttaaaatgttccattacacagagagtattgtgcatcatttcaatgtttccatctctagaaatgttgacatttctctcgatatagggtgactgtacgggggcgtcctgaagaagaagctgtcctttgcacaccttctgcaacatattccatgaagtttgttggcacatcaaattctatgtttctgataccaccaggggagccgtctgctaaatgcttaagacctgacagcaccaatggcgatgctaatgtcgtggctgctaccatcaaattagcaccagggagcattgaattggtcagaactgctccacggctagataaactgaggagccttctccgtgagaggccctacatacttgatgaggatcttgggaatgacttcgaacatatgaaggggctatacacttggcaaaacctctgcaaacttatccaggccagtgatggcgagctgttagatgggttgaataccctctcggctgttgagattgatggattctggaggacagttgatgccaattctgtgaacacgattcttgacatgatcctgcacaactctgtgttgcacgattggccgttaaatgcaatgccggaaaatgatgtgctctctgtcatggaatctgatggttttacccataagattgtaacccactgcctcaacagatttggcacaaaggtagagcaggaagctaggagtttttggagccttgatgagaagcgtgtatgcttacagtttgctcagagagcacttggtgcaggaaagatgaagcttgctaactttatggacaaatgggagagaagcattccttcaggaatgcatgctgatcttcagatgctggaaggggaagtgttgtgtgaaaagcttggagctgagacctgggtgcatgcttttagtgttgctgatttgccactggcacctgctgacaggtttgcggcacttttccgtgagcgccctaagtgggaatggaaagatctgcagccctatatcaggtgtgatttgcattattatttttttggttgagttctttttttctttttccttttgtgtgtgtgtgtgtgtgaatttggcatgtgactatatctctcccctatgtccagggatttgcgcttaccaggtgtctcatcagaaggattgcttataaagtataccagaagaacccaaccaagcgctgaagctgaacctatttttactgcaagataatagatctagccatctgcagccatgctttgattcaaacaaggccttgttggtgctacttaatttgaaatatcacactggcagtgtagtgcaaggcattctggctattggcaacggaacccaaattatcgttgcatacagatccgatgatcctagttgtagacctttagtacaagtgattttcctcacctgaactagatactatcggtgatggaatatctgaagaacctgtcatctgcaaaactttgcgcctttgctgtaacctttgatgaacatatagctatccaaaagctgaaacacatgcgagtacaattgtggatgcttgaaattgaaacgactttcagatatctttttttcaccctcttaatattaaagtacaggagattcaggatgtgtattgtatttttggtaagaggcaaataagggggaaccgaaaattacttatatgccatcaaaaactatacctgtcccttatattgcatcaaaatttacatccttccctt

SEQ ID NO: 3786 - DNA, 4031 bp, Sorghum bicolor
atgtattctcatgctattcttggatttcttgttgaaatatgagctctagacaacataattgttaaattttaatgataattccataccctttaatcagtttgatattgaccttttcttttccttgtgccagtaagctcatgcgaagatagacttaaagatcatataaagaaaggtacttgatctttgtatcttatatgagtatggttatctttatcctgttcaatattcacaagcactttttagtgctaagaccttgctgcaattcttgtgcaaaatttatagacttgagtgtccagatgcagtcagattggcgcagcaaacgttccaaagggatttattcttgttggacagagaaacgttaactaatgtataaagtgacaatcataatcctttttctgttaatgatagcatacatagaacgaccatatcaatttggtcaagataccatttttattggttaaccggttactgagtttgaagccttatgtttgtcatgttttggtctttacatggctgtttggctctacgtctggccacaagtccctccttccccctcccatcctgaagaataggaagaagggctgcctatctttccattagtagacagagggaaaacatttggccaagatatatgcatcattgagatttttgtccttggttcatattttaaagttggagctatgggtttacaatatcacctttttacatgtttgtgaaaccctttggctctaattgaccttgtgttccttttattttctcctagttaagactttgcttgaagagcttgaatttctagtcgagaatgtctatggcatcacactaacagccagtttaagtgctctggaagtttcagacagtcagtgctttgataacatgccaagtactgattgctgctccatggaggtagagttttctgtttccatattcctttttctagtactttcagtgttctgttcatcagagaataaacttgctgtctgcaatgatgaagtgaaatggaaaattggtgacagggtgtttctacacaagaggaggataaaagtgcagatcagttggacacggatgtatcatttgttacagtgatggtcatggttcgcaacatgctgaagcttgactacatgatgcaggtaaattaaaccacacatccatgtgccagtcagaatgtgcattttctatcgcgctttacatttcgtggcatcccagctctatttctttcgccctcttgattaacgagggctgctgttctcttctacaggaaaagattgtcagtgcattgtccttgaaaacaccttcatcagagctcgagggatactgtctcatgtggaatttacggccatacatcgatgatgatgtgatgcgtcttgcgtggaaaatgtgtccctgaaactttggcgttcgcgatggtagcaagggcaagggggttgatcaagcaggaagttgttgtgcaagactcaaacacgatcctttgaacagctgggcattgggtgcttggagttgtttctgctgggatggatcatggatgtctggtctgttcatgtgtttgtagaagataaagagatatattcagcgtgatgtatgcgtgtgtgttcatgatcatgattgtgtactggaagaaacccatagtttgtcaaattggaagatcccaaaactgcttctgtgtcacagtgctgccgctgccttctttcttctcttccctgtcgttttccgaaaccctgtcgtttccttttcggaagacagttgagagtccaacttgtttctgcatcatcaagaattcgccagatcgaactctttgctgctgccaacacttttttttttttgcgagatcgaggcgaagaaatcgtcgcgtggatcctccagttttgggtcaacagtgtgtactagatagatcaggctggaagtggaatccaacccggggtgcccgcgcacagcacacagcaccgggctcgtccttgtaggcttgtctgccagatcggccgacgcgcacgcggacaccacgacgcaagcgcgggcgccggcgtggcctagcgatggagagccccacgtcgacggcgtcgcgccccgacttctacgacttcctcgaccgcatgcgccgccccgccgccgccgacctcttccgctccatcaagaggtcagtcacctgtaacccgcccaccccgtggtccggaaaaatcgtagcttgaatctatcggtcaatctagattggttgttagatgtaagcagagtgagtagaacgcacctgcttcctgtggatttctctgacctgcggttagcttggcgctggcagcttcctcgtgtccttctccttccacgcgcccaacgccgaggaggacggctgcaaggtccaggccttcttcacggagatggagagcgccatcagggaccatccgctctgggccaacgccaccaaccaggagatcgaccacgcgctcgaggtgaagccctgccccactgatccttgtttttcgccttcattggcctgatgagggttttttttttctttgtgcgttagggcctggagaagtacgtcatgaccaaattgttcgaccgcacgtttgggacctccactgaggatgctgttaccgacatggagatatcagagaagattggtctcttgcagcagtttgttaagcctcatcacttggatatacccaagatcctgcataacgaggcatcgtggctggtaattcattctgagcttcaagcattcacaatgtggtttcagtccgtgatggttgtcataagttgcaaggatgggagtaatcagtgtatgccacattttaatagctttattatcattacatgtttgatcgaaatgaagccccaatacttggatatgtttgctagctttcaatactgaaaagggggtcaaaagtattcagctctattttttctgttatcaattatgtcctcattgtactatgtattcaagttgctggttttaatcatgtaatatccataattttaaattatccaaattcccatgaaagaaatcattccagtgatacagccaaagctcatgctaactatgaccattcttttttatgcacatgccactctagcttgcagtgaaagagttgcagaaggttaattccttcaaagcaccacgtgagaagcttctgtgcatcatgagctgttgtcaagtcatcaataacttgcttctgaacatatcaatgtcaaatgatcgaacattatctggggctgatgaattccttcctattcttatctatattactatcaaggcaagcatctcctggcaactgtttattcttgctatttcttcttactgattgagtacaactgagaagccttctgaaaatttgatgtaggccaatcctcctcagctgcactccaatctgaagtttgttcagctctttagaagagaaacaaagctaatttcggaagttgaatactatctgacaaacctcatttcagcaaagatgtttataatagatgttaatgctagctcattatcgatggagggaagcgagtttcagaaacatatggaatcggcaagactagcactcaagtatctgttgctagcccaagtagctcacagggaccccccacatctgcaagggcaaatcaggaggaaattgatatggcaggtttgcttactatattagtcaatttattcgaagaagtttgtttgaccatgggtttgcattccagttttctctcacaaaacaattcatttttgccgtcaaacaaatgtggttttttttgttcaaagaaaaacataatgtggtttttattgtgattttgtccaagaaccattttacctatcaaataaaataaaatggttagctcttgtagatttttttttcttcaaggggttgttatgcgtttcaagcaattttcagggtttcagtccagtgcttaatattattgaataatcataatatttaaagtgatacatgtgacaggtcctagattccctttcatggattcagaaactgaaagcttgaatccacgggaagtcaagcagatgcatgatctgtataggcaagttgtcacaagatatacactgctgt

SEQ ID NO: 3787 - DNA, 3466 bp, Sorghum bicolor
aatctgtaaaactacattgttttgtatagaatggtctaccattacgaacagtttctgtttcttcaaaattctctttgttccactggcatctaatgtgggctatacttaaatgaaaacaaaggcaaattaaggtggttggtttacttccaacgttctgtctgtgatatagcactatagcttaaaattcccccagaacacctggaatatgttatttaggtgatcattaagatagatggaaatcacatacatccttcttgaccactttaacttcaaatgtgcattttatctttattgcagaggagccgttttgaaaatcaaataaaacagcacaatgttaagcgagctgcaatggctaaggaggtgaaatctactgagggtgatggagatgatgattattcctatgaagtttctttagatgaagacttcttgacttcattagaatacggaatgccaccagcatcaggaatggtatgactgattaaattgtttatttcacgattgctaatttgctaatgttcttggaactgctagttatttactgagaacctatgtcttctgtgactaatttttgtggaaccttacctcagggccttggtattgaccggttagtaatgcttttgacaaactcttctagcataagggatgttattgcctttcctgtcttgaagattcagcaatagtccattctagttaagaagagatacactattggtgacagatgtggctgctgaagaaagtagcagcagactaaattttggcttgtttcagtacagcagattttgtatttgctaatctttttagctgatagatagatgtggccatttatttatattgtgatgtattatggctccgagtccaagctgaatatcaaaaacctgatagatgtttcaacacttgtatcaataataatggatggatttcacattttgcaatcgatgtgctgcaaagcagtggtctccactggataatctgattcctcagtgacatgattaccttgaactatcatttaagaaattgtttggtctacggactcttgaggggggtgggggggggggggtggggaaatagcttcatccattttcagctcatttgaaggagagggggggaaaagaggtatgttggctctctttgtgtgctagcaaaatataagggtatatttggtctcatgctacttgaggtggtgcattacaagtttattatcctatgatttttggtggaatcaacatagttatagattgattgataaaccacctcaaatgaaacacgctattaggcttgcttggttgcacttcaatccaccccaaatctaatatgtattgggatggattgaaggtaaaaattaactggtttatcaatgaggtaaaattaactggtttagcaatgaggtagattgggatgcaggtaaacaagggttgagtaatttggtttaagtgttttttaatactctgcgcccttatggaatatatatacagcttcttcatcattatataatatacggagtactgtactccctcaaaaaaaaaactgtattagactattagccctcgggtggtccacccgcagccctcgggtgcctatctggcacgggcgctgctggcgcggccctcagtaaagtgcaccaccaaccggctaccggcgtccggcggccggtgaacagcattacagcagcatctccgtccatccaaaaaaaaaaaccctgccagtttccccgcaacgcaacggtcaccttcctctcgtcctgtttcatgtcacttgccatttcatttctccaagatttccgattggtgggtgggtttctccgagcgtaacctccttcctccgtgttccgcgtccggcgatgaccccgcacgcccaagtcttcgtcttcgtcgtcgtctcctggccctccctccgcccctttagcatttagctagcctttaacaacaacatccatcggcgaggccgtgagggggggcagtgcgattgattctctcaacaccaaacacctttcagctggaagaatccttttcccccactctctcagtctcagagacagagagccagcccggcaagatccgcgttccccccaaccaccccacacccgacccggccatggcgttctacgagggctggtgcagcggcaagaacggcggaggctgctgctccgactgcagctggacgcggatcgccatctggaccgtcgccatcctcgtcgtgtgcgccgtcatcatcgtcctcgtgctggccttcggcgtggtgcgcccacccaaggccaccgccgacgacgccgtgctgcagcggttcgctctgtccccggccgacccggcgtccaactccaccgtctcctacaacctcaccgccacggtgtcgctccggaaccccaacatgtaccgcgccatcgactacggcgcgctcgccgtggccttctccttcaacggcacccgcttcgacgactccgcgtccgtcccggcgttccagcacaagccacggaagacggcgacggtgcgcgtgaccgtcggcggcgtcgacaagcccatcaagctcgcgaaggccggggtgggggagttccggacggagaacgacacgggcaagttcgccgtggagatgcggctcgacacggtgctccagtacaagggccggtccgccaagtgcccgctcgtcgtcatctgcccgcttcagctccagctcgtcgaccctgacgtcgctgccaccgcgttccagcggaccaagtgcaccatcctccgggccaagaagtccggctgctagcttattactctgctccagctctccattggtggcctggctagctcaatttctgcttggtgggctacctctctagtttcttgcttccttcctgtaaaattaattcttcaagacaagattttttcttcttcttcttcttcttcttgcaagtgaagagattgttgttgtgtgtgattggaagagtatttgtaggagtggtgaaattggatgtgtagaaatttgtggagatttgagacgatcgattcgttgtcagttgtttatgatcctcttcctctgcgattcctgttgggtggttgtgatttgggcaagagtttattgagctccagactccagtccagctgggtgttgtgtgggaaggaagtaggaggcgttgactctgtccatcggatgagcagacgtgcagtcaactgaactgagaggtactggagcttgaggtgctgtttgttcgtcatcagtagcccggcgttgtcattgttcgtttaacattcccctgatttcatgcaaaatgcatggtacacgaggattgattgaaaatattccaaccaccaagtaaattagttttttattaagggccaacaatcttcatggaaatattcctaaccgtgaagcaaattatttttcttgaaggctagcaacctccaaggaaaacacatttaccacctcaaaaaaaaggattaacttatgattaaatgaattattcttttcttttgtattcgctttagtg

SEQ ID NO: 3788 - DNA, 6225 bp, Sorghum bicolor
gtcgtgagtgatgatatgatgcttcttccgttcgccgtgatggcgcaccgccaccaaccatgcacggcaccagtccggccttgcccttgctgtgtgtgcgctctgcgtcgtcgtccaattcggcaattccaagcaccaattcgtcgtcgttcttcaccaccccccccccctctgccctggcccctcaccctcgccggcaccggcacggcggcgccatgtcctaggcagctagctagctcctgcatgtggggtactcatcaattgcataaacaaccgtccacgcagagcgaggcttggtagcacttctaacatcatatctatcgttaatacttatcaccaacccaaatatgacaatcagtgagggttctatgtgtcattagtcttaccacataatactaatactatgttttaaaattacttggacgcaactccttatatttcacgactaagggagtagtaaattacgttggagttcgcttcttcagaatttggctagtggcacttagcaagtaaatattgccaaactcaaaactactattcataaattgccaaaaacaatgcgctttctttgctagagaaatgctcctctactaaacaagttctgaatgaaatcccgaaaactaaaaaaaagagccaaccatacttgttgcaaatgctacaataacctcacatgacaaattaataaaatccacccatctcattgcacgccttccacatggtaaagctacacttccggcggatgacattgccaatttgccatgcatggttaacaggagccaaatgcttggctggctctggccgctggtaaccacttcatccgacatcgtggacggcacagctaactaacgcggtacgccactgcactgtgcaccagttaatacctggaggctggagaagaaaatgcagtagaccgagccagccattaatctatctcctttttgttatttttaaaagaaattctctctcaatttccttcctgcaaacccagtgggcttcacacatgagcacacataaaaaaaacattcttttgccccgggctagtactaacagctaaccgccctagaaaactccaaaaaacctggcgccaaatcatccagccccaaacgcccaatctcgttacattacatcacgaaaacgaccaaaattgatgcttttttataagagcaaaaacgtacagcagcacaagagtacgagtgagagagaaagccagaaaggcgtcctctctcctctcctttttttctcccctccctccctcccttccaatccggcaaccccgtcttccccccccccccctctctctctctctctctcatcccacctcacgcaggcggcattaatggattccgcagccgcggccacctccctccacccccgcatcctcccggcagcggcgagaaccctaacgtgacacgcgcttcgcccccgcacggatcctcctccctccacgccgccggttgctcgttgggggagagaaaaaaaaaaggtcgctgcttggggagcttccacggcgagggtggcgcggcggcccaatgcggctcgatccggattgctccgcgccgcgatttgcctcgggttgggcgctggctccgtgaatcccgcgccgttgaccccgcgctgctggtgctggtgctgctgccgccgtcgtctccgcctcggaaaggttggatctttatggcgttctgtgccttttgtgtgggcgagctgtggattcttggagtgggttgtgcttggggctacctgcattctggttaaattcgtagaaggtcgctggtaggataggacgcgggagtcagctcttggtcggaatctttttggttttctgcgggttttcctgtgtcaaattcgggatggagatttggttctgggagcagagtctaggtgttggtgctctattgattagctagttttacctgcatttgggcgaaagcagagtattctgttgattcttcgtgtttacacgaggtgttctatttgcaggtttgtttaggtggtgaggagaaatggatgtggagaaacctgcttccaaggggcatggtttctttgccctcttcgattggggaaagaagtctaagaagcgccagttcgtcgggagcaccagcagttctccaaatctgagtaagaaaatttgcaataggagtcaagtggttgttgcgcacatggtaaatttttacaagggggtctggctaaatttatatcctgatttttctttgcagagaatgctggagatgggaaggatattgatgatagtacaccaagcacacggtcaaattcggtgcgttcttttgcccctatttatttccctgtgccgtccagtgtgttgcttatctcagggtcctgaatatactatggttttgtgtattccacagatccttgaagacgccccaagcttgaaggaaagcagtgaacatagctgctcatcttcagtaattgatgaagaagctcagtcaaggaggagtccgacggttgttgctaggcttatgggattggattctatgcctgcggcaagctcacccgaatccaatcccttgccattaactgtgcaaccacctttgcaaaccaacagccatgaggatttgattggcagaagctatgttggtagtccccttaagatgccgggtagtcctattgatcggtataaaatggaagcactgcctccaagacttgccaagaggacactatctgttgcacagtatcagttgttgtctcccatgaaaaaccctaaccatatatccagcaggaatgcagctgatataatggaagcagcatcgaggatcatcaggcctggagtagaaaatataagttcttacagagttcatgatgttgggagtgcaaatgctgcacgtgcttacaatcctggagagatcataggaatccaacaaaggtcacagaagcttaatgaagcaatgaggaaacgtgatggccctgcatcttttaggccgcaaagtggaaaaccttcagatggaagattgagaggttcagagggtgcctcgtcttccaggatctcacagtcaaatggatgtgctccagttggtccaaaagtcaaagctggtaatagattagacactgctcgggctatgcatgcccaagaaaaagggggcatgagaaaaggtggtagaaagcttgaaacttgcaagaaccctgaaaatagcatggctgaaagaactgggttgaaccgacaaaaggatagtaaccaaatgggcacaacaagttcgtccagtgtgcctgtgacaaacaacagaaaacagaatgctacggtcaccaaacataaggtgaattcaaacccagcaacccctagtagacaacggagcaatattcaccaaataaatgcccatcccagaaaggtgagggcggccagcacatttgctggaaacagtagtcaaagtagcagaaaggtggacttgcggccaaatgctcatgcaaatgtaagaaatagttctataccaaaagcaataccgaagccaagaagattacaagacaggagagtgtgctctgatacaagccagtcaagtgatagtattagttctgacagaagccagaggcggattcggcacaatattgtgattgatgagcaatcatctttttcaacaaacaaaaagaaagtcagcactgagattgtttcattcacatttacctcaccagttgataagtcactacatggcacccacttccccaatcattcagtggaaaaacaatttatagggaatctgagcgctatgtcaacttcaagcaatacatcaaacactaaacttgatgtaattgatggtgattttttgggactcctgttggagcagaaattgagagagctgtcatctggtgtgagatcgccctacactaagcaagccaaaggtgttcaccacacttcaactgctttggaagatatggcatcagcatgtgaaacatctagcattgcttctactgattatgatagggaatcattacagtctttcagtgatgtaaaagctactctcccccagacagatcttgctactagaagtgtccaggtatggcatgacagagactcggtcacacctctttcagtcagatccttctgtcagcgccatctcttgcatattaagttgctagttctgagcatatgatgttttttagttgttactatatcagatcaaaataaacttgaaatgaaattactttatgttagtttaggcctgggaatttctctccatataagctacacattctataatacatgtgtttagttatctggtattggaagtttgggaagacttcttttttgtggacaaagtttgaaagtttttgactgtacagtaggcagttgcttatagtacattaaaatatacatatattttattcctgcactaaagagaggcacatccccgtattgcttatcagaaagaagagctacggagtgatagtttgttcctgacttgtgtgccagataatggcaaatgacttgctaataatcgtaaacagttcacatggtacatcctccattttccactaaaattaggtgcatactccttatattctgttttcagtataatcaggtgcatgtcttccttttcttagaattagatccctttttccatctattctatctgaaactttagtgccatagaagtgaagttagaagtggtgacttaatgccatagatcaatatatctgaagggaactcaaactttatcatactggattaggagttgaaacagtcttattttgttgctaaaaagctgtagattgacactgacacaaagaggacgttgtcagtattattgtatacataacaggttaaacattaatctttatgctaacatatctacctttgatcagtcatctcagcctgtgaagtatgatcatgatgtcacggatcgagcagagcttgagcatcatggccgaagtccccttttcacatgggaggcttcagtttcaactgaaacctgcagctcatcagagagctggaggagtgcaaatggtaaatacagtagcttggaatttgctgtaacagtacgtcagtacccatggtccatggacctttctaatttctttttcctgttttactctggcaggaacaagattgtttagttcaactgaaggagtgacaacttctgattcgacacgcttcaacaaattcctagaagcggatgcctcttcagaatattctgacacagcctcatcaatcacagtggctacagcagaaatccctcgatcagaaagtagcagctcatgtcatatggataatagacaagaggtggagtttataagagaaatactgaatgctggctctcctgtccggcacattttctcttatctggagcggtttggcaattcgggtattctggatccacatctattggaggaattaaatggcaatattaggttgttagctggtgaagagggcaaaggttacagattgaggcggaggctgctctttgattgtgttaatgagttaataagtgtgaaatgcgcttactacttcaatgctggctacagcttatggtttatggggatggcggttctgcagaacttgtcagcggaagaaatctatcgagagatgaccagcctgaaggttgctgaggagtggatggtggatgagcttgtgtacagggaaatgagtagtcctctggggagctgggttgatttcaagatggaatcacaccaagccggcggagatatagcggtggagttgttaggttccttgatcgatgaagtggttgctgatcttctgactggtggctcatcttcgtagcagctgttggatcccctcactaacgataccagttgacagccacaaggtttttgttccatgtgttgtcctatatctgtatatcagtagctcgctcgagaaattgtgtagcattcctaagatgaaatgtcactaacgtaccattattcgatgattgatcgatttcctgtcaagagtgaaaagaaagaacattcttgacctgttctatgagcaattttggcaggtctgttgggtaggatttggtcagatggtcatgatgcagaaaatagcaggacaagcctgtgagtgtaggtgagactgcatgtttgttttaaagggttcaaagaatgactatcttatcctctccattctaaattataagatgttttagcttttccagatacattatttttattatgtatctagacaaagaactatgtatctggagaaaccaaaacacttataatttagaaatttggaatggaaggagtataaaaaaatattgtgtgtgtgtgtgttttttt

SEQ ID NO: 3789 - DNA, 5186 bp, Sorghum bicolor
ttttttatttagattaggattgctatgaaatatgaatcaagcatcacattaaataggctaccataaactttttataataattggagcaagataactacaattttaattttacactaaaaagcataggcaaacatttccaacaaaaaaaagtgtactaaaatttgtgatattttttgtttacttcatggatctacatatgtggagctgaacaaaatttgttttaaaatttttagatttttctatgaattactacgcatttatcaattttcagctgatttttttatttagattaggattgctatgaaatatgaatccagcatcacattaaataggctaccataaaatttttataataattggagcaagataactacaattttaattttatactaaaaagcataggcaaacatttccaacaaaaaaaagtatactaaaatttgtgatattttttgtttactgtatggatctacatatgtgaagctgaacaaaatttattttataatttttagaattttctatgaattactacgtatttatcaatttttagccgatttaaaaaataaaagaaaaataaattggagattttacattgggaaatctaggaaaacttttattctttttttcttccatcataccgattccggactgattgggtgacggacgggaaaaggaaacagaggttttgcattaggaaccctagaaagttttttattttctttttctcctctacaaacttggacggaggaggccaccgccgaaaccaaaccgaacgggacggcgacaggagacggaagattggcaggaaaaaaagcagactgaaattttgactctttatagataggtatagataatatgcagaatattttgcgaaccctcgcaagcatatacatggtgttggagagcgatgatcccccaatgctgtgcaacagaccaattaaatgtaaaccttctctagaatattaggtagtaggtagaacaccactatataaatgtaaacattctctagaatattaggtagtaggtagaacaccactagaacatcatcgaatctagtaacctgcaagtatgctagtgaaatcaagttaaaaaagcacaaaacatcataattgaatctagtaagtctccgtagttgaaggcttgcaaaagagtaacatgttcagattaatacattgtacttgtggaattggggcatgtaattcaattaaatcatgtagatttatccagcatttagaacagagcaatctcgaggatgttggatgcatatgcaccctgaacttgattcacccatgcatccaaatccaaactacataaaggcaagtaccgtatagtttttggattttaggttaaaaaaagaagtactgcaaccaaaccaacatctcccatgatgaagagaagtaactaaagattgaaagcactaagggggtgtttagttcctcttttttcttaattttttttagattttggtctatcattttgcaccatgcaaaatttttgacaaaaaggtagttattctccattttggattttgggttcaagaggccaaaaaaaaaactcaaaaagagcctcaaaaggctttcacgaggataataaattctgtattttggatataactaaacatgacgtgaaaattttagcattttacattttatgactccaaagtagttgacattttgcattttgaattctacggaaaactaaacaccccctaaatttaggactaccccatttcagaactaagttcagagatcgactcaaatcagctcatgcatatagccatataggtagaaaggagtactactctgatttatcagacattggtacgtcgaccgtactgagaaagtgagaattgatcatacaatttttttcccaagctcatatatcccagttgggccgcagatcccagatcagctgggcccggaaatgggctgattcagacgacacaaagtgacaggcctcggcgagccggccggcatgtcgatgagctccccaatccgattccgatgctgtgctgctgcgccaccgcatccctctcgtctccgtctcctccctcgcatgccgccgacccccacgcgcgcctcagggcggcggcagcatgctccgacctgccgggcgctatcgccgccttcgcctccatgtcatcctccgccgccgccaacgcggccgcgcgccccgtcctccgcaccttcaccgcgctcctcaagctctgcgcggcgcgcgccgacctcgccacgggccgcgccgtccacgcgcagctgaccgcgcgggggctcgcctccgagtccctcgccgccacggcccttgccaatatgtacttcaaatgccgccgccccgtggacgcgcgcagggtgttcgaccgcatgcccgccagggaccgcgtcgcctggaacgcactcgtggccgggtacgcgcggaacgggctccccgcgctcgcgatggaggcggtcgtccggatgcagggggaggagggcggggagcagcccgactccatcacgctcgtgtcggtgctgccggcctgcgccgacgcccgggtgctcggcgcttgccgagaggtccacgcattcgcgctccgtgcggggctcgatgagctcgtcaatgtctccacggcggtccttgatgcctactgcaagtgtggtgcggttgaggcggcgagggcggtcttcgattggatgcctgtcaggaactccgtgtcttggaatgccatgattgatgggtatgctgagaacgggaacgcctcggaggctctggctttgttctggaggatggtccaggagggtgtggatgtgacggatgcagctgtgttggcagcattgcaagcgtgtagggagcttggatgcctcgacgaggcaaggcgtgtccatgagctacttgtgagggttggcttgaagtccaatgtgtcggtgatgaacgcgcttatcaccacgtactccaagtgcaagagggcagaccttgctgcccatgcgttcaatgagctgggcatcaagaagacacggatctcgtggaatgccatgatcctcggcttcacacagaatggatgctccgaggatgctgagaggctcttcgctagaatgcagttggaaaatgtgaaaccagattcgttcaccttagtcagcgtgattcctgcagtcgcggatatttctgacccgctgcaggcaagatggatccatgggtattctatcaggcaccaactagaccaggatatctatgtcctgacggcccttatcgacatgtactccaaatgtggccgtgttaccatagccagaaagctcttcgattctgcaagggacaggcatgtcatcacctggaatgcaatgatccatggttatggttcgcatggttttggccaggttgcagttgagctatttgaagagatgaagggcactggcagtttgcccaacgagacaactttcctctcggtccttgcagcttgcagtcatgctggtttggttgatgaagggcggaaatattttgctagcatgaaggactatgggcttgaacctggaatggagcactatggtaccttggtggatcttcttggacgagctgggaaggtagatgaagcttggtctttcatccaaaacatgcctatagaacctggcattagtgtttacggtgcaatgttaggtgcttgcaagttgcacaagaatgttgaattggctgaagaatcagcacagaaaatctttgagctgggcccagaggagggggtgtaccatgtcctcttggcaaacatttatgcaaacgcttcaatgtggaaggatgttgcgagggtgaggactgctatggagaagaaaggactccagaagactcctggatggagtattatccagctcaaaaatgaggtccataccttctactccggaagcacaaatcaccagcacacaaaggaaatatatgcaaggctggctaagctcattgaagagatcaaagctgtgggatatgtgccagacactgattcgatacatgatgtggaagatgatgtcaaggcacagctgcttaacacccacagtgagaggcttgccattgcatatgggctcattcgaacagcccctggcacaacaattcagataaagaagaaccttcgagtttgtaacgactgtcataatgcaaccaagttaatatctctagtgacaggacgggaaatagtcatgagagatattcaacgatttcaccattttaaggatggtaaatgttcatgtggagactactggtagtgaaatactgaaggcagtctgaactctgaatatccatctttgagattatataggaaaacttcactggaatatgaatacaagtatacgattgaactaacaggtaaagctagttattctatctgtttcacacacatcatgttttgattggagcattctctatgttgatttcatgaggagtgtataccatgttttttttatagtcagtgtagttaccctttgcattgatggttcttggttaagctagtgaagtccagcagttcttatgatctcttcaccatttcagggaacctacagcctactgtagagttacaggcttacagcagtccatttgactatgtccttgatacatttttaaagttttttttcttccatacaaaaagtagtgcacaagatattgcttgttgaggacactgcttttcatctccatgccttgtctgaagctagatgtgtacatgatgagattagcactggtaactgaagaaataagtgtttttttttcaactagtggatgaggattataattccgaagatgatagttctgttgtggcacttcagtatggcagtagcgttaacacaagaaatccagcaaataaatatgcaatttataaatgtggttgttctatgtacttgcagtcactctcacaaaccatgaatgcttctatggaggagctggctcgatgcccaggaattggtgagcagaaggtactgcaacgtgcacacattggttatccctttgaaagaaactgcaaactccctattttgagttttttttcttctaccgaaccctgtttccctgtttaatatgtgtgtgtattgttttaggtaaaatgcctctatgattccatgagccattcaaacgggtttctgcctgcccaaaccttgtagtaccggatacccctagaccgagagaaagcaaaaggtcaaccttcatctacagatggcagtttgcaagatgcggtagagaagccagatgcggca

SEQ ID NO: 3790 - DNA, 5382 bp, Sorghum bicolor
actctttttttttaaaaaaataaagttggcgaagaaatctacacaaaacgaagggctatataaactcatgccaagtccatccctggcaacgcgctaacgaagctagcaagcatcggcattcggccatgtccaaggcaaggtgagtgtcctggctggcggtgtccattatttttgttaggtttcaccacgggctgcgacttgtggtgcagctagctcgtgcagtgcattgacacggctgcgtcgtcgagtgcaggttggacggcaaggtggcgatcgtgacgggcggcgcgagcgggatcggcgaggcggcggcgcggctgttcgcgtcgagcggcgccacggtggtgatcgcggacgtgcaggacgagctggggcaggcggtggcggcgtcggtcgggtccggccggtgcgcgtacgcgcggtgcgacgtgacggacgaggcgcaggtggaggcgacggtggcgcgcgtggtggcggcgcacgggcggctggacgtgatgatgagcaacgcgggcgtgctgctcccgacggggtcggtgatggacatggacctggcggagctggaccgcgtgatggccgtcaacttccgtggcgcggcggcgtgcgtgaagcacgcggcgcgggcgatggtggcgtccggttccggcggcggcggcggcgccatcgtgtgcacggcgagcgtggcgtcgctgcagggcgggttcggcccggcgtcgtacacggcgtccaagcacgcgctgctgggcctggtgcgcgccgcggccggggagctggggagacacggcgtgcgcgtcaactgcgtgtcccccggcggcgtcgccacgcccctgagctgcgcgctcatgggcgtgggcccgcaggagctggaggccatgacggtgccgcacaacgtcctgcaggggaaggtgctgcgcgccgacgacgtcgcggaggccgcgctgttcctcgcgtccgaccaggccgccttcatcagcggtcataacctcgtcgtcgacggcgccatcactgccgtcaaccccgccgtgctgcagaccgtcgggctgtaaacgcccaacgatcgctgccacagtagatacatgcatacacacatagatacatactttgagtgcaatgtttcatcgttcgttttttttttttttttttgcattggttggcatcaagaaatctgctttcgttattgggatttccctctgttcatacacctatccaccattgctgaacctgaacactcgtggtatgctttgctgcgccatgaacgacgaactctgtagaacaaacagctgcgcgcctgcgccattgttgttgtgccatttcatttgatttctttcatggaaccaaaccaaaccaaaccaaaccaaacagatcgtgcagtgcaagtgtgcaagtgcaatgcaagtgggtggatttggattcggattcccaactctgaacacgacccgaggaacttttgggcagggcagccactgaatcacgtggcgctgacaaaaaagcgcgtggactgacaactagtcgttgtggttgcaaatcgtaatcactgccgtttgacacctgacaactgcagagagattagtttaacatttgtgtgtctgattgaacagactttgagatcttgccctagcagcaaaccagggacgggaccaaagtttcgaggccagcgcttgtgcttgacgggcgtagatagatagacagtgtgcagtgctgttcgcaactgaaacagtgaactttcactagtctgactgactggaagtgctcgattattgctttgtgcacaactttagtcaacggcggaggacttagtcagctgattttaggcacttcacaattagttctggcgaccagtggactaacaagtagtaaaaggccacaatcgttttgaagaattttagatttagcaaggcccatcttttccctgggctaatctggaccgcttatactcgatcagacggtcgttctgcctctacgaagtacgaaggccgcccttcgtcttcctcccccacctcgtttccgtttccctccccggcgtctccctctcctcgccgccgccgccagagatgggccgtgcgccagcgaacggtaagcactcactgccgccgccgcctcctcctccaggacgttgccacttctggctccccaacaagcgccgccactgcgccaactcccctctcccgtcctctcagtaagcgactcctgctgagcctcctcgctcgtcagcctaaccccataaccctaaccctagctcctcatattcatgctcctgcgcctcaggtattgcggaaaccacctccctgagtccgcttccggggccggccgccgcgtcccctgccccgtcgacccctcccagtaagcccactgcccccagaacccacccaccattcggggtggctccagcatcaccgctaacccccgtcttctcttctcttcccacgcgcagcacggtgctcgaggagaacctggaggcgcacgtcggcaagtgccccctgaagaagcaggtcgccgcgctcaccgcgcagccgtactactccaagggcatcaactccggcgcgggtgaggcgggctgcgttgtgacgtcggcggagaagcgcgcggccgtgtacaggcttaccgaggaggagttccggtgtctgctcgggaagatccggtcggtgcatgtggccaccgctgcggccatacgggagtcctacctgatcaccggtgctaccgataagtggatgaacggccaggtcgataggtgggggcaaatgcacatcctgggagtgtatagctcgttgttctagcggggagtgatttctattgatggattggactacaggaagatgccgtaccaagagaagcatgtcgctcagcaggcatccattgttggaaacatggaggcatttggcctgctgcggaagggtagcgatgaggtggttgatggggagaatgcggcggtgagtgctcaagcagttgtggagtttggagctggaagagggtacttgactcaggtgctggtggactgttatgggatcacgaatgtgttcttggttgagaggcggtcctacaagcttaaggtcagcaagtctaaacaaatcattatgtttctggataataagatccacttgatctgtattaatgcctgttagttactctatcttgttaaatgcagcttaacttccacaaggtcctcaaatctgcatcatagttaggctcgctcaacgaccaatacattgtctctcaattttcttgcaaaatggcgtgtcagtttttgtgacctcttggcttttgcatttctactatcctcgatgtagcctgtattttgcaatcgaatgttaagatacattgacttatgtactagtgcaatgtgtagttgtgtgttgtttctagtgaggttagtttatggtcttaacttgttccgcttttctgaatttaataccactgcagttaatttggagacatttcattttggatataatgtgttattttctagagtaagcttgaatgtactatgaaatttctctaacacaacaacttgctgttatgctaaatctaatttgtccaagatatataagctctttcacctcctgattaagtacccgttctcttccctctgcactttttaggccgatcgaagcttgcgtcaaaacgaagatgttaccttggagcgtttgagaattgatagtgagctttcttttcatttctgtatttattgggttatatccaacgtaatgaatttgagtgtcctgcactttgcaagcaccttcttgaatgaatctttcggtgtgcgacgcagttgcttcatttgatcatttatatttctgtgcttgtacttttgtttataaatataagcactgattagaatcataaacacaatacagttgaggatttgaaactgcacggagtagaggcattgaggggactccagtatctagcaattggaaaacatctgtgtggacctgccacaggttgtcctagtttttgaaatttatgccttcatttcatgttgagaaaagttgagaatatctaagagaacttatcttccatctccagatatgaccatgatgtgctgtcttcctgaacgatatgaacaaacagaagaaaacagcaaacatagtcttcaaggccttgctctagctacctgctgccaccatctttgccaatggaagcattacacaagtattttccttttttttataaaaatgccaagcatgtcaacacaaaaaggaatttgaatctgtttgtcactttcacttcatctacagactacagatatacaaatgtttgtcttcccttgaaagttacagcaaaacttgttaaattgtatgccaagtaatttgttttcttatcactgcagataaatcgttcctcttgggactaggtatcacagaggaagaatttcatgccatgacatggtttagcagctgggctgtggacggtgatcatagctacccagattccccagtgggggctgaagaaatgtcctctgaagtcaggtagggaattatcaaccgtcataatccactttctagaacttcaactttatattgaaagcttgatatttgttttatgtcattttgtgttggactagagaactagagaagcctgatcaggacgccatcggaattgagagaataatccgaagtataccagcaggggagagggcctctctgggatccatgtgtaaagatatcattgatacggggaggctattatggcttgggcagaagggtctagttgctgatcttgtaagctatgttccatccaaaatttcaccagaaaaccatctactcatcgcaaaatgtacatcttgattaggctgaaaagcacgtgcatgtatttcagccctgcaaatttgcagaaacttggatcgtaaaagatagtttcaacaaatacaatcttgagtttttcagcgacattccaagaaatattatgtctcaacgattataatacaaaaaagatgttttattctgatggttcacaaaatctccgcatggaatgaattctacaatcaaatggatgaatggaatggaagcacgttaggctgtaaatatagttgatattgacgatatataagcttacagcagcaacactgcaacaggatcctgctttaaatacaaaggaacttcacacggtaatatgttcctttgatcttagccaccacactaaaactctcgacttacaaacaacagctagccttattccatcctaaaacttacatggctccacgctccaacgattcccatctgaatgtgggtgcagcataaaccctgggaaaggtgtgaaggagtatgcccacgcagacacaaaccacagcgactcccatcacagtcaacattgctggcctataaaggaaggtttttgtggtagaatttggatacacccgtgcctgacggctgcagaggaggcaac

SEQ ID NO: 3791 - DNA, 9277 bp, Sorghum bicolor
tatcctgtatgtaaagttgtaaggattacgctctacagtactgcatggtatttttggatcaacttgtgtcttcccataagcttgctgctgtgttcaaacatttcctattggcaggactggagtgctataagtttctgtcttttccatctgctatcctcctagtgagatagtggatatgggatggattccttccagcattgtcttgttcagatctactgcctagtactttgttcatatatgatagtatgatgtgatacccctgaatatttttgctatgataatcaatgcattgtccaactaagaacaatctaaacaatgtcttgcttcttgtcagggttggttactgttcttgtaacaggctttgctttgcgggagaatgtattgattggcaagggaccaccatccctcctgaatgtattttagttttttttactgcagcaacaacatttaaggttagttgcatatggctaagtttttctcaagtcaaatactaatatgttggttggtatcccctaggtaagtgaagaagggccacccttgcgtgctggaggtttttttttttttaaatatataacagtgcgtgctggaggttaatctcacggtcggcccacccgtgtgttagctgcatctgcatcccgtttcatcctatacctgtccaaatctatacgtgtcccttatatgctattggaaattatagcttttcttcattgccattgattttaattttctttcctttatatgtcattggctcattgccatcacatagcaattatttggctgttagttgtttttcagaattacaattttgtccctaatcttgaagctccagtggatagggcgatggcgtggtgacctgaaattctagaacagaattgcatggcaggcatcctgaaaacatctaccacaagacacgaagaaactatgagcagaatgtgctgtgtgactatgggtgcatagaagtagtttaaatttgagagtgtatcctagctcataattagtgttttggaacaatctgtgcctttgcaacctctgaacttgtggggctgtatattcgatgttaactggtgcagtgcttatcctgatctggtttcggatcgtggtgaagctaacagaatttgagtcgttttcgcccctataaaaggccaccataaggtataggctagtggttgatgtgcaagacaaacatatgacctgtgtgaggctctgacaagccaaactcattgattcgtatgcagatacttatttaatctcaaggacaaatcctattgccttcaatagatattgtgagctatgttagtcaattcttctgtgcaatgctaacttctatggatgtttaaaagatcatatgattagttgacactaaccatataagtttctgggttcatatgaatgcttagagttgggttgttgtgctgatgaagttgtaacacattatctgtcggtacaagaatgtcagtcagcatttctttattgacgttcagccttcagtccgtataaatatgctgatcggtaaaaaaaaatgattttatatgctgactgatagtttgtatctgaagcaggttataccagactttttaataaaaaaatatcgttgtttgtaggctgtggtaagtgtatataatcaatattcaaaagtcacattgttttcaggcgtatttttaatactcgtcttctcgtatgtttgtgatgcagtgctgcgtcacaaatttgcgcatgcactcgtatttttttcttaatttctttttattcaaataaataaaaacacaccacgctcccaagccccggcgacacacacgcgttgcagttgcagcgccgttgaaatctgagagagagaagcaggcaggggcagcgtacttgtccctgcgcgacactgtcatcctgtgaacgaggctgctcctcgtcgcccccaaatccccaatcggccaaaacccctcccaaaccctcatccaccccgcctgtataaagccctgcgctcctccgcgctctcaacgccatccgttccatttcttatcccctctcctcccccttccctcccctctccctcccacgatggcgtccctcctcacgctccccgccctcgccctctccaaccccgccaccgcctccgacgccgtcaggctacgctccgcggccttccgctgctgggcgctccggcggcgcgggtgggcggcggtggccgccgtggcctcgcccaactccgtgctcagcgagcacgccttcaagcggcttcagctcgggagcgacgacgaggacgaggaggggacctacgggagcgacgccaacgaggggttcgaggccggggaggggttccagggggacgaggaggagctcgccattgccaggctcggcctgcctgacgagctcgtcgccacgctcgagaagcgcgggattacgcacctgttccccatccaggtgaatgaactgttgccctctgtctctcaatttacttgactcggttgcttctgactgcgcggctaagccgtggtgcagtattggctgtcgggactcgggagggggacggggaggggtccagtgggtgttcaatttggggaattgggttactgcttttgaaattcgtggtgcagatcttgtgtattgcccagcaaattttaggcgcttgttttcagggaaatataatgcaggataagaggagcgtggctacttggtgcaattccgagtggattagtccatactgacacttagcctactactagcagtctagcacgtatccgtacactccccggaaccaattagtgtgctaatgcatagatatccctattgaatttcactaatgatggatatagccagataaattagctgcactttcagttggaatgtatgtgccacatgtttttactaagctcagttgctcatgtttgggtcttcattgttgttgtattttgctcattttctgtctcctccagagggctgtgttgattcccgctcttgagggccgtgacctgattgctagagcaaagactggaaccggaaagacactagcctttggtattcccatgatcaagcaattaattgagcaagacaatggtcaaattacaaggtacccattcatctttctatgcagcttcactggagtcagttgataattaacaggcgcattgactgtttccttgaccttgtcgcaggcgaggtcgcactcctcgggttctggttctagcacctaccagagaattagccaaacaagtcgagaaggaaataaaggaatcagcacccaagctcggcacagtgtgtgtttatggtggtgtctcgtataatgtccagcagaatgcactctcccgtggtgtcgatgttgttgttggaacacctggccgcataattgatttgataaatggcggaagcctccagttgggagaagttcagtatttagtcctggatgaggctgaccaaatgcttgcagtggggtttgaagaagatgttgaaacaatattacaacagcttcctgcgaacaggcaaagcatgctgttctctgcaacgatgcctagttgggtgaagaaactgtccaggcggtacttgaacaaccctttgacaattgacttggtatggcttccagtcctccactttcatttgctgttatttatcctgttcttttgttacacaattgagagcattctagtatataatgttgtatgggattattcttaataaacccatgtggttgtttctgttgcaccatgtgccagctgaaaatgttgggtttaattcttgttcatggtgcatagcgacaaaccacaatagattagctatttcctttttcatgaatctttccgaaggagtaaaggatgacttttattgttcagtatatattattatttgtttattatttgtggaattctgattagcactttgaggacacgaatgtcacaacaacttattcatgctcatgctggttgtggactctagatatttatcaatacagtgccataggggatgcttagagtgttcttgagctgttaatttcactttcacttgaaggcccatgttgattccttgtgagataattgtggcacctgtgtctggctatggtttagttttccatatttttatgccctaatacgttattgtgtctcttcatgtgttaaggttggtgatcaagatgaaaagcttgctgaaggaatcaaactctatgctatcccactcacagctacatcaaagcgcaccattcttagtgatctaattacggtatgttaatgttgctcatggaatttttaactgccttttccctcccctcttctcaccttttggtttaacttttgctatcccacattcccactcacagcaacatcaaagcacaccattatttgaatcaacataaccataaccataaacacatgggtcgatcttttactcttagtctgattacttttccatgaatatcatttctaatttccttgaatactttggtaactgcattcatttcagcttggtttaaggctttaagctgaaaagtcttgatattgtggtctctgtttaccagttacaagttacatttagtcactccttcctcagtgggggttcgaactgcaaatggttgatgcttcctcagtgttttcaaaaaggatttgtgccatttgtttccttataacattgcgttggtgtttagtttcatcattttgatttcgtgatggtttgcctgtctcttgggatacaaaaatgtatgtcacagttgatacagttgtgttgctgtataattttactttgctttgattgagaacacaattctatatatgtatctgccatgcatattaaacattttaagggctcggttttgcttagacttggtcactttcacatatctatcgcatgagataagttgttttgattaatcagtgtcaatgctaatccatatattttgttgttaggtttatgcaaagggtgggaaaaccattgttttcactcgtacgaagaaagatgcagatgaggtatcattggcactgacaaacagtattgcttctgaggcacttcatggtgatatttcacagcatcagcgtgagcggacactaaatggatttcgtcaagggaaatttactgttctagtagctacagatgttgctgctcgtggtcttgatataccaaacgttgatttggtgggttcacaatcctcttcacttcacctgattctagatactgtgattctgtaaaacacttttccaaacacgtgtgttaactcagtatcatggagctgtgatggttagcttaactatgtctaacaacttctgcttaccaaattattatcgcacattcttctagaaaagataatcagcgaaaattcctagtttaagacttcatattatagcgccaaacgaggtatcatatcttcaagcaatgtacctaggtttctttttacctgggcatttggaaatttagcaattaaggttttcatcttgccactaaacaaattcaagtgttcttctgtattttagtttggcatgcattggatttcatactggaacatcatcacttgggtatgtcttatagcatccctgtctgatgtcttgggctggttaatcttgtgatttacttgatactgttttttatcacttgaacttaacttgtaaagtgcatttttgcattatgctatttgaaatgaactgtaggcatacaatgcctaattattgagaggcttcatttttgtatgcaggttatccattacgaattgccaaatgatccagaaacttttgtccatcgttctggacgcactggacgtgctgggaaagcaggaactgcaatcttgatgtttaccagcagccagaaaaggacagttaagtctcttgagcgtgatgttggttgcaagtttgagtttataagccctccgtccatgggagaagtgctggagtcatctgctgagcatgtcattgctacattgcgaggggtgcacccagagtcaactcagtactttcttggagcagctgagaaattaacagaagaattaggacctcatgctcttgcttctgcactggcacatctgagtgggttttctcagccaccttcttcacgttctctgatcagtcatgagcaggtaagaagtgacacaagaaattacatatgcattgttttctattgtacctaccattgaggtcaactactttccacagttaagtaagcataccttacatctgttctgccattgatttgaacttttgatcctgttctggattctgttttctagatttgaaaattatctggttgatattatatgactattaataccaacaactagcgcttttttctaattatgaatttataacaggtcatcaagcgatcatctagaaaagctccataacttttgttgtgcatttgtcttttcttgtggttttgttcttaaggaggacgctctcagatgaattctttctctctattaaaatgcagggatgggtcacattgcaactaactagagaacaaggatatggcagaggcttcttttctcctagatcagttactggttttctgtctgatgtttattcagctgctgcagatgaagttggcaaaatatacctaatagcagatgagaacgtgagtttttttcctgactatattaaattgttccccgttacaattgtaaagatggtgtctcttactacttccataatgtgcattggatctagttagagcgcagggcactagaaagatggttttcttgtattaaaactgtaactgccttgttctgcgtgtccactctctttttcacttttgtttgctcttgcactttatttgtgtaaagctgggcatgatttccaacctgatttcgactacaaccatgaaatgaaagtcttaatgctgtggtgtcagttagtgacaaagcatattgtgccacagttagtaggatacagcttgctggttggggttattttttaaatcctacagatttgtttggatgtggcatctggaacaattaattgtactgatgcttcgtctacaatctgcgagaaggaaaattgtatgcataataatgaaccaagacagagaatatattttatgttatttcccttgttctgatgaatttttactgttgatcaatttattgttcatcatatcaggtccaaggagcagtcttcgatttgcctgaggaaatttccaaggacctgcttgctatggagctccccccaggaaacaccttaatgaaaatatcaaaggtattttttgcagctcatcttctcaagttagttatggacaatttatgtcatgaaatacacgcagatttttatcttgatggtttatcatgccatacgttacagcatgtgctaaaactgctggctgagatatacagcatgtgctaaaactgttatttttattttgatgaacattttttctactttatttatctccaaccaagcctgcttaaattgcattaattttatagttcctaatatttacagtcttattccgaatgtgattttggttttctgaaagtcagtgatgactgttattctttcctgctttcagctgcctgcgttgcaagatgatggtcctgccactgatagctatggtcgtttttccaacgaccgaggttccaggaacaggcgttccaggggtggaggtgctgcaagaggccggggtggttgggacactgatggtgaggatcgttccaggggtggaggcgctgcaagaggccggggtggttgggacactgacagtgaggatcgattccgccgtggtggcaggagctttaggtctgacaacgatagttggtcagatgatgactggtcaagcggtgggagaaaatcaaaccgttcctcgtcctttggtagccgctcatcatcttatggcagccgtggctcaccatccttcggtggtcgctcatcatccttcggtggtagggagaggtaagcttcgcaagattctatgcaatgtagcaaagttagcaattctaggttcgtgctacccaggtattggttcttccttaggtagttcacttagagcgacctggtatttccttcatcaagcttgagtatccattagtataggagtatatggaaacctaatgtttgattactaatgctgacaggtgaagtagtgtctgtttagcctactagatcttgccacaggccattcttgcctcctggaaccatgatccgaaattaccttgaaagttattctcagaacaaaagataaatcagttaccacactgcaaactagtactacgcatgacgatctttctgtttctaaggctaatagtcttccgcttttttgcagtaacagaagcttcagtggcgcttgtttcaactgcggtgaatccggtcaccgtgcatcagactgcccaaacaagtagatggtagagatggcgcattcttccctgccgcacagggtcaccccttttgatgatcctgatcggcttccaacaagacggctggagcatcaggacgcacgcagagcaaaaaaatccaagccccactccacctgctgatcagtatagccagcggacgttattactggctggcaacccccaccgtgcggtagctacattttttgtgtggccgtctcgtcggaacagaagattttggcatgctgactacagttattacgtccagaggagttccttgagcttattcatgtcacacgggctctactctactctataggaatatgctgtattatttcttctccttttgtgttcttgattgaggatctcaatagaactgtaaccacacgaactgtgtacagttgctgctgctacaccgttgcgacagagacgcaatcacagtctgcattatcttgcttcagtgtgaacttgcataggttagctcccgttgcttcttttgacacagaaaatactatcagactttgttgcattagaaaagggttacgctgcgccggttgctccggcagctcgtcctcctgatctgacctcgcaaacacacggtccggtcaacgcagtcgcagcgcacgacacgactgcagggagaaagtccggagcggaggccgccgcggttcaacgtggtagttggtggttggcccgccgtcgaggcgaaactagaagcagaccacgccggccggtggataccgcagggtgatgtggtacgcgtgcgttgcgtgcttcctgtccgtttaggagttgacagggtcgtgggtctgtacatggttcggtttgatggggtgggtggcgaatgataccgaactcgcgaacgatctacgtggagatacagcagatgcaaaaaaagacctgaggagaggcttgagactattccgtcaggtcaggtcaagatccatgcgcatccatccagcatctaaaaaatgatccatgtccagcggccaggccttctat

SEQ ID NO: 3792 - DNA, 7676 bp, Sorghum bicolor
ttttatatttttctataaattacaacatatttatcaatttttaattgatttaaagaataaaagaaaagtaaactgaaaattttgtattgagaacctagaaaaacttttattttttttttctcctcctccctcagcgtaacgattccggaagcaggagctttgtacctacatcctatagttttcttcttaactttttttacatgagattttgcattgaccttaaaaaaacttttatttttttctcttccaccacgtactaggagcggattctggaccgacacggatatagcggcgtggcggacagaaacgattggcagattgaaatttttatgattaaatattaggtaaagataaagataaagatgaagatgaagataaagatttagaaaaaataatatacatatacttttataaaaaaattttaaaataaatctattcatataattttcacatttgtaaatttaataatttaaggttgctctaaattgcgtgcgcgtagaaacatttttgtttgtttgtttttttttggtatttttcacgatgaagattctcaaggcccgtttagttacggtaccggccgtcacatcgaatgtttcgatacatgcatgaagtattaaatatagactatttatgaaactaaaaacatgactagagagtaatttgcgagacgaatcttttaagcctaagtagtctataattagtcactaattgttaaataaaacaaaaatgatacagtgctgttaaactttaccaacccaaaccaaacaccccctcaattgtcctctatggccttgtttagttcaccccaaaaacaaaaaacttttcaagattctcatcatatcgaatcttgcggtatatgcatataacattaaatatagatgaaaataaaactaattgctgtatagtttgcctgtaaatcgtgagacaaatcttttaagcctagttactatatgattggacaatatttgtcaaataaaaatgaaagtgttataatgttaaaataaaaaaaaatagatctgaacaaggcctatatataggggtcgctggttcgctgctgctggtgaaactataagccagtccgtttatgtatgtttttgccaaactcatgcgtgggtgctgaccgcttcaaacttttagcctaggacttcacgtgatcgttttttctttgtgtttatttatagtgtaccttatctctccctctctttctatatattaattgtatatctcatagttatatttaaaaaacattatttactcagcaattctgctcatccgaattgattaggtttcctatgtgatacaaacccggttatctgaatttaagtcctcaattatctaacaatagttattttttctttagaatttgttctctgattaccagcgccatttgcttatttggatttttcaatatgaatgtactagcctcaggtcaaattgtcgcaccgatttagcatggagaatattttttatttaattaactatttgttgatttgaatttcgacatagcttcaagttgacttattcgtcatacgcattaaaagaaacattctttgattgaaaaaaagatgctttgttgattcgaattttcaccaccaaaaaatgtaccaaaatgcgagaaaaaggggagaaaaaaacatcctaatccgtttgctgaacaaaacagttgagagaaaaacatgcacgtccatccatctaactctctaagcatgcgagcagcttaaacctcgtggacggggcgccacggcacaacataatccgttgttgttctttgccgaagcacgcaggtggccacgccggaaagccaggtgctgcctcgacgtgtcccgcggcgtccgcgcaccctcccctccccactccactccgccctcgcccgtcacccgcgtgctcctccctcgcgccccgcctgccccgccccgcagctatctatatccattgttgctcgttcccctcaacaaccatcgatcggcacacttcaggttgctattatcctctagcagtccatggccacaaccagcctcgcgctctcgctgcgcctcacgccgtcgtcgcggccgctcagcctccgtcgtcggggggccgccgtcgtcacctgtcgcgccaccaccgccacgttccaccagctcgatgccgtcggtgagtgcttgtgcctctcgatctaaggctgtttgttccgtattgagattgggtatgctacaattttggttgattaatgtcgtacgtggtaccgtctcatctctcgtgcgtgcgctcagcggtgagggaggaggagtccaagttccggatggcagcagcggagggctgcaacctcttaccgctcacgaggtgcatcttctccgatcatctgacgccggttctcgcgtaccggtgcctcgtcaaggaggacgaccgcgaggcgcctagctttctcttcgagtccgtcgagcagggctctgagggcaccaatgtggtgagcaatagattctatcagtgacacccggtcgcccgactctcggcctctagtggtctagccgtctaatcgaacatgtgttttgcaggggaggtatagcgtagtcggggcgcagcctgccatggagatcgtggccaaggctaaccatgtgacagtgatggaccatgagatgaagtcgaggagggagcacttcgtgcctgatccaatgaagatccctaggacaatcatggagcagtggaacccacagattgccgacggcctccctaatgcattttgtggtaccttttccgcttcatgttactctagatttaaaatgagaatgctagctatgatttgtgtatcttaaattgctgtcatattgccaattgccatagatgattgatctatgaacttcctttaaggtaaaaacatcctttgttgcctcttgctttacactagcatacgtctacacattgctacaagagttcaaaattttaaacggaataaggatatggaaaaatagtaagtcaaaatcaaccaaaaaaaataaattttaacttagcttaataatataatattctaagccacactcaaataaatagtgtttaaaggacatcatacaggtcataggtagcttcatgagcatatccctctcagtgacctctccttgatatgcccaagcagttttgttgcgacatttgtgtacttttcaatagctagaaagttgtttggtgatatactaatattacttctcttcgatagctagaatgctctaaagggaaaacatgggaatagttctttgctctgtatcaattatggtcacaacatttttatgatattttgtaggaggatgggttggattcttctcatatgatacagtacgttatgttgaaacaaagaagcttccttttagtaaggcaccacttgacgatagaaaccttcctgacatccatttaggcctctacagtgatgtcattgtgtttgatcatgttgaaaaggtatgtaccatatacatcatccctttataggttttggttgatttgttaacatatttctctctaattaattaaaaaattaaaaattatttatatgtccataaattgcatttatatcgtataacattggacatgattagaattatatcatcaaatgtttatcgctccatttcttgtcatgattgcactttttataaattatccacaaccacatatggtgattgacttttgatatattatcaccctcttaaatatcaaagttttccaatcgctgtatggtgatttttttactaattttataacattatagacaggtaaaactataccataggaacaatgtattttttcaaagtgtatttattttttcaattctacttttgtttaatattcataataaccacaaatctggcaaatttgagagtaaagatcttgttgcttacaagtctaatctttatttgctatagaaaacacatgttattcattgggtgagaacagattgttataattctattgatgaagcatatgaagatggaacaactcgacttgaagctttgttatcaagattacattgcctcaatatgtgagctataagacttacataattcctcattttcataaacatcattttttcactagtgcttaattttactaatcaattattaatccttcttgtagcccaatgctttcttctggttctataaaacttaatgttggaaacactgggtcagtaatgcaaaattcaacgatgtcaagagaagaatataaaaatatagttgtccaagctaaagaacacatcttagctggtgacatttttcaagtagttctaagccaacgttttgagagacgaacatttgccgacccctttgaaatctatcgtgcattgcgcatcgtaaatcctagtccatatatggcctatctacaggtaactataatgcatgtaaaatatatagtttttaacacgttggccaacatatactaattgatatacctgtgattcatctcttatgacatctcttaggcacgaggttgtattctcgtggcatcaagtcctgaaattcttactcgagtgcaaaaggtaatactaaaatataaaacatatctccatgttatatttttacccctattttttagaaattgtttaatatctatagtgatgtaggatgtataaaatagtaacatagtttatgattttttcaaatattgaatgaaaacatagttgagatgtgatgtgataaaattaggcatgaattcaaaactctcaaaactagatattttggcaacgttattagagtcaatgtggtttcaaattatattaactttttatatgcttatgttatcataaaataatgttagtgtttactgtactatcttaaatattataaaaagaaaaatattacagtgaagtgaatataatgaactttttttactattatattttttagaggacagtagtcaatcgaccgcttgcaacattattagagtcaatgtagtttcaaattatattacctttttatatgcttgtgttatcataaaataatcttagtgattattgtactatcttaaatattataaaaaggaaatattatggtgaagtgaatataatgaacttcttttttattataatattttttagaggacagtagtcaatcgaccacttgctggaaccataagaagaggcaaaacaaaagcagaagataaagttttagaacaattgcttttaagtgatgaaaagcagcgtgctgaacatattatgctaatagatcttggccgaaatgatgttggaaaggtttatttttctcatttcttgttcatttttatttttgttggcattctttatttctaattcattagaatatgtgtcattgtgtcatttaaatttctttaatatcttttagtaagcaattgagaataatatccatcattttgagaagcttctaaatgatacatgggcccatggctttatgttaatatatagtcggctctaaaactaaagaattttagcatggtaaacatgttaagaaactggataaggatgcaaatttctttagagtagagatattttatgtcgaatgttcaaatggttgccacatgctatgaatctatcttttgtgtacaattatatttcagttttatgtttaaacaaattttagcaactttctataacaacaaaaatggataaattttccatcagacacatcattgtttctacactattgttagtgctactaataaattgcatgcaatatcaatgagaagaacttttggttacgatttagataagacaaactcttatatgtgtccgttgtactatggttcagaaaaagttagtttggtagtttattagttattatagttaatatatagctatcttgtatcatctacaatgaacttgtcgcatatacaggtgtctaaaccaggttcagtaaaggtggagaaattgatgaatattgaacgatattctcatgtcatgcacatcagctctactgtgagtttttttttacaataataacaaaattcaacaatatcaaaattttcatggatgtattaattaaacgattctcgtctttatcatataatacaagtttatcattaaccacttattatgattgtttatgtggtaagtagaatactgattatatagtataaacaagttaacatattttcatgttcatgttttgtattatcaataattatttataagagacatggctgtttttaaatttatgtaggtcactggagagctacgtgatgatcttacgtgttgggatgcactacgagctgcattaccagttggaacagttagtggcgctccaaaggtaacttattgaaacagtagtggtaggcatgcataaccaaggaatgaacaagcatgattatatccctaaatgttgttttgacattgaaccactacacattagctgaatgtatgggttcgagtatagaaataaaattcaaacgtcacttgtggatataggcaattatattgctttacgtattgatgcttaaaatgcaagggactatatctattctagtgataaaccaactcacacataaagataatcataggtatcatacttaataggtgtgcaaaatattactcataggtttaaaattttacctattattagataatttgttgtgggcagctatttactccattcatatcttagctggcatattgccatcattaataaaaatctctgtaatatgactaaattggtgataaacttgttgtaaatttatgagttttagaaaacattaagaaacttataataatttagggtatatcatttatatttttcattgcatgacctttgactaagtggtgtcttgtcctcaaataatgttgttggcaaatatttcttgttttttccctataggtgtgaagttgtcttgagtctgattatcatgtcattttgtgaacccaaccaggtgagagcaatggagttgattgatcagctagaagtgaatatgcgtggaccgtatagtggtggctttggagggatttccttttgtggggatatggacattgcactcgatcttcgcactatcgtcttccccaccacatctcgatttgacaccatgtactcctacacggacaaaaagtcacggcaagagtgggtcgctcatctccaggctggagctggcatagttgctgatagtaaaccagacgacgagcaccaagagtgcctaaacaaggcagcaggtgctgctcgtgccattgaccttgccgaatctacatttctagaagagtagcctagtgcaccagcttaatgatggaaatgtatcttttcattctctgtataattaattatggattatgggttatattaaaaaatatacttagcttgaatataaactcaattacaataaaattcataaatctctataactaaaaattatggagaggacccatctaccacatctatggtgaagccacaactcccctttttactatgtcatgataggctatctcatcaacttagtacacaaaatggagacaattttcaaataatgtcaaagggttacttttcaaatatcgtaaatatatttatagaacattaacatcactaaatacatcatagaacatcattaaatatattatagaacatcacatctattatagattacatgtatactaagttaacaccataagaaacatcatagaacatcacatatatatactacgtaaatatgacataacacaacatagaacactaaatatatactacataaacatcgcatatatatagaaa

SEQ ID NO: 3793 - DNA, 2878 bp, Sorghum bicolor
ggtgtagttatgacttgtatatatatgctgttaattgttatattggtgaaaatgataaataattggtaaaaatgatgaaatattttagcatttggtgaaaatattgataaacatgagctattatcggtttgatggactgtgggctggcacgacacgacgtgcttgacgggaactggttcgcgggtcgtgccttgggctgaagactagacacgaagcccgtagaggcacggcccgctaggcacgatggcccgtagcggcccagcgatctgtggcacggcacgacacaacgttgagctggcccggcacggcccgttggacatctctaacctttaccatcaaacctcctcccctaagattatatgttacaacttcaatgactttatgtaagccaaatcatgtgggcgggtgtacataattcatttgtagtggttttgggtggtcacatgttttgttgtataaaggatcatctttgagtgatgtcactgtaaagttgtatataatatcaatgtttgtgatattaaactttactacttatgatgtaaaaaaattattgcttgtgataagtacttttcatccattctttagggttttatggtgaaacattgactaaattttgaggtatgtgatatcagacaagtcaagaagttcactagccttttgatagaagagatagcatgaagtcacctatatatatagatcaatataaagtttatattcttatatataacatcaattgattgattagatctcgtagcatttctcagcctcataatttacaaggttgaatagatctaggccccattttcaaatttgggttttttgattgatgaatacaagtgtttatgactaacctgtattttgcaaggaatacattcacattgatgtcacctcttggatcgggacagaattgcctagaaaccggaaattagaagcaaatttcctgtgaaatctacatataatgctttgacgtgttctgagagtgcctcttcattcaagtacatttggaaaggaagaatttctccaaaaaattaagatattcctttggttgatggctaaacaaaagtgtttcacatgcaagcttgtgactttgaatcgtccttgctccgtttagtcttttttgccttcctaaacaactctgaaaactcttgatgtatttttcgttcctgttgctatggaaatggggagatccccttgttagaaaaaagttttatttttactgtatgtttttttaggtgaaggcagtttttttttaaaaaaagttctcattactataacaaagaccctacacacaactattgcaaaagaaataaggaaagaagaatgcgacctagtatgctttaagcaacatagaatctcggattaaagatacatatcaagacaaccagtcaacaacctcctttctaactactaaagagaaaaggcttaaagtggttgctcgtatttctcttgcactacgaagtctgatgatcaaaatccatgagactcctctatcctcatacatagctatggcacgaacgaattcgtattcaatatgaatcgtattcataatttgaaaaacttgtcaaaaaaaaaagttgggagcaagacgaatcgccccaaagaggccaagacaagactacgtacgtgcgtcgcacacggtcctctcgcgcgccccggccacttggcccgccgcacctgtgcccgtggtccagccacgtccacctccgctgtttccgcggcccgatcggctcctctcgcagcggcagccggcagcaagcaacgcgcgcgcgcgccgacctcacctcaccacgtccgctgcgcctgcccgcacccccaccccacagcggataagccgcttgtggccgcctcgccctccccatcacgaccaccacctgcacagtcaccacgcccgcttatatgcccacctctcgccgcctcacggaggagaaaaaaaaagaaggcagccattgtttcatttcatcccgaactcccgatcgctcgcaaagaagctagcttttagcatggcgtcagtggcgttcggcagcaccgtggcggcggccgtggcgccgacctcggggaggacgcggccagcgcggcggtccgtgctggccgtgccgccagccgccaccaggggcggcccggcgccggccaaggaggagaaggggctcggcgagatcatcttcggcttcatcttcaagaaggaccagctggtggagactgacccgctcctcaacaaggtcgccggcgcgtcagccgccgcatcctcccgcgccaagccgccgccgcggggcgccgctaccacctccggcaagaaggctgccgctgccgacgacggcggcagcggcggcgggttcaacctccccggcctcggcgggttcttcgccaagaaaagcagctgaacgtgtccagtgtgcgtggtttacggattgtcgaactcaaagctggatttggctttgagggggaaaaaaattggctgcgcatatatacgtgtggtggtgtgaggttactctcgctcccccaaaaactcaagtcatctttgatgtcatataatgtgatatatttttacttcccgctgcacctgtgattctttttttttccagctaagtatatgacaaatgggttattaaaatggtcaagctacttaggtgatcatgtttgatttgtctcccatcttactttaatcttggtatagcaatagttactcgagaacaagtatcgtttggctttgctgcgccaatttacagtttgggaattatggacaccactgaatctagatattgtatactaagtctcagataaatagaattacctctctttgagagagataataggcacaaaccgaattgatcggtgatgtttttgccatgaattcctgaagaggactggttgacaaatgaca

SEQ ID NO: 3794 - DNA, 4145 bp, Sorghum bicolor
tctatcataattttagtatagtattcagatgacatgtttgcttaactcgttcaacaaagagatcgaaaggttgtctagctttcatagatctatctactactctactagggctagtctcctaccatagatgcttcatgtttgcgctgaaatttcttccaagtactgtacttgaattgcgctagtgtagcctcaccacggccttgtttagttccgaaaatttttgggaaatggacactgtagcattttcgtttgtatttgacaaatattgtccaatcatggagtaactaggctcaaaagattcgtctcgtcaatttcgaccaaactgtgcaattagtttttattttcgtctatatttaatactccatgcatgcgtctaaagattcgatatgacggggaatctgaaaaattttgcaaaattttctgggaagtaaacaaggcccacgtacatatacatatagatatcaggagttcaagacaggtgtgttcaactacaggagatagaaaggactagtagctgcaaatttggaatcaatggctatgtactctcaaacactgttgttccctgtgaaaaagcaagcaaacaaaataaatcgatccgtatagctctctctctacctagcagctcttcttcccggccgggcaccagctacacctctactgctcatctgtacattgcacaaagacctgtgtgctgtgtaagacgtacacgtactttattgctttatctacccctatgtacttaaagttgcctactcatatagaactgtacatacatgagagcactgtctacttgtctagctatacttgttaactttggtcttgggttgggggagagagagaaagagagagaggtagtagagcaggaattctctacaccaacaccagctagccaagagtccaaagagagtcgtagcaagagtaactttaccactgattgatctctttcatcaatatggacataaagttgcacctgcgcaaacactagctagaatgaacccctggactggacagcttgtattggtagctagctcatgttggaaacctcttactactagcttagcatgtacactgttcatcccctctatctccatctatgtgtgctagctagccagctaatcaagcagggaaggaagaagggaaaaaaaaaagaagcaaagaacacgcacaacaagacagccttagcttccaaacagtagcacaacaggcatcaccacctcttcctgctgcctccctagggtttccaactttcctcatgcataaaaaccggccccccttgcttctctcatgcatcaccctcccactcttgctgctgctgctagctacatccatccatctcactctcacacacattgcatatccttagaagctaaggaatgaagtctcttctctcctttgttgcctcccatatgcatgtttcacatccattatatatataatgcaaggcctccactaacacacccaaacaaaaaaaaaactaaaggggggaatgaacaaacccgcccccccccccccccccccattctcctttaattttattcctctcgctttcgccctcccaacgatggatcccatctctttcttcccctagctttcctccctccggcgcccagcttcttcctctcctgccaggcccagagagcccttctctcctcttcttcgtcttccgcttcgccgtcattcccttcgatccacttccagtcgtcgcgcgcggcagcggccaagagagagagagagatcagcaggctcgctagtggatgttattctccgatccacctttattatcgatgcacccggccctcccccatccttgcatgatcccctaataaagcgcctatatacccttatctcgcaaagcaagaagaggccggccggctcccctcccagtcccagtagtgcgactagctagctgcgagaaggaacaaacaaaccagctgctgaaaagaagctctcactcactcactcacaagtagcaaaagatcaaaagaaatcaattctataccatggtcttttcttcggttcctgtctatcttgatccacccaattggaaccagcaccagcaccagcaccagccgcagcagcaggtaaattttttcgctcccaaaccaaatcgcttcttccgtctcttttgcttttctcgtttcgtctcctccttgttggccaccatagcgaaaacatctccatgaaaaaagcaacgccgccgccggtcaagagctagcggggacgacgaaatggagaggaaatattcctagtctcttttgccaaatctctcttctctctgcttgaatataccaggccgcgtctcttttcgtttcatatattcgctgatatcaatttcgcctcgcccgcctttcttcttctcgatctttaatttctgtgcccgtgtgtttgatttattggaaatgatgctgctttcttcagcaacagcaagctcaccatggccagcttccaagtggcggcgccggaggaggtggaggcggcggcatggaagcgcatgcgcatcatcatcatcatcatcagctgccgccggtgccacctcctggcggggctctcatggcacctcgccctgacatggcggctgtggttgctgcgagtggcggcggcagcacgcccggcgccggcggcgggccgactgccggaggctccgctatccggccgggctccatgaccgaacgggccaggctcgccaagatcccgcagccggagccggggctcaagtgcccgcgctgcgagtccaccaacaccaagttctgctacttcaacaactactcgctctcgcagccgcgccacttctgcaagacgtgccgccggtactggacgcgcggcggcgcgctccggaacgtgcccgtcggcggcgggtgccgccgcaacaagcgcaccaagtcgtccaagtcaaactcgtcgtcggccgcctctgcttccggcgcgggcgggacgtcttcgtctacctcgtccaccgccaccggcggcagcagcgcggggggcgcctctggcgctggcatcatgccgtctcatcaggggcacgggcatctgccgttcctagcctcgttgcaccacccgctcgccggcggggatcactacagcaccggcgcgtcaaggttagggttccccggactgagctcgctggaccccgtggactaccaccagttcggcgccagcgccggcgccggcggcgctgccctcgggctggagcagtggcgcctgccgcagatacagcatcagttccccttcctaagcggccgccccgacgccgtgccaccgacaatgtctggcatttacccgttcgacgtggaaggccacggcggggacggtaccggcttcgccggccacatgctgggcgcctccaaggtgcccggctcagctgggctcatcacgcagctggcgtcggtgaagatggaggacaacccagcgtccgcggcgatggcaaacagctcgccaagggagttccttggtctccctgggaacctccaattctggggcggcggcagcaacggcggtgcaaatggaaacaatggaggaggcgctggcaacgccggtggtggaggcagcggcggcggcggcggcggaggaggaggcactgtggctccgggcagcagctgggtggacctgtcaggattcaactcgtcttcgtccgggaacgtgctttaaaaggtagtagccctatttatgcaaagccctgaagcttcattttagtcatggcttctgagaaaaaaaaaatcaacagaaaaggagttgtggtgcaagatcataggggctatctatatctgataggtatcgtctgcgatgatgatcgacggcggagatggtgaattggtatctagaaatggtaggcaatcgaaattagtttctgttattattcagttcttcatgtgctgttcttgtttctgctatctaggcagcagggggtgcaatttctatattgttgtccaaatattatatttcaggtctatgatatatgtgaacgaacttgtaacgcatgcatgttgctaggtttattactagctttggtgtgaaaggtgataatatatatacttatgggagtacttgatcaagagatcgatcagcctgtttctagctacatgcatggtgaattattcatctgttcgagacagtttgcaacaatggatgcttgttatatattactcaat

SEQ ID NO: 3795 - DNA, 4196 bp, Sorghum bicolor
acgagggcaaattatagtccacagacatttgtattgtattgttcttgaaaggaagaataagcggcatgtcctttttggtctgtttctgaggtcgttgttctctggattttgatagtatagtagttgttcaagggatcacaacaggaggcgtgagaaatcacagcaggaacaagagaattaatctcgataaccagaggagggaatatcttgctttccctcgttttgaattgtgtattaataaaagcaatggaatagttcaccacgttggcttcttcgttggactgataaatcatggtagaaagtatttttggtagatttgttgtaaacgatgccacaggagagacttgcacacactatccctcccgtattactccttgaattgagggactatttcacattcagtcaccgctcacgccttggcattttagaagttttagctatccaaatttaaattgaaggaaaaccgaatttgaatgtaagccacttattgttattattatggtaaagaataagttaaaagtagagtaagatagctaggccttgtttacttccaatctcaaaacctaaaatttttcaagattttctgtcacatcgaatctttagatacatgcatgaagtattaaatatagacgaaaataaaaactaattgcacaatttgatcgaaatttacgagacgaatcttttgagcctagttagtctatatttgaacaataactaccataaataaacaaaagtgctatagtgtcgcgaaatttttcccaacaaaaattaaacacggccctactagttgtatcgtatcagcgcttctcctacggctctattttatatactaacaatagagaagttgtatcaaacaagatacatggcttctaattagttgagacagggtcaccctcccggcggaacatcccaacagtaaagcatcaccatacaattattccgccaccgaacggaaaaaaaatgcagaatggtaacatgctgaggatttggattttagatagaaaaaagttcgctgaggttctggactgcgaaagcttcttctatggagtagtttggttcggtggagtcacgtcccgttccctgaatggaggggaatggttgcttcagctacccgcaggaccttggtaccgattcgccacgtcatggcatctcgcgcaactaccactacatatgccctcggaagcacaagcatattacaaagttaccacgatgacgtcacccgagaactatgcatgcctacctttgtacggctatggcagccgctcatgccccaatcgcatgcgccggaggtcggatgatgcccgccgtgtagttgcaggccggtttgatcggctggccaagttgcagacttgtttagtttcgaaaatttttggaaaatcaatactgtagtattttcgtttgtatttgacaaatattgtctaattataaagtaactagactcaaaagattaatctcattaatttcgaccaaactgtgtaattaatttttattttcatctatatttaatactccatgcatacgtctaaagattcgatatgacgaggaatgtaaaaaattttgcaaaattttctagaaaaggcctaaagctacgaaaatggagctagtgagtaacaaggattgtttttgaagtttaaaataggctgatagagccggccaatcgtcacaacaatttttttttcaataagcacggtcggtagtacgtctatgtttcgaagtcgtagatcagtgaaatatcatattttttgatagacaaagtttaaactatgattcacttgtaaatttattcaatttgacttgatgaaatgctaataattttagtattattattattacgatacattttttatatttacatcttgtttttctctatactagaaatactaacagtattttggacgtacgtgggctcaaagtattaaatatcaatgctcccattgactttcgtctagaacatcgtggcatgcctgcaaattccagccagaaccggtggcaggtggcacgctagatttctttatttatgacgactgctcaagtgtcgttcccagctaccctcccgtgctctcctctcgccgtccctcctccatatttatcgcaacaacctcgccctccatacaccccaagccacacagccccgtagcccgcagcatcttctgttacgttgcgtccggttccctcgcgccgtgcaaacaaagaaaaaaaatggccgtgccggaggtggtggtcgagggcgtcgtcttcccgccggtggcccgcccgccgggctccgccggctcgcacttcctcggcggcgcaggtgcgttgcgtcgcttcagggcaggctccattccgtgccagtctgtcgtctctcagttctggtggtgcgcggagtatggcatggcagctaccggttgttgacagcgcatgcgtgcgtgcaggcgtgcgaggcatcgagatcggaggcaacttcatcaagttcacggccatcggcgtgtacctggaggacgcggccgtgtccgcgctggcgaagaagtgggccggcaagacggccgacgagctcgcgtccgacgccgccttcttccgcgacgtcgtcacgggtgagtggctactgtactgagagccagaaaggtgccttgttgtttttatttgaagaaaaaaaaaaggtgccgacggtcaacactgcagcaccgtgccgctcgtgcgtcgccgccgaccgccgcccgccgcaagcgaccgcccggcccgacagaccgaccgatgtgattgattgattgatggcatggtcttgccgcttttgtggtgtgttttttccttaaaaaaaaaatcaggtgacttcgagaagttcacgagggtgaccatgctccttccgctcacgggcgagcagtacgcggggaaagtgacggagaattgcgtggcgttctggaaggccgtcggcctgtacacggacgccgagggcgtcgccgtggagaagttcaaggaggcgttcaagcccgagacgttcccgccgggcgcctccatccttttcacgcactcgtccaccggagtcctcaccgtgagtactataccctacctgcctgttgttgtcgtttttttttctttcgtcatttccgtgcgaaataaatcggatggtgacacgtaccagcgctgatgttctgcccccgatccgttccgttccgttccaggtcgccttctccaaggactcgtcggtgccggcgtccggcggcgtggcgatcgagaacaagcacctctgcgaggccgtgctggagtccatcatcggggagcacggcgtgtcgccggccgcgaagctgagcctcgcggcgagggtgtcggagctcctcaccaagggaaccgccggggccgccgacgcgccgcaggcggagcccgtctcggtcaccgcctgagcgagcgagccgcgaggagaaagagaaccagccagtcgagcaatcagatcgttagttgggcggcatgccatctcgcatctgccggccttgcgtgctccgaagacatgccgcgccggtgcatgcgcatctgtcgcgtcgcgtctttgtctgtctgtgcgtcgtgtttgtttgtagctttctggatgtgccgttcgctgggtaacatttgaataaaaaacgcggatatatacttcgtactatttgcacccctaattccacagcatgtgtgaccaaaccagagacttttccccccaaacaaataaaaacaaacagagttcctgctgtcactgggagtgaggcatcctggattaatcttctctgcttacctcttgacagcgacaatcttctctgcttacctcttgacagcgacagagaacgagaaaataaaactgccctccgcttcagtcaaatccttagcagctatggtttttttttcctaacttatgaggctctttatggcctaaaagttaaatccacgtgctcagccgattcgctacaaggggataaaaacataaacttataggatgttataaaatataaacttaggatattattttataacgtgagaacataaatttttggggtttatccatccaatactactttgacattacttttcaacaaatgaataatatttttctctcataataaatcagcgcaagcagaagcataagccaattttagcgaagtgatttgctgaaattatatatttatttagttttaaattttgtaaaacacataaataaggaaagtttagatctaattgatgcatgcatgatc

SEQ ID NO: 3796 - DNA, 13238 bp, Sorghum bicolor
tactgaagccaatgcactgtccttagaagcatcgatccaaaaaagtgttgaagaagaattgtattcttcccttgaggtacattaatcttgctcatcttggaaacttttttttctttgtttttgtatcttacgtcagcttctttacatgctgtactgttctctgttaaaagtcgaatacttagctctagatcatcttggatatatgctaatatgtgtactaggacaacaatggataatgcaaaactgtattagagttaaggccatgaagctcgtccaaatgtcttggcttctagatgccttgtacatatgtcataaattcataagcctgcctacagtgcatgagcataagcttaaggggctctcgtgttcttacccccattttgaattctaattgtgattttgcactcatttatttaacattacaattttgcccctgccacttctcaaaacgaaggcagagtttaacctgctttgtttagaggagttaacggtgtcagttcagctacaaaagactacttttcccatgtgaacttgcccctaggtttttgagtactctgtgaatttaacctctattttggcatcaaatatttagaaaaaaatttgaaagaatttttacataataaaattgcaaatatttcaaatctaagcaaagttcaacaagttgtacatggttaatcaaccatcggcgaaagccgggagggtgaggtcagggtagtattggctttttttttgcacttattctttttatttaattcatttattcgtccttcggttaacatagtctagagtcagggcgaatgatggcttcagattcaggatttaaaaaacaagggtaaaatcgcaaagttgaaaagatgagggtaatatcataattgaccttcaaagtagggtgagaaacaccaatctccctaatcttaaactcctgtcacctaacctcttcatgaagctaataaatcctacaagctcatgcccttgacttctccctgacttttgttctgctattgtattgtgaccttattgtttccacacacacacaaaaaaaagtattgtgaccttcctgtctaaactagcatttgtcattattcccctcttcaggagaaagatgtgagagtggaacaccatttgcaccgtggtcgagccctagctgctttcaggcatcttattgctaagagggcttcacagttgaaatcagctagtgcacgtcaagtgatatccacacagtctaatgttcaagcagatgtacaattgatgcttgctcctctaagtcaagctgaacgatcaattcttatatcggtatgtccattctcctgaattgattttatacccaatgactgtccatgctgtcagtatccatcaagtttctgcattgcatctgaagcattactgaaatactgagttccgctttacagataagcatagtcatacaaatttgtccatagaatatattgtccattttgcgacttattaggtggcagtatcccagttattttcctggaaatgatgacatgttttagttccacttctgaatttggcacaatatggagaaccatagcactcataatcatactaacttcataaaattttgtacattttttaatttagtagtacacttttcatttctccacttactctaaataaattgtgttgcattgggcaatgtttcttcaaatgttttgaatttcgattattcatataatagtaaatatgtgatgaactgagtaaaagtgatactaatatttatccattttattcccttatacaatattgtcataatatttacgaatatattgcctgttgggtagtattcgcaatgtctgaagcatcataaatttatatgaaggtggcaggctgatgctttggctctttatgtgtgtgtcactttcttaccatttttctcttctccaaaacaggtggctccactagctattacaaactttgaggactcgactctagttgcttcttgtatattcttgttggaactttgtggcctctgtgccaacatgcttcgtttagatattgctgcactacgacgcatctcttcctactacaagtcagttcaagaaaataaacatgctgatctatcttcactaagtgccccagagctccatgtgcagtctcatggagctggcatagctcctgctctagctcgagcactagctgaagattatgtccaatctgatcatctgcatgttttggagcagactcaaacttcgatggctcccaagaaggaacagccacaacatcctcttattgctattctgcagcaccttgaaaaagcaagtttgccatcattggaggaaaataaaacttgtggattttggcttttgactggtgttggtaatgcgtctctttacagatcgcaacagaatgaagcaagtcaacactggaatttggttactgaattctgtcgggcacaccatctcccactaagtacaaaatatcttgctttactggccaatgacaatgattgggtattaatttttttcttctcttggttgctatgtttttctttttttttaattattatttagataagttcccacactgattgtaattgtgcttttggcaggttggctttttaacagaagctcagatagctggatttcctattgaagttgttattgaagtggtaaattttatatctttgtaccacataactttagttgcaaataccacacactaatttattgctgttggtgtttttgttcactgttcaggcagccaaagagatcagggattcaagattgaggactcacatactgactgttctgaaaaatatgatgtcagttagaaggaaagcatctggtaatataccttcaggaagcagttattcgtctttatctgctgttgatggcaataatcccatggaacttttctgcattcttggagtctgtgaaaagcaaaaaaaccctggggaggcactactgattaaagcaaaacaaatgcagtggtctttgcttgccatgattgcttcatgctttccagatgtaactcctctctcatgcttaagtgtttggcttgagattacggccgcaaggtaataacttgaacatagtatgattttttcctgctaacaatttcacatgcttcattgttgttctactgtgtaattttgttgccttcgtgtttgttgctcatcttaagggagatgtcctcgatcaaggtggatgatgtttcttcgaaaatagcaaagaatgttggatctgctgttgaggccacaaataaattgccaagttctggcagaaatgttgaatttcgttacaacaggaagaatccaaagcgaaggcggttcctggaagcctcacaggaaaagctcacaatatgttcctcactagatagcacatgtgggccagactctgcttcaacttccaattctacctatattgatgatcatcaggaaagaggaaggccaatctctggagaaaccataatgtctgttgatattgatgaaaggcttgcatctttatcaaacatggtagcagtgctttgtgaacaacaactgtttctaccattacttagagcttttgaaatgtttttgccttcctgctcgcttctttccttcatccgttctctccaggttagtagtaatagtttatttagtttgtaattttttttctcgaacatgcaggagaactgagtgtcaatgcatcatgatttaatttgcaagtaatattcaactaatttgagcatttctgtgttacccttgaaaggcattttctcaaatgcgtctgtccgaggcttctgcacatttggcatcgttttcagcaagaataagagatgaagcctctcatactcaactaaactcttccaaagaagtgtcagttatagcagaatgggtggccgttacagctgtaaaagctgcagatgctgtcctctcaacctgtccatcaatttatgagaagaggtgtttactgcagcttctttcagaagtggattttgctgatggtggcacttcgtcatctaactttagccgaagatattggaagattaatttgtctgaaccttctttgtgtaaagatggtgatatctacaactggaatgatttgatggatgatgcttctcttttgacatcattagaaaaggacggtcaatgggagcaagctcgaacttgggcaagacaactggagtcaagtggcatagcttgggagtctactcttgaccatgtcactgaatcacaggtatgtggcttcccccttaatttctgtatagtccatctatatctatacaaatgaattatgagtttcaacttgtacacgtgatcacttttttgacacatcttgtcttgccatatatgaatttaattgttatcactagtgtttgaatttacacagcttctttagtaccattcgtcaatgacatgcagcttagtaccatctccaaaccattgcacatgtttgctgcctgagataaattgtactacttgtgtttaacaaaattggattttttattttatgatttttctgtgatttattatgaattttcaaagattcagtggaaataaataaaaaagaaaaagtcaaaaccaccctctaaaaccactcgatggggttatttgaccggttttgaaagttcagggggtagaatatccggttttatagtttggaggatgaagtattccaccttagatagtttggggggttatgtagactttttcctttggtctatgccaaactatcttaaatttgactatgtttacagaaaatagtatcaacatttatgactccaaataggtatatatgaacatatgttccatgattaatttaatgatacttttttggcatcataaatatcactacttttttgtatacatttggtcaaacttaagatggtttgatttagggcaaagctattgcatttttttcgggatggagtggcccatgcaacatcataattgctcttcatgccataaattagtcaatgtgtaaattttctaataacattcccagattgaacgtaaaggtccatcacaatgattaccattccactgacctcccctgctgcatgctcgcccaatgttcgcatcacacaaattctgcttcctcgatgctatggccatccactggaagcactgttgccacccttgctggcaatttgtgaaacataagtttgttggatatatatagaaattctaaatatttttttagcgtaaaatacagcaggggaaacactaagtacttggggaagcatcatgtaaacaagagtacattggtgcacatatttacaaaccaaatctcatcgcatggatgcaatctgaatggcctgaatgagcaggaaatcccctcgtctatctttatgcagatttaggctcaattaaggtgaacacattacacatcatgaaggttcagattcagtctgatggatgagattagtttgtgtgtatgtgcacctgatatttgataaactattttatttaacaaaaaatagatattccatttttgtttttgtcttgacatcagtattgcattcacaataatgggaaaaaaaacagaatcacaaccaaccatgatcactatactacattgccattggtgtacagtaaggattttacaatgagtcaggtcaatcatgtgcagctacggagtgatgtaccatctgtatacccccgaaaccatctttttaatcactatgacccgattgtggattacattacataattggcattcatcactacattttgacattctcagtatggccttcttatgttatgctgacatccagctgtgggacatgtgtaggcagaagccatggttgctgaatggaaggagtttctttgggatatcccacaagaacgtgcagccttgtggggtcactgccaatctctctttatgagatattcttttcctcctttgaaggtattcttttcgataagtaaaatgcacagaagtgctgtactccctccatttgaatgcaaggtgtcctagttctatgcacatatattaaggaggcattaagatgagagtagccttcgtctttctaccaaagaaacaaacatgaaatgatcaatgccatctagctgctgcatgtgtggagaaaatcttgcttgcattatttgttagaccacgtttattgctggcagcttttcagttccattgaaagctaacccattaaaataagggcatattaggaacactcatagatgcatgcttggagaatgtagtatggcttgttaaaaaaacggcctcagatcctaaacgccttgtattacgaaatggagtatttgttttcccttatccttgtaaatcactaaattgtatgttcattcgtcgtacatgcaggctggattatttttccttaagcatgctgaagcagtaggaaaagagataccagcacgagagcttcatgaaatactattgctctctcttcaatggctaagcggaactatgactaaatcccctccgtaagcttcatttttccttatttatgttcacattgtgctcaatcttatcatctccttgccaattagcacttcccttttgcagggtctatcctcttcatcttctgcgggaaattgagactagggtgtggctcctggctgttgagtcagagagtcaatctaaggctgatggtgaatttgccacttatgctgttgctcataacatagctgttggaaacagtagcagtattatagaacagactgctgatgtcatcacaaaaatagacagtaatatgagctcgccgcacatgaaagttacagaaaggaatggcacacgggacagtttatcaagccaacatgcgcaactctttgagtctaacagcgaagcatcttcaacaacaataaataacacgagagcaaagcgaagggtgaaaacaaattcaccacttagacgtgggggcaatgacaatactgaaagtagaactaatgagctggataacagttctcatagttcaaagattggagaacaagctagaaatttactttctgaagaggaatttgcaaaaatggaagcatctttatctggctgggaacaaaatgttaggcctgtagatatggagaaggctgtgctctccttactggaatttgggcaaataactgctgctaagcaactccaacaaaagctgtctccatcatatattcctgaggaacttgtccttgttgatgttgctttaagaattgccaatagcagcagtagtggagagatcagtttgtcatgctttgacacacaggctctttcgttacttcagtcactggaagtagcaaatagctgcgatatgatcattagcccatcacaggtctgattattttatctcattcattttatgacatgattctgttagaaacttgtgggcacctggaaatttccatttttgcatgagtagttacaccaaaataatggagttactgcttttgccacttcttccagggtggtgtgggttatttctggggtgttgttcaacaattatctagatagaactatacctgttatactccatccatcctaatatataaggtgtaaccactttttattcgtcctataacacaaggcgtgctctctttctctcccatctagacgcgcgtgcatccatgcagtagtacgagagaattaaatacgttccttggtctttggaccagaggatggaaggagtaacattgtactattgtaacatatccttggaaagtgagaaaagtgattaaatgatacgtgtgtaaagaaatattttctcaagtttatgtggcttacaatgtgtcgcggggtcgaaaccgctgcaagcatttgtcgttcatcaggtgtcggaacatgtgtctccgggtgcacttaagaacacaagaatcacagaggggacgcaacagtttatcctggtttgggctatcggggccatacgtctagcagctgatcatccttatactcaaaagcacccaaaatcgggggtttacaatagagtgtaagagagaggtttggcaggggatcgctcggtgctgatccttggcagccttgccgccggtgaggtcttcccctcgttggagaggaggaagacgatggaaagggggggggggggggggagctcttggtactcctctcggggtggctttgctctcggtgcagagctcgagctgtttggtgaggacaggaatgatctgtttggaatcgtcctaccccctctaggatccgacctccccttatatatcgaggtaggtcgggtacatgatggtttgggggagtttagcctatggtctacatgggccggagtacaggagcatcttgcagtggcgtcgtgtggaccttggcgttgtcgtggagccgaagaagccttgggcgtcgtctggctgctctgttcaagctgtgtcggcttggaccggcctccaccaggtacaccttctggaggcttggtggcgaaggcagccggctgggctagcacgcggcctcggaaaccctcaagcccctgaagccatcagaggagtttgtcttggcgaaggcaaccgaccgtgctggcacgtggcctcggaaaccctcgagcccctgaagccatcagaggagtttgtcttcttgcgtcaatcccgtgcgtgaccttgtcggaggagtggttgacagtgtcgtgcctattgagcagtgccaaggagccctcaagccttgggggctcgaggcgcctgtctttggcccgagccttagctagcgccgaaggctgggagggggccaaggattgggtccaggcttccatcgatcgggagcttgaggctcgggtgagcccccgagtcccgagcagaggcggagggcgtgcttgggctcggcccaattccttagctgcagtggcggagctcgtaccaaaacatggggggggggggggggacattttgcctaatataaatcaacatgtacagaaatctatataagttatttggcctaatcgatttggcttcaagaaattggaaaatcggaagcaaagaacaactttttaatcttgagtgtgcatgactagcaaaccaaattattggagaatagccaacaggcttgaatagattgattagagttttacacaggggttacaatatatagaggcccaaggggccagtttacatgagccacataggatggcgcaaagcagagtaattagcagtaaaagacacagggattaaagggacactagcacaggatactagaatactctaacacaaatcaccaatcaggcactgggcatggagcagactggggatttgaatctgggagcagagcaaccggagacaaagctaggcagtgttgacgagtcgacaacattgacgcacgcggcttcacacttcgctgctctggaaggcggagcggacgacgacgcgaccagcgttgctggtagatcttgcaagctgtaacttttgggtctccagagtcaaattttgcatgggccatttactgattactgaatcactaaaaaaaattcagtggcagggggggggggcatagcccacgttgaccgacgtgtagctggagggtgcgcgcgagcgtacccgatgggtatagcccccgggcgatcctggaagggtcggttgggggatctctcggtcgggaacctttgatcccgaggcttaacctatgctaggatctcgtcacaatgttttatgcacgacaacaaatttacaataattctatccaaagcattcacatcaccttacctgttaattattggctagtgtctatagttgtaaagttattgatgttatgtcaagatgttagcatacaaaaaaatacattttgttctgtgatacaataattctcttctaccttaggtttgcatccattttggtgtataaacttgcatccaatacattttgtgaagtgttggtgcaactcaggtccatttgtatattctgttacatcaaagctgcttagtacatcaaagtagttctggccgtatcatgaaaatgtacttggctgtaaagtgctaggtaggtactggttctaatcaatctgatatcaggcaaagcaacttatttgtgaagtgttaggtagctactgtttctaaccaatctgatatcaggcaaagcaacttcatttattacttctgtgaacttattggttaaacaagcttgtgaaggcccttgtttagtttggtgggaattggaagggattaaatccccctacaagtcaaagtccccctcgtcccctccaatccccttggggaggggattgaccaaacaaggccttatctgcttgagattcgtggatcatgatcatgacgcaattattcttagatctggggttggttattgaatattgattacatgtttgttccttattaccaatagtgtgaggtagtgcttcaagttgaatctttgatgcaaatgatattgattttgtccctgctcatcactccagtatgttaaaatgttgtaaataagtgttactgtgatccagaaataagaatgatgttttatctcaggttatggagatactagctgtgaaatgtggtgagggccgtgggcgagctcttattaggagaataatagcagttgttcgaactgctaaattgttgggactcccattttctgaagcatttgagaaacagccaattgaacttctacagttgctttccctgaaagcccaggattcttttgatgaagcgaaatttctggtggagacacacatcatgcctgcatctagcattgccagaattctagcagattcatttctaaaggtatgttcattgctcaggttttaacagcacactttttgggtatgtgacattgcagtgctactgctatattacatgatatgctttcaatccaggggcttttagccgcgcaccgtggaggctatttggattcccaaaaggaagagggtcctgcacctctattgtggagatcaagtgacttcttaaagtgggcaaaactatgtccatcggaatcagaaattggccatgctttgatgcgtttggtaatgactggacatgaagtaccgcatgcttgcgaggttggtgtatcttctgatcccttgttttgcttttcaacattttttcccgcctcttaagttgtcttgaaatgtcattgcaggttgaactcctaatattgtcacaccacttctacatgtcatcttcttgtcttgatggagtggatgttctggtcacatttgcagcaaatagagtggagtcatatgtttcagagggggatttttcttgtttagctcgcttgatcactggagtgagcaatttccattccttgagcttcattctttcgatccttgtggagaatggccaattggagttgctgcttcaaaagtattctgccactgacacagccacagggacacctgcatcggttcgaggatttaggatggctgttattacatcactgaaacagtttaacccgaatgatgatgacgctctctctatggtctctcttcctctatcccccacctcttgttactactacaaatctatttactatctgacaacccacagtaggttcaaaagtaggtttaacacattgccaaacagaatttaatcatttattaatcacaaaagatcatcagtacagccattatcactacgaatgttaaccttctgtttccttatactctattatttatgcttgtgtttaatgcaggtatacaagcactttgacatgaagcatgaggctgcttctctccttgaattgcgtgcagagcaatacatgaacagctggttatctcgatatgacaaggaacggcgaaatgatgagcttcttgaggctatgcatcaccttgtagagacggctgaggttctttcaactattgatgctggccaaagaacacatcgtgcttgtgcccgggcttctcttctgtcacttcagatccgaatacctgatcttatgtggattggtctttcggagaccaatgctcggcgaatttttgtggaacaatctaggttccaggaagctcttattgttgctgaagcatacaacataaatcaacctatagaatgggctccagtcttttggaatcaaatgctaaagccggatctaatcgagcaattcgtggctgagtttgtatcagtgctgccccttcagccaccaatgcttctcgagcttgcaaggttttacagggcagaggtcgcagccaggggagagcaatcacacttctctgtctggctttcacctggaggcttgcctgcagagtgggtgaaacatcttggcagatcattcaggagcctgctgcgtagaacaagggacatgaggctgaggctgcagttggcaactctggcgacaggcttcattgacgttctagacatttgcaatagagttttggataaagtcccggacaatgctggcccgctgatcctaaggaagggccatggcggggcataccttcctctcatgtaaatatttcccttttcttttttagatgcattgggttcagaactttttggcagttaggctatcttgaaaggcacatgaatcttgcaagattatatcagttttcgttggttcggcatcttgacagaagcttggctgtagtcttcgacttggattctcatcgatgatgccatggaagacttttctgattgtatgtacagcagtttgagggaagccggcataggtcggatttttttcagcttcatccggcaggtgttttctcacacataatatactggatgcttgtaattttttttaccgtgcccaaataattaaattttgagtcggtttggtcaagactttattgtacgaagatgcaccccgtatttttgttccttttttttgtttgtttgtcttgcaagtgaagcactagctgccttgtcattgtaggtcactgacgcgtccagtgttcagtccagcgaaagcgtaaatccatttttgagctgccattccgcgcagaaaacagagcaaaaacacgacagatgtgtcatgctgatgatctatctattcacgcgcttgccccagcattcacgtcaagctccacgaaataatctgtcaacgttccttatgcacagaatgtataacagcagcaagaagagtagactacaggatcctgagctcgtccatgtgtaaaatacgattgtgaataatatacaatacaagtgtcgctttcaaacggaataatcctcgaatcctgtgtaatttgtacgcaaccaatggtatcggaccatcattcgcatacgagctgagtcaaatcccaacagcagacagccacacctgaacaaacccctggctgcggcagttacaaaaaaaggcaaataaattaccaccattcgtcgacacctcagttcaggtgcagatagactcaaccttggatcactatcagaacctgcaaagtttcagggatcaattgagagcccctttc
